United States Patent Application Publication US 2013/0034624 A1 - sequence listing, part 5

SEQ ID NO: 28125 - DNA, 1707 bp, Bovine  19866881094290
  misc_feature (1)..(1): n is a, c, g, or t
nttcaaattactttcatgtcctggaaatgagaggcactgtcccctcacccctcactcctttctcatatagcatcctactgagctgccattgctaacaagatcatgccagatcccaggggtgcctatgtgcaaagaagcctgaaggacattgagctaagaggatatacaaatcgctttgggacaccgaggacttcctggatgattttattgacaaggaactgtttttgctttttttttttttttgaaggatagaagtttgtcaattcagagaagaatatccttagcaacggatacagtgtgcaaaggcatggaaaaaagaaagagggaatttattctctttaggaagtgtgaaggatttgcataacttcagcagtgagtgtgtgtgtgtaaagggactggacatggttgatataggactatatttcaatgaatggtgtgtactccactggaaagtttttactctgctttttggagaaagtatcaattgtccccataatcaataccttcttcatagtcaaattcaaatttcaggaatagcctggattagaattgtctttctggctgtctcctatccctatctcttcttttctagacaactgaatttgcagatttgataggaaccagtggctgaagaaaatttcctctgtcaaccagtttatcttgttactgacatgaataatcaaattcaattggattaaacaagttgtaacacactgtcagaagccattagcaatataagagtgtccagccataaagaactctttttgtatatcttagagttttcctcatgtagggaaaaactcaaactaaaggaaacagtgtggtttcatttacaagctctgagtcctctagggtcttctcataagcactgtggtttgattttttctggaaatagcagtagcacggtcttcctgataatctcacatgtgtaatgttttcttgaaaaggattaaaaagcctggtatatctaagtttgcatattatccagattttcaaaaggaaaaaagtgaggagacataaatcaagaccaaggcagaggagcctgatacccctgctgtcttctgagagtttatctgctttctggagctgctgttgtgcttttcctgactcagtgtcatgctacagctcctaagttcacatggctgctaattccctgtatatacacaggtagagaagttggctattgtaattgacaagatgccagtgactccctggactatcggaagtagaaaacattggcagagctacataaaaacataaatgagctgcagatggacccacattgaacaatcctggtgtactttgcactgatcattttcctttaaagacaatcccattgcaggcaaaaacaatatctgatgccatccatttagtaactttattaaaatgcctagaaaatagagattacttacacccactcgatgcatttttgaatgtacacactgtccctgatgaaatgatcaatcaagccagatacacaagatgaaacttaaatccacaccaccattttctcttctcttctggacctaatcatctcaaacatgtgttgatcctgggttcaagtaaataaaatgcaaagagagaaaaaaacaaaccctaagagaggaagttttgatgcttcctatggattcattttcacaaagtgctagaggacaatagcataaataacaactgtgcatcaggtacctgctctccagcacctcagac

SEQ ID NO: 28126 - DNA, 1346 bp, Bovine  19866880345318
  misc_feature (1)..(1): n is a, c, g, or t
ntaatgaagttgacatggtgttacatttcgtagatctttaattaaacatttattaattttgatttgcaattttcctctgtgttctttcagttttcagacatttgctgggtccttaaaaagatgataggccccaggccctgtgataaaagggcctaagtgttaaaaaggccctggttaggctggatcttcctttaacttaacaatctaggggcctggccagtcaaggctggaaagtctccctgttttccagttcatcctttcctttaggaggagaatcaaagtaagtttttattctctctttcttttacttctagaatttggggaaggatctgaatatcctattattaccattttaacactgtaggtatgctctagttcaaaaaggtccaagataataaaacctgaccttatcaaagaatatatgaattgaaggatgataatttgctttacaaagggttccctgctccacaaaatgaattcaactttggtgtccctaaaatagccagttcccttggtgcatgttaaatataattcaatttacaaaaattcgatttgcatataaccttttcagtagcacatccattgtgcaaagcaatgtacacttgtaattggctgcaaattgccaggagaccacctttgcacatattgttcctagatgtgcaattttttcttaatctccaagggatagaaagtggagtggctaaatttccagttgtttatctgatcccactgactatgctgagaaaggacatttgccaattattagggggtgacatgtgctttgtacagattaatgttgtgtagtgagaaacaggaggtatgggatggttaagggaactgtggactgtctggctgggttcagggtaacagtcttgctgagctgaggaagctctctttatcctggtggcttgacaggcatcaggagaaagtgaaatgaaacaagggatagtcatggatttggatatcaatttttcccccatgaggcagtggaccttcaggagcatcttcccagagagacagacctagtctagtgacctgagccatatggttaaacagtgtcacagcagacccaccagctacagtgacccgcccccaggggttctgtgtgcagtgggttctggccacagaaagccacggcactaacttagcaaggtaagtgtggcattttctcacatgtcacataaaaagtgacatcttttatggcaaattgaatgaattaaagtagattattgtccatgatgccaagttgcatctaaaaccctttttgacgtgaatattaaaaaccctgcctggttcatcacactcttttcagacacgataccttcctcacacattcccactgcccc

SEQ ID NO: 28127 - DNA, 1556 bp, Bovine  19866880357057
  misc_feature (1)..(1): n is a, c, g, or t
nacaccacagcccataggtttgcagcctgccttactttgcttgatgcgtgtatctcagagcaattcccactcacagttctgaagcccagcaaagtgaagaactctgcttccacaagcagcatctcttcagacacattttcactttggaggtgctctatataaaaaataattaagagggtcaacatcatagcagacgtatttctttattagaataatttgaagttacacccttggtgatccaatcaaccagagactcaaagacagaggaaaaaaaaaaaagcaagtaattaaaatacataaagcagaagacgcaattactggcatatatcatgatcaataaaatgacaatgtaagaaggcaagcttcccagcgcaccctgaggctagcacgccaagtctctatcacactggggagaggcaaaaaaactccttaggcaagtgacgtgtagacctgtcaggcttccacctcctcacagaggggatgtgaacactgtcaggcgctgtggttgttctctgtggtggggcgggtaccttgagaataaggtcatcttcaagcacaattcccaattttttccttcccaaatgcatataaacccaatgctcacagctcaggttcccaagaaaatatgcagacatgttttttaaaaataaagaatttggggaaagttaatctgtactatgattcatcacactgatggcccctctcctgttggctcagccctcatgggacaggctgaaggctgcccaccacactcagaactgctgacactacaccattcaagaaggagtattccagcgcaagcaagaaagagggctgttacccacggacaatcttgaatctctccaacttgttaaaaataaaacttaacctttaaggaagcagacttaagctactagaaacaaattctggccatggacttaaaattggcagaaccctccctgtgtgacatatcatgggagttaaggacagtcttgggcttcccaagtggtgctactggtaaagaatctcatgccaacgcaggagacatgagagacaaggtttccatccctgggtcggggagatctcctggaggagggcacggcaactcactccagtattattgcctggagaatcctgtggacagaggagccagcacagcacacggcaggacgctctttgcagatagctccttagggacttcttaacccaagccagaacttggggtcctcactgagggagagggagcctctggcctcagggtgcagcctgggaccgtcagcctttgggccgttaatactgagtgtccactgcgagcagggccttgtgctggctggggtggagagagagacacagggagaaagaggaagtctggcttttgctggttaatctgctgggatgggcaaaacgaaccccacaaaaggctgtgcccaatttgggtacagactgtccccagcgctgcctcttcttgcatgatggtgttcactctggatcccagactcttcagcagattcccaacttaggcttgttgcaagaaaggcaaaatcagaagacaaccagccatcagcaatacagaggac

SEQ ID NO: 28128 - DNA, 847 bp, Bovine  19866880427297
  misc_feature (1)..(1): n is a, c, g, or t
ngtttattccccagatcacttttatcaaaacctcatttctcaactgaaaaaaaacttgggtctgccgggattaagttccttgctcaaggtcacgtggctaagcaatggcctagctggaagtcaacccaggtcttctgacacccagcccagtcctgttcccactaattactttaatttcctactgacctcaaccaatgaaatgggtcagtccttttctggtccagaggctataaactctgaaagtgccaagcaaggccctgggtgcaacccctgtgtagccttctaggggtgacctctgggcacctggtaaacgtggcccacagctggactgcttaatggagcccaggggtgtaagtgaggaagggaaactgggaagagtcaagggggctggcctatgcctgccctcttcctcccgggcttgtattctgaaggccacatgctaattatggtcaaagtgtaggcggggattcccgaatatgctggaaaaatgccaaactcccccctcaaacttctgttacagtcttcttacagaaacaaaaatgttttacatggtatatgcacttttctgaatctggcttaaaaagatgagtgattgggacaaaagattgggaaagcttgttagggactggagctggttaaatgtacagagtgtgtatctgtgtgttttatctgccactcaaaggcccaggcaggctgtcattaatacattctctggccgcccactgccccagagttgccccaatttttctaagccctacagcattgtcctttcatttgtctggtgagggaattagagccagtgaataagaaggcaccaccccactcagtaatgatatatttcctttcc

SEQ ID NO: 28129 - DNA, 1112 bp, Bovine  19866880441857
  misc_feature (1)..(1): n is a, c, g, or t
nggttggtttcctttaggagtgactgctttgatctccttgctgtctaagggcctctcaagaatcttctccagcatcacagtttgaaagtttcagttcttgttagtggttattttccccagttcccacgaaaggaaactgaggtagagagatgttagctgcggtaacatctggtagcattgatggtagctgcgtcaagtcacagagctgataagcaacagagttagggctccaaccaggaaatagggttcagtattacacaaaaagacccactctttctcgccctgctacttttgaagggggcaaggtcacatcgggtttgaggttgatccattctctgcctgcctaagatgcaaaacaattccctcgagttttggaagaccgtgcaggcgatgatctgtgaacgcctgtccatccttcaaatctcccttcctccagggtcacttctcccaggtgtgtagtcccctggcagaaggcagttggcaggtcggggcaggtgagtagcctgtttctcagtctcgtgtcccttgagatcagttagaatagagagcagaattgtgggaactgaggggctcaggtcagcctatgagtcctcaattttccaattcctacaccctggcaagccatggcaagtgtgtgctccagctcagctgcctgctctgggacaaagaagagcctggggttgcccagcacatcgccatcactggttttttctattagccagagaaaggtcaggggcaatcacctggccgaggtcatgaagtcaagtcaacacaaatgttgaggtaactgacagagctcacactggaattcacaaattctttaagtctgggccgcagcagtctttcctactctatttcatgtctttgaaactagcttacctgcatctctctcttggcttcctcttgaatagtggctttataattagatttttttgtcagtctcatctttcattttacagtggaatgtgatcagttacaaactacaacagaacatgctcaaagctgtgccaccagcaagtcaaaaggccccaatgtaatgtccatagcttgttgaaaacacaatcaaatggctattcagcaaatctctttttctttattctttttttttcttt

SEQ ID NO: 28130 - DNA, 1181 bp, Bovine  19866880442197
  misc_feature (1)..(1): n is a, c, g, or t
ntcaatcctaaaggaacttaaccctgaatattcattggaaggactgatgctgaagctgaagctccaatactttggccacctgatgtgaacagccaagtcactggaaaagaccctgacgctggcaaagagggcaacagaggacgagatggttgggtggcatcactggctcaatggacatgagtttgagcaaattcagggagacagtgaaggacagagaaagcctggcgtgctgcagttcatggggtcgcaaagagtcagacatgacttagtgaccgaacaacaaaattgatataaataagtcattcttaggtacacatctaaaatgagtggctatttaaaaacctattgaagataatcactaacaagcatgtattttaaatctgagaatcctctgttctggagtaatcttagtggaaaggctagcgtatggagaggtgaaagtaactgtatggggattgagaaggacctgccttctcccatcacactcttctccctcccatctcaccctgggggctctgtgaggcaatgtctgaaacatctttctaagggaccacctttccctgggttctccccaatcccattaggccatctaagtttaaatgaactatgaaaagatttgcaaagcaccttgcgaggtgccagcagacacagaaaacagcctaagtgtcggattcagtcttcccttggcttccacttctttcattctagctcctggcagcattgatttcccgtgaagcccctgagaatcacagatgtcttaatataaggctcctcagacctcattaatttttgtatgctgccacttcatggtaagaaatgttgaaaggaactgatccccagcctgtttctcttggtttttactccctcactcctcctgtgttctatcggatggtactctctagagatccacattctagcaaagagactcccccagtcagatttccctttagcggcagtttcctgaggacaaacacaatactaacttttagggagtgacaaaactaaggagagaatttttctgaaattgttgctctgacgttcctattagccatgaatgagagaaaaaaatctactatcaatggactcctgttataaacggaaagacagcctaaacgaatgtaactggaacttatttcttggtcccaacaatgctactagcacactacatgtacaacacagaa

SEQ ID NO: 28131 - DNA, 1886 bp, Bovine  19866880443716
  misc_feature (1)..(1): n is a, c, g, or t
ntatccttagaagagcagatgctcttaattttgatgatgttcaatttatcatttttttcctttatagatcacgcttttggtgtcatgcttaagaaatctttgcctcaccttacataaaaaattttgaaaaaagttttgaataacaaaaaggaataggaacaaggagaaaagacaaatgactaagtagatcaaaatatttgaactcatatcataaggtgctaatttgtctagtagataaagaacttctaaagtcaataagcaaaagaccagccatctagcagaattaatggcagaaatacagcagacagaagatagaggatgaaatacaaacgcctctcgtacgtaagactcctaacttcctcatataaagaaagatgtaaattaaaaccatagtgagagccactgtttccctctcaggttgtcaaaaatcaaaagtgaaagtaaaagtcactcagtcgtgtctgactcttttcgaccccatggtcgcaattccatccagtccatgcaattctccaggccagaatactggagtgggtagctgttcccttctccaggggatcttcccaacccagggatcaaactcatatctcccgcattgcaggcagattctttttcagctgagccacatgggaagcccaagaatactgggagtgggtagcctatcccttctctagcagatcttcctgactcagtaattgaaccggagtctcctgcattgcaggcggattctttaccagctgagctactggggaaacccagggacagttattagccccaattttatagccaagaaaactgaactataagaagaccagataacttgcctaacgtcacaacagcagaacaggaatttgatcctaggtgtcagtgacttcaaagacttaaaccctaaactacacaccatcctcagcttattttaaaagaccaatattcctctctgcctggcagtctttctgcttagagaataggggcaaagtgaagcttacctcggtggcagcaaacactttgaaagctgcctggcctggtctgcccacccatggccccacagtcctgtttgcagttgttagcagatcttacctagtctagttacccacctgtgttctcagaggctaagttcaacctctgaaaaaaaaaaaaacaacaacaacccattaatgcagaatagccaaatatatgctgttgattaagaactgtagtatataataagcatatcgacagggcggcctggcgttctgcagtccatggggttgcaaggagttgaatatgacttagtgactgaacaacaacaacagcaatcatacagaaactgcttactgcagatggaataaatggaacctttgctcttcttttccagtccctcttgttatggagccagtgaaaacccttaggtcactgtctctgtcttggcctgtccttacctcatgtggtccacaggctctgcagaccctcctgcccatgggctgggctgtcctgctctgaaatggggtttgtgctcctgtctcagcctctgtttttcccctcattattcagagctccctctaaatacagaggctttgtccattgtattgctcaggaggctttgcttccctccagcactgttctcagaacgtctgtctgctactgagtcctcattactggggcctggtttctttctccgttgtgtggttctcctgctttctgtcccttaaaactgagacctctgtgttttcgggtcagaggcctctgggttctcttctgctgtggggacaggaaaaggggtttattttctgctttaagtaggcagagtaatttctagtttgggtcagaagttaacccaaaaagagaatgcatatttctatacagtgggcaaatctctgataagtagctcctgtgtaatactatcaacc

SEQ ID NO: 28132 - DNA, 1451 bp, Bovine  19866880444783
  misc_feature (1)..(1): n is a, c, g, or t
nctgggctgctccacataggtgtgatttcagtgactgactccagaaggtgagtgctaccaatgtctaaaaaaatgatcaagaccaggcagaaacaattttttaagaagatggaaaaataagtagaaggcttcctttcatgaaagactaaaacctcctctatcaaaagtcgtaatagcatattcttataaatttgaggtccctgaaacagctactcaaatccagtcaattaactataacagataacttcagtaggcacaccaaatagtcttcctttactggcctggccaagtaaaaaagttttccaagaagcttaacagctttttttagacgcttgtttataaacttgcattgcactccatgttcactacccacacccctcatgccccacagactccccccacacacacacaaaaagctaataagcttgcatttctgactatgactcacatcaactaagaaccagaagattaacaaaactcttggatatgactaagcaaaatgttctaattaataaatagttaagaaaaacacaaattttaaaaaataaaagaaaacatatgaaaacaggagattagggagggaaggcaactttaaatccttgtaagatgtccccagggaggaggggggaaaaaaagcccacatttttctttaagggctgaagaatcagcagcaataactcaaacctatcatgcccataggtggttttaagagagttgtattcaatacaactggcagttttccacataatatttcttctttttgattttctgttttacagaattccacttgagagtttttacaatttatttctcttaccaaatctgaaataaactaggttatgacaaatcaagaacctcatataaagcaaaaatcatctctctggccccttctctactaaaaatcaccatattttttttactgtttctttccaaaacaaaagcaaaggcccatgaaatttgacagtctgatatgttataaatatttaatttcatgcttatacttactatttaaactgaagcaatacagaaccctgacgatgggaaaaggaaactctttcgccttacaaggaaaaatctgtcaccagaatttaataatattcattaaggaaccgcacactttcatgcggcctcggctgtgtcagtcacacacacgccgccccgccccctgcgctgtcagtcacgtgcaagccccgcccccgggctgtcagtcccggcgctggcccgcggctgaactggcggcgctgacgtcagctggcgaccgcggccgcattcctaaacagttcagacaaacccactggtgggaagcttcgaaagccctcagctgtagtgaagaaagcaacggcttggctggcagccagactcctgagctcagcattttgtaatgcacttcctttttacttaacagcttgcataatgcctttaacccttcctttacctgcttcacaccttta

SEQ ID NO: 28133 - DNA, 818 bp, Bovine  19866880451491
  misc_feature (1)..(1): n is a, c, g, or t
nactaatccaaacagactaggtgacataattcaagaagctgactttgttccctgcaaatctctctcctatatgacatgaaattctaccaattaaaaaaattcctttgggactttccctgctggtccagtggctaaggctccacgctcccaatgcagggggcatatgttccatcccttatccaggaactaagatcccacatcccaaaaggagcatccccccaaaaaattgttttttcaattatagacaaggaaacttctaggaatgactgtgcaggagatagggaactacaaaagggaagcctaagattactgagcagctaattttatttcctctgccttagtaatagtaggattttatagaaaagccattaatgactaaaaactctgagatgaggtcaaggaatctctgcattttattacggactcatttaatcaggctgatttaatcctggggttctccaagaggggttcccttttgcttatcttatcttatctaataaatacacagtaggacaaggaatcagtagtaaagctcccaggctatagggataaaaactagggtaaaaggggcctacaacaatgacagctgcattactctcatagcagaagctcaacatatatacatacatttttactaaaatgctacttatatccacatatataaacacatcataataacaagagttaccataaatttagcatagactacatttactgaagtatgtttacatgacaattttcaaaacgtttgagagtcaaaatatctgtgccttcatatagtccctaacttaatactaagatgtaagtatgtcttttta

SEQ ID NO: 28134 - DNA, 2420 bp, Bovine  19866880454943
  misc_feature (1)..(1): n is a, c, g, or t
natgctgaaatttaaaagccaagcccttagaccagagccctggagtaaaagggaagattgtagaaagccatataaatggattggatctcttgttagtggtctctattctcttggtagggccagggaagccagcttattatcaataaaaaagaataaacactttataggaagcaatttttgctgtcaccaaacgttttatatacctgtcaataattgtagcagttaaatatgacgtattgatgaatacagtgggaccaaaggatacttttttctgattagggtgaaaagactttatgttctttcttttatggatgaaagtaatccaactcacaaacttcagctgtctataatcctctatgggaaggcaataaaagagaagggaaattctgaaaggagcctttttaaccaagagctcaaccccatggagcctatccttactgaactgaattggtttcctaggctgtctggagggtcccttgagggtctgacccgtggtggcatctgtgtggggactttggccaggaggccctgtactcctgggcacctatctatcaccgtctcaggtccgggttgaccagatgcggcagttaggatgtctctggctgagcaggcagagagaactacttgaaagatagagagaggcacttctggagtcgagttcacatgaatatgtggttcatggttcatgaaaatgaacgcatccccacgtctccatctccttcctccacctgcttcatgaagttctgtccatctttcctgcacagatccctggatctctccgtttctctccgtctctgccaccaccctagtccaacgacctccacctgccccctactagtgctgaagtagccagtcagggaggacctggaaaccactgggaccctggcgggtctgcaggggccccctggggtgggctaggggatcagagtgaggtccaggtcaagccccttccccttcacaaggcccttgtgctctcagctgctcttcatcagctggattctagctcactctttgacttcaggctgaacactgttttccttgggggcgttttcctgacccccttgaacctgccatggcaaatggctttgttgacatcatctcttgccctcctttcctaggatcctgagggaaaacagatgcttgtcgatgcatagggcaagtgggaatgagagttctggcttaaagagtgactgcttgagaaacactgcagagtgttattctcccgattgatgatccacttaacagaaaaatgtaagaacttaaagaaatctgtgagttaatttgggtggagctagcaacttaaccaaaaagtggcgtgggagcaattcagaccatgttgggatgttcctggggtatgggtgtaaaaggcactgactggggccttggtccatatcagagtctggaggcaaagggtacaggaggcttttgagggcctgatgcagaaggcagggttatgaattgtgtggaaacaagtgtcattggggtaggtggtatagtgaatagtttggtatctgatattgtgatgattgattttatgtgtcaacttggctatgccacagtacccagatatttggtcaaacactattttagatgtttctatgaaggtattttttggatgggtttaacatttaaatcagtacatagttgactcttgaacaacattggcttaatcttcttaggtctggggaattccctgcaagtccagtggtgaagactccgtgcttccactgaagaaggtacaagtttgatccctaattggagaattaagatcctgcttggctaaccaagaagcaagcagacaaaacaaaaaactgcacaggtccccttagaagtagacttttttagtaaatacatgctaaaatactgcacaacccaaggttgattgaatttgtagacgtcaaacttcagatatgcagaaacagtgggtacaaaaagcggactatatatagtcatatgtggatttgtggattttttgattccttggggtttggccaaacttttattggcttctgttctgtttctctggagaaacctgattaatacaggtagcatgacacaagtttagttatatggattctactttattatatctagttcataatgagatgaataacgtcacaggaataactagcgacaaaagctcactttaaggcgacacaaaaccaaggatgggaggactctgtaagaaatcttatcatttggtgtctttccattcaagtcaaacaaaattaaaagcaattcctttcaactggtgccggaactctccaacctctatttggccagtctcctctgtccatggaattctcctggcaagaatactggagtgggtaaccatttccttctccaattatgcaccaggcatggttctaaatgctttccacatattcatattatctcagttaatcctcatgacatcccta

SEQ ID NO: 28135 - DNA, 1021 bp, Bovine  19866880476980
  misc_feature (1)..(1): n is a, c, g, or t
nactgaagttttcttataatacttaaaaacaagcctattgtcagagccagggacattataatgatcagaactgcacttactttcactccttcacacattttcccactggatgagtggctcccttgtataagtatggaattcactaatcataaagtggatttcatccagatacaaaatatgaacaaatgaactcatgagaaatgacccttgaaatgcacaccaccctcaagtcttgaaaggattttctatttcatcaactttggatgagccataataataaaacataaaatattatacaaagattagaaaatcaagagccacatagtttctcctccgtctcattttcttagcccaactcatttctcagcatttatagctggtccacttggccttccccaggaatcgcaccccttggttgagtgaagtgtttctcccctgtgcttccaggacagtcttcatggcactctcctatcactcactgtacaattttgaaatgacatgggatgtggctcctcctcaatttgattcccagctctgcaagccaaggaccatgtggtgttcatctttctgaacctgccagctctcacagtccctggcgcttggtgggttctaagtcattacttgttttgttgtgttattgttagtatgttgaacaatataggggatagtttgttccccatttttgttcacctgtggcaaacacagctgattgcccacctaacagccatcactgccccttccccctttatccttgcgggagaaactttgattttaagcttcactctccacaaagttacatgctcaggaaatgactcctctttgctggctgggggagagcatcatggtgactggtcccatcaatctttgcagtcccattcccctggcctgtggcccaaatcccactgatgaagtctcagaacatctagtgaggggccttgttcaccaaaacttggtctctccacgtcgttctttctctcaccttctggctgaattattcagcctcttttctccactgaatttc

SEQ ID NO: 28136 - DNA, 855 bp, Bovine  19866880506682
  misc_feature (1)..(1): n is a, c, g, or t
nattgctcaatgctttctactatttcatttcctcagaattgtacttgatttctgcaaaacagctagggcaactgggctcctggcttgaaagaaataagggctggccaaaaagaaaccacataaggatttttactcatcattagaaattcaactcacagaactagatgaaagagtcattttttaattattcagagagcagaaaggctccctacctcagatttccccaagttggtaggttactcatgttttctactaagagtctcattttgtcttgcccagaagaggccaaaaataacctaaatgcaaactgtagtgctacctcacacaccccagaatgaaagacagttgagggccttgtaggcagagttagactgaaaaagacctggggaagttctttctctcatctggaagcagtgatttcaggcccagtcctgcctccaactcatgtgggacttcagagatgcctgaaccaaatgaacactcttttaccccttaaacactgcctgcacaattaacttccttctgcctcatctctgatattacctctgctcacagttttctctaaggtcactgcatagtcaagagagtggctttaccagtgttctccctgagtgctgccccacttacctctactaaacagagattccttcctgtcattcattactcacatctggctcgtctactttgctaggtccctttcctttcctaaatagtaaatattttccccaaaccaagagtgtcttcgtccctttgcttttctctctgggtaatgaatcctttctcatagcatcaactgtgtcaaacccacaggcccacttgactcttcacccaagcagcttctatctcccaccaaca

SEQ ID NO: 28137 - DNA, 2183 bp, Bovine  19866880515801
  misc_feature (1)..(1): n is a, c, g, or t
natatgaaatcactcccaaatttaaataaaaaataaattctgtgttgtgctagaagattctcctgccaaaaactctcacacaattaacacactagcagaatgtgttgctaatttcatgccactggagtcttttctacttcagaatatagaaacaaaatcgggtcagagctccaataataacaggattttgttaaaatatacagccctgtgttgcagatatgttgtagacatgggcgaaaagtagaatcacagtcgtgcgtgaaatagcttactcctgcaaatagaaccagaggaatttgtctccagcttccctgcaccaggggggagagagagagagagtttagaatggcccaattctgtggggaaatccctcattatcaatgtttgtccatccacatacttaaacaagggagacaaactccaggaagagaactcaaggatgcaaagccactaaaccctggagctctaattccctcctttctctcggactccctctctccagcctggcctcccacctcttagcatcctcatagggcctggtcttttccataacaaaaacagagataatgaaaatattttggcagcattcagggctttcacatggtgaccctgacctccaaatcaattttctttattcttaacctgaccttggcatccattctccctggtgttcaatattagttacaaaatcctgaactccaggagaccttccctcctcccccaggttaccaaggcaggccacactggtgaagctctagagaggagagagggagaaggcttcttgacaaagaaaaataagaaagagccccacaagcccgtgcgttctataggcgtctcatttgcaccgaatgccattagctctattatttactcagacaacaggagaggcagccccgctcccgtgctcgcagggggcacactggatgactccatgcatcaccagccggcacagcccagccacttcacttaaatagtgatacgtaaggtagagcctggtacatttaatccatcacccctgggttcgccaagtgcaaggactggaaaaattgcgcacgcctctccactgctgcctgcattaataccaagaaggggagtgagctgaaaagagaaagtgccaatttcagcacacatgtgaaaaagaataaaagggaaaggaagcatatcccagaccaggggtgggagggggtgtggtggcgagggggagattttttaagacggcttttcagaattcttgtgcatttactatgagagtaagtactcacagagacaggagttcggggtcatcatacatctagcaggagaagttagctggcaggggctatttttctgcaaattagttttctctcaagggtaacggtgtgggaggagcagaggaaaatgaattggggcctttgaataatcgtgtattgtttggctggttgtgggacctctgaactgatgctccaagaagtctttccaggccttgcttgtaaatggaccggggtgggaagcctctcacagctgttgatgagtgtcctgtagggcagcaatggggtcacaagtgtggccccacaaaacaatggtccacagaacaccagctccacttggcgagaaaggcacagggctggccaggtggccagacaggacagtgagaagaggcggggcccaaagatcgtgctggtcacgaaggctgtggcaagggccaggagacagacacaacagcgtggcaggaaaggacagatcagctttccttggggggatgtttctagcatgaaaatgaatgagctcatgcaaaagcatgcgtgtctcattgttttcaagtccagatcctgagtgcgaagctcaacatgtgttcatccttcagacatttttctgttctcacttcagcatttacaaacgctgtatcatcaaaaccagggcttctcagtttcccctggagtgccctcatgacagaggagcttaaaggccaagtccaaggactctggaggtagagcccgaaactccctccacaagggagagacttctttgaagtcttacatgtgtttattcttagtaaaagttacctaaactgatatgttgtgcaagtaatggaaatattttgacgttaaaaataacatttcaagttcctctatttccttaattctaggatgtagctcagtctatctcaggaaaaaaggacaccacccatctaatgcacactttac

SEQ ID NO: 28138 - DNA, 1231 bp, Bovine  19866880521646
  misc_feature (1)..(1): n is a, c, g, or t
ngccttgaaactctgacatacgtggaggcatactgatgagatgggtaggccagccaggtcatctgtctctggcctctggctcaaggggatcccagatggtgctggccatgctgtagcaaactcatgcagaaaaacagagagcatctcaccaccacgtggatactaagttaaatccatcaaactcttagctctcgagatatctgcaggagaaaggccagatccaggagtgaggtgccttagaaactgtaagcttctttgtccttgcagaggccctcagacagcccaaatacttgatgcagttattactttgccaattcctacagccagaactgaacagaattctgtgatatcagcagttgtcagtcaacaaacctctctcttgtcggtgaggtgcatccaaaggccatgacaatacctggaatgactattaagtcattccaacagtcttcccaacagaaagaggaggcttcgtcacccacattgctggccgattggtaagaaccagggtatatggagaagcggtgccggccggaatgaggagtgtgacatacgagagacagctgatcctggcagggctgtgcattacctcgaggggacagccaagctctgactcttggaggaactgctctctgcgcttgcaagcagaggcaaggcacacaggaggggccctgggagtgtgctcaggaggacatgaaactcaagccctgaaagctaagctccaaatccaaatatgctgttacgcaaagcactcgcagattggctcgcatttgattatcgtatgaggttacttgttggcatgtgctgagtaattccctggcatgcccacggcttgtcagtggcattccttcctgagtcacaactggactgacagcctggctcaggaagcaggggccagcgctgtccaagaggctgtcttttcgatgaaacctacagcccatggtcctgagttgctgatgtcaccatgcctgcttttccatcctcaaggatgagctggtaggcatttccagtgagtgtttgacaggcttgaggaaacattttggggggctgcacgtaactgctgaagtgaggaatatttgtctgtcatcagttggatgagaaaagttaaaattcctgccagaactttggaggcctagggagatggcatctctcatgggagcaacattaggccaattacaatgctcagcattttcccaacgccctaggttcagagctctttgcgagcagtttgttt

SEQ ID NO: 28139 - DNA, 2411 bp, Bovine  19866880539277
  misc_feature (1)..(1): n is a, c, g, or t
ngagagctatgtggactttgcccttgacaacatatactcagtgtaaacccaaccttttcaacctctctctcatacaaaaaaaaggaagagttaaaaaaaaataaaacaaaagagaaagaaaaagggaaaaaaattaaaaacacacgaactttcacaacatgacaatttagtctgcaaacgcaatataactatacacatataataccggtgtggctctgttctttaagttaaaaagggtacaaaggcaggctcaagtaaaaaccaaaccatccctcccaaccccacccccaccctcattcatacaagttctatcaaccaaacctctcccgaaccaacatcatcagtttctttttgcctttgtagatttgtttcaggttgtcgataaactgtgtaaactgaatgtgtccatcatgcgccattaagaaggtctctcgggccttgctgaggaactctatgaactcactatagtgccgaggactgatgtgtgtgagccgtgagtgtgttgtgttgatgtaggccccaatcgtggcatccaagagttgcctcaggggggctttgtccagcgacatgagcttaccagagttcctcctcccgtgaagccccaccacgccaggagtggtcagagtgcacctgcgcaaaatgtctgacagtaccgttgcacacttgacactcttgaccaccagaggtattatagctgcaagctcgtttttaccaagggagtggctgagcgcacaggcccacaaaacgtcgttaatggcagggtgcgtgtcctgattgtagctcaggttgagatgggtcatggccagggtggccagcttgtaggccctcatggggtacccgcggtgctccatgtaccgtgctattgtgaagagctgggtgtagctcatgccggttgtagcagcgtcaagaacgatttggtacgccgtctcaaaagctatgtgatccttttcacacagggtcagcgcggagagggcacagttctgagggtccttcatggcgcactgcagtgcgagtgtccgggcgctgctggccagcttttcctgctggtggcagtccaggtggaggcggacgatggtgctgttggacatcacagtggtggcaacaatacttgtggcttcggtgggagtaaagagtgtaaaccagctctgcatgatgctgtccagggcataaacacctgccaagaacacagagaagccgcattactgactggctgcccaggggtcttgccttacttccactctttaatcaatgcttacactgtttactagcacagaacatgagcccggccagaaaatcctgcaaggtaatgtgcctgggagcaaccttttacaataaggttatgatagactgttattcagtgaaatgcctaatgaacatgaacttcctgtaataaagagcaaatcctctcggtagctggtatttgcgctgtgctgctgcctgcctgccgtttcagacaacggcttcttgctaatgagttccagttcactggggcctcctgtcagttaccgactgcagaatgggagtcagaaaaagtacaaccctcaccagaatagggagtctttatgtgatgtgtgtggtgtatgtgcccaagtttaaagtacacacaatacaaaatgattaaacacacaaagaagcaaggaaatgtgacctgtaatcagagagaaaaaagtcaacagaagcagacatacagatgacttgaatgtttgaaatggatgacaaggtttgactgtcattctaagtacacagatcaatgtgcctcagctgcaggaaaatcctaaacatgagccattaaaaagcaggcactaaatcgaagagaaatgaggcctctgtcttggtgcagggtagggtagtggtgtggcagtttttgaactggtattatctttgtattgatgtactaacgcatcacgtggataatataacttttatattgagaccaatttcctgctttccaagataacataccattgtagattaacaaaagaaaaacaacaaggaaaatgcttttacggtatctgctgtgtcagtctttagatacacactgaggtggctggtattctcagcaagaggtgtgtattcttttctgatgcaaacggaaagaaatggtggctgttgaagcaccgtttattttaaacagccctactcggtttgtgtcggcattctcaccaggcgtgtctgggcttttggttctgcctcactgctgcagaggggcgctagctggctgaagggtttcacagacggcgcctgtatgtgcagcccaggtcttcttgtggctactaaaaattctcgtccatctgaaagctcacataaaccgcacccagtggtcacttctctgctgggtaccttgagaaatgccctcagataatgaaggaaaaactcagagcaactagataactgtatattattttcattaa

SEQ ID NO: 28140 - DNA, 1475 bp, Bovine  19866880571781
  misc_feature (1)..(1): n is a, c, g, or t
ntgctgaagaattgatgcttttgaacagtggtgttggagaagactgctgagagtcccttggactgcaaggagatccaaccagtccattctaaaggagatcagtcctgggtgttctttggaaggaataatgctaaagctgaaactccagtcctttggccacctcacgcaaagagttgattcactggaaaagactctgatgctgggagggattgggggcaggaggagaaggggacgaccgaggatgagatggttggatggcatcactgactcgatggacgtaagtttgagtgaactccgggagttggtgatggacagggaggcctggcgtgctgcagttcatggggtccaaagagttggacacgactgagcgactgaactgaactgaacctgtgtgcctgaaatctcactgtcagcaggttagaaagtggactagagaggttaagtcctgggagggagtaccagttaaggctgctgcaatgacaaagcagagggtggtaactttagagtcatcccttgaacttccttaacctggacctactcattgcaattaacttattttatttctgtttctttgttttgccatccctttccctgggggtactgatagacaaggtctagtttacttgaaaaaaagtgacgatgtaagtgaaaaaaaaaaaaaatccccgccccccacatatatcctccacttaaacatgtatggtttaatttgtctcaacttaaatatgccacccaactctattaataataaattatagcaccaagacttcctaaaacctttctggaatactacacgtcattaatacacagggcttatctcatagctcggtaagggcttctctcgtagctcagttggtaaattatctgcgtgcaatgcaggagacccgggttcgattcctgagtcgggaagatcgcctggagaaggaaatggcaacccactccagtattcttgcctggagaatcccatggaccagaggagcctgacaggctatagtccacaggatcgcaagagtcagacacgacttagcaactaaaccaccaagttatgttagtgagttggaggagtggaggagggagcgacaataggcaaagttattttgaatctgtgcttggacacctacgctgataaaggcaccccgggtaccatcccgtaaccttctgcgtcctgagttgcagaacctcacagaacagtgagcctgcagctgctccctgcccccatcttttgtgctcacgccccaccctcgctttcattcagtcatttccaaacgctttttcaggcaggagtgcgggcccaccccaccggactccactgtcccagggaccgacatacctccctcatctccccgggcttgtcagctgagcccagatacatgaatggcaaaacaggcctaactggagcccagacagtgctcatcatcctgtcaccgggacaaaggaaggaaattccattatgtcaccttctacaagcaagagac

SEQ ID NO: 28141 - DNA, 924 bp, Bovine  19866880583934
  misc_feature (1)..(1): n is a, c, g, or t
nacatttgggattttttttttttttttttttaatttttagaaattcaaactttgttttttcattctgatttgcaaatttaatcgactttcctcatctttctagaaatttaatactcaattttttcattttttccttctagttaaaaaaattcttttatgctctttactctgcctagattttattttatattttaagcttttaaaaaaatgatgacttttccaagtctgtgcttattatgaagacaaaacacgtattgttcaggaatgaaatttctcatgactgagattttaaaattacagcatttaattgtagtacaactaaatgtctaaccgtttactggcatattgatgttgctaaatagtatgttcatggctttacttaaattgcttttattttagagagaactaggtccgaatgtattaagtatattgtctagtgtttaacatggtgattttttcagattttggatattataaacaactttgtttagaaatagctggtgagatctttatctttgatttttttttttttaaagtgagttttatataggaatctgcacctcacaatcacatggttttgtgtgtccagggagcaattaggagggcaatctgttaaatctttgcctcaaggcaaaaccattaggtgtgctgtgtatgaacctcaggggtgtaaataaccaaaccattcatgtaatagtttcctttcatttcaaggcatccatagaacctttaatctatggaagaatcagagtaagctgatctgtgggatccagttcttaaagagatgggaattccagaccaacttacctgcctcctgagaaacctgtatgcacgtcaagaagcaacagtaagaaccggacatggaacaacaaactggttcaaaataggaaaaggagtatgtcaaggctgtatattggcaccctg

SEQ ID NO: 28142 - DNA, 1670 bp, Bovine  19866880585517
  misc_feature (1)..(1): n is a, c, g, or t
nacgaagcccttggggctctgctcacaataaaaacattgtacaggccttcaacacatgactcagggtgtattgtgtgtctgattgaaaaaaagattggctttacctacaagtgctaacgtgttggccaagttgaaacgagtgcagtattacataagaaatgaaaatacctggggagcaagcagtttaccaccttgtatgggacatgcaggatccttagaggaaaagtgccaggtgacttttttgccaactgcaagaatagctgtggttggactgggtgttttgttttgtttttatcccagtgtttggcacagagtcctgaacaccaagtggggcccctgaaccctgcctgacaccaaattgcattctctaatgtcattcctgttttgctttgtttgataaagactggataataacaaaggggaaagggagcgagtaattaaagtgtgttttgtgaaaactttatgagctaagtccgcaagaaatagagtgtaacgtttaaaagtagggactctggggccagacacagtttcaagtcttggctccattctgtcttagctgcaggacatttgacaagttactcaaactctctgagcctcaatttttttcagttgtaaaatggataaaataataggaccagccttggagagctcttgtaagaactgtatgagggtaatacaggcaaatagcttagctgagaacttggcccacggtgcccagcaaaggttaactagtattatcatctgtactggggagaggtaacttccccagttcccgtaagggatgttaaggctgaaacaaaaggttggcaagataagagttctttaaaaaggacttgttattttctgttttacactacatggtgtggtatacagcaaaggcaatattggacacagagttagaagacgtggattctggtctccggatcttcatctctttatcatttaaggaatgggtttaaataagtccttcttaactctgacatcttgggacttcagtgcccattcattccctgcccgtaagtggagaccctcactctttaatttccattccctgtggcctgccaaggtcttgattgacttaaaaaaagaaaaccagaaaaagtgctcatacatatctgggaagatgtgccagatactctaagtgataaaaggcaaattgaagacctatacgtaattctattgcgtaaatattctagaataatattaaaatatagacttgtacactggattgtacgaggattaagagaaattttactttagattttaaacatgtctgtattacttgaaccttacactgtgagcatgttttatttgataacaaagtaaaaataataacaaaaatgtaaacaaaattaaaacatgtttattgtagacagtttggagggaaaaaaaaaatctcttataatccacccaacctcaaaagattgttattaacattttaatttatattctctcagtcttttttctatatgtatacttcacctagaaatatatatatatgtatatatttacaaaatgtaatcatattgtgcatgatgtcttacaattagcttcacttaaccatgtgttgtttatagatttccacgtcattaaggtttcctctacaatctatagcatgattttaatgactgcttatttttccatattgtacgggccagtctcctatgttg

SEQ ID NO: 28143 - DNA, 1620 bp, Bovine  19866880721662
  misc_feature (1)..(1): n is a, c, g, or t
ntgcaatatcaatatttctgctgctaccccagaagtttacatgatctgaaacccttagctttattttgagtttaccctctttcctggggaagattctgggtttggagtggcatgccagacatgctgttacactgcaagctcccagaagctgaccagaggatctggtggaaatcccccagggctgggaaggggtgcctgctcgcagtgtaaagatgcattttctacaatttaaataggacccgtttctcagccattcttcacattcaggaatcctacatgtttattctttctgattaacctgtgactaaaagaaaacgggtcaaaccccatcctacccagtatcaggggatgttctcattctttgggagtccttcatattgcttactttgggtgtttgcctaaaggaagtagggctcggaaaacatctggctctacagatttggggaggcaattcagtgtaatttgttggtaataggatttgatctgtgctaaatctgaatgtctgtgttatttcaatggatttaatgaagttttgtttgttgttgagatatgtgcaatgtcgtccctcatcctgtcttctggggaccccaggtgggagtgatcaggcaggctgataataataatatgctttataaggaggcattactttgtcagggagttcagatatgatctcattaatatcttaccttggggaaagctgaagggagaggagatgagttattctaaaaggaaaaaacccacatgtgaagagttatgaaataaggaccaacctcaccaatgctacctgtggtggtaagtttccaaagatggctccctcagtgaatcatgccttgcattattcatgctttgtgtactcctgatttcttgcatctggcaggttctgtgacttgcatttgactgatgaaatatggcagaagagacactgtgtgacttctaaagctgatgcgtaagacattttgcatctttttcctggggctcttgaaatgctcactctttggacacttagaacccagctgccacatgatgagaggcccagacacagggagaggacacacacaggtgcttcagtgaacagccccagctgagctcctagctaggatcaactgccagccttgcgaatgggtcatcctggactttcagcccagtggaacctgtggacaactctgagtccagctaccctctgacagaagaatgagggcagaaggatgagatagtgtaagtgattactacccactgagccttgttaacctacagaactgttggacaaattaagagattattttaaaccactaagctttggggtatctgattacccactccagtgttcttgctcggagaatcctagggacacgggagcctggtgggctgctgtctatggggttgcacagtgtcggacacgactgaagcaacttagcagcagcagcaggaagctttggggtatctgattacatagccatagctgatcagagcaccatgctcaatgtttgagtagctgctgctcagtggaaactaaacctagtcctcttggagcgggctgttcaagactgaggatccctgaacaagcttttgctggcgctttacggagacatcctccacaccattcctctcagcaatggattt

SEQ ID NO: 28144 - DNA, 1143 bp, Bovine  19866880769804
  misc_feature (1)..(1): n is a, c, g, or t
ntgaggaaaactgttcgcttcctggagcataggatttctgccaagtcccaggcagagctgggctcagggtcccgtggactgaatgcccctcagaattgggtggagaggatgtgagagctagagtgggagcgcttgggggtgtggggaagcaaattcccatggtttagtcactaagttgtgtctgactctttgcgaccccatggactgtagcccgccaggctcctctgtccatgggattttccagacgagaatactggagtgggttgccatttccttctccattccaggcaaattcatcctgcagctgcaaccttgaccaaggcagaggttggggactgctcagatctcttccctctcctcgcggaaaatgcagtttgtttcctgtgatcagtctgctgtctttgtgagcccaggacccttccttgtcccctgttcctcccctctgggtggcagtcagtggttctcctgactgcatattttaaattgtctctgtctggtaaagatttgatctctttcaagtctgagctccaacggaagcttgctccatccttttgcttgcttctttctaagacgaggtctggatgtgggggaaattgtggtcattccgtcatcccaatgttttgaggataatgcttagggcattttgcaggcaaaatattggctcccagaggcaaagaaaccatggcttgagtttagaacatcagaagtcggtgttgaaaactcagtgaggtctagtacagattttagaatttaaagcaataagaattagaggcacaaaaggcaaagcaaaacaaaaccctttatatgtgaaaagcagaagaattagactgcctttctcctcctttctccccatgaaaggaagtttgaaagaagttgatgctattgcagaacttgagagaatctttcagtgttctaaagttgtgggcccagtccacatttcctcagaaggtaccaagacctcagtgattactgccagggaacactgggtcctgtgttgaaaggagggggagcacgctgtgatcagagaacccctttgaaccgaaaagataccacatttaccagctggtgtgatcttgggtgaatttcttcacttcactgagccatcagtcaaattatgcacaataatatcaaataggtgtgtgg

SEQ ID NO: 28145 - DNA, 796 bp, Bovine  19866880813305
  misc_feature (1)..(1): n is a, c, g, or t
naggagccgggtctctctagttaagaggaaaacttcactgaatggactctgtaacatctgggcttagcttctcagagttctttatgcttattcagcttctttgtggcttttcgagagtgttgaggataccatacatttcagacctatagataaatgtggtcttgctgaagcatactaggcactactactactctgtcaaatcagaaaacaaagttagggacagtggctgcaggctaatacaccaaattgctcaaacagtccataaaagcataaacaacctttttcttctggctcactacctaagggctagtagaggttaagaagtaacagctaaaacaagatagggtttatggttagagacactggacagaggagaaactaaggtatcaccactcaaaggtcctcagtttagtaacagtcgcctaaagtactgtccaatgtggtgattcagtaagaacaactttattccacatgctgccaactcaatgttatccatacatgcgctccagctctccagcaaggcagcaaagagaagtgactccaacgttcagtgatgagcctatcagacaaacaagtagcaaaaaccactaaagtgttagaacataatcacactatttactgtgtgacaagtcaccactaaattaaaataaaaggataagaggcagagtgaaatgaaggtgatcatacaaaagctattttgagatgcctcaaaaacaaaagaaaagctgtcaaatctgaaacaaagtttaaactattccactcttactgcagcaactatataaagcactgctgcatt

SEQ ID NO: 28146 - DNA, 861 bp, Bovine  19866880845659
  misc_feature (1)..(1): n is a, c, g, or t
ngatactgactggattgccatgcctttttccggggattttcccaacccaggggatgaccctgcatttcttaagtgtcctgcactggcaggcgggttctttaccactagcgccacctgggaagccccttctctattcatgggtacatgtaaaacaaaaaaagcttccaaagcagagtgattgttcttccctcaggccatggtcagcctccccactggatgtccagagtcagatcgccgggtaaggggactctgctctgcacttgctattacactttatgttcttctcttaaggatgtgccatttacatgtttttgttgttaagcaagagatgagctattatatataaactatctagaattttgcttgtgcaaacaataaagattttataagttttaagaattaagaggcccaaagaatagatttaaccaaagaaccaatgtcaaagaaagtgattcagggaatctaaataactgagaaatcatttcccttcttatgagcttctgatattccattatgatctctctccttgtgtattcccaccactggcacaaacaaggccagttctagctctcttaaattccttctcaaaaacaatggaaaagggaggaaaatgtggatatatttgtgtttgtttgtattagcacaaacactggagagatacacaagaaactaacaatatgcttatttataaggagtgggggtggggtgaggaggccctgaagaagatggggcagacatcgtaacatatacacattatggtggtttcatattgaatcatgaatgtatcacttgtttttaaaatttaaatttaaaagtctttctcaagatttatttcatttcataaaacccttatgtaacatg

SEQ ID NO: 28147 - DNA, 727 bp, Bovine  19866881036992
  misc_feature (1)..(1): n is a, c, g, or t
ncatcaggctcagtgagcacaagggcagcacggacaccctcgggacttttgcctcatgcagctaacgtcagagatgttttattaaacgagagttgaggtcacattgcttcttggataaaaagaactttgcttcaaagaaatttacttgctaaacaacactaggaaaattgccagactttcactagggacagccagccacttttgagctgcccagtgtttccagaactgccaagtaattcactcacattagatcagggctccagagagctgagcgcggaaactcgtggacccccagttttcccctctgtaagaggacagaggctggactacatgaacctctaagctatttccagctctacgctccattcatagttgggaacatcctgtctcttggcacctactaaggaaaaggtagccaagaaggaaaagcaggaggcgcacctgtgggggcagaccgcctgggttcaagtcccagctccacgactcaccatctgtgtaaccctgagcaagtcagttcatctctctctccttcagcttccctatctgaaaagtgggggaaacgttagtacctgcttcatggggttgtcgcgaggctcaaatataataacacctgcaaagcattttgaaacacacctagcacagagcaggcgcactgtgagcatttgctattttcattgctctctttgcttgcacagaataccatctgagtcttttcctgtcagtagtg

SEQ ID NO: 28148 - DNA, 1488 bp, Bovine  19866881037591
  misc_feature (1)..(1): n is a, c, g, or t
nctctctatgtggccagtgtgggatttctcatagcatggcagcctcatgatagccagattttttttttttaatttttattattattattattttttactttacaatattgtatttgtttctcagggctttaggatagacccttttaagagacagtaagtagatactgccagacacttcaggactgggcccagaaactgccccaaacatctaatgtcatattctgttgatcaaacatctacaaaaatgagaaaacacagaccccatatctcaatgagagagtagcaaagcatctgtggccactgtaatctatcacaattaccaggaaataactctgctagattacaaaatggaaaagtattaccagtgggtatgagaatgttgttagttacaattatcaaatccaaacaaaccactcaacataagaaaagagctgcgaattaagcaaaaacaaaaaagtcactatgcataaaaggtatcccaacacacaatattaagtgctgatttgtatgttaatttctatcccttcaagaaaaatcctaacaatatcatgttacacgtgttaagtttctaaatagagtctacatttattaatgtaaatgtatttattaatgtaaaactacatttagttttacaatgtctgtctttagggtacaaagatcacttcatctagttcagctaacatatttctaaaagtgaacggcatctttactgatccacttgctgctgccatgtattgaaaacacttcacacgaacccctgtgagaactattttacatacattatcacatttcaccctcacagaaagactcactttgcaaataactaaatggaggttcagagacaagtagaaatggagtgctactattaaagacaggagccagggtttataactagggcccacatgcccctaaaactaacattcttaaatactatggtgtttagccttctgcccagacacatggtcaaaaagcacctctgtaagcgaggcttgctatgtgcaattagcatatatgaattctaagattaatgattttagtcttttgacagaatcattgatccactcctaatattttagcagtataatacaaatggtatactattgttgaaagttatgaggtagtcttaaatgtacaactaataaaccctgtactttatttaactatattcttacaaacttacaacatgttgcatatacagaatcatacccaatgaaaacttacacaggtccatctaaaaaggtctaattaaacaaatgaaaactctgcatttttcaggactgacaggcatagcaaataagtaatttcactgcagattaaaacagcagataaacaatcaagagttcaacttacaattcaagattgattattcaagtcatatctctgaaaatatgatgatgtactattcgaggcctcttagagtggactcacatcagcatttctaggagaatgcacttggacttgagtgtgctccttgcctgctggtgtatt

SEQ ID NO: 28149 - DNA, 1728 bp, Bovine  19866881066216
  misc_feature (1)..(1): n is a, c, g, or t
naggaagggcgttcctaactgtgtggtctcaggccctctagcatcagattctcagaccctctagcatcacctgggggaccagttaaaactgaagaatctgtgccccaccttgttgttatcgttcagccgctcagttgtgttcaactctttgcgaccccatggaccttacagttacaaaatcagaaccccaaggggtaaacccacaagcctaaactcattcagaagacattcttcaagtgactcttaggcctgctcgatacttaaatgtcagtggtggcattctttagggctgagggcccgataaaggggcatccagtggtagagacacaaaaggagtctaacgtggtaactgatttggatgcggagggtggagaagctttaatccccagaatggggaatcagggagctctgacattttgagagaactttggtcctgataaacaactgctgtgattcctcacccacagaagtgaacatgagaaagtctggtagaagaagataaggaacagctatccctcctctgggtgggcaacagacactcaaggagcctgtatgcaggatgtagatgtgttggggacaggctctgtaaaaccagattctactctaggtcaagcaggtgtgcggcttggcagcattgaccggtgggttccagtaggtactgctgcaccttctggcactttctgtttgtctttgaactatgtaaactcaatattcttcctatggcttagaaagttgacattgacaaggaaggagatgctttgagtggtgcatctgcagtctgcctgcaccaaagaaaggtcaaaacgctcctctctgttggctgggcttggaatcagtaagcagcgtgtgtagggttggaaggcatcaagcattaagactaggaagcctgaaagagacgaggtgtgggcgttatcctctcccgctgcagaaatcaccatcacctgctggggtgattgtttttgcatgtttgtgtcgcactcccctagggtggggcttcctttgtggctcagctggtaaagaatctgcccacaatgcaggacacctgggctcaacccctggattggaaagaccccctggagaagggaaaggctacccactccagtattcttgtctggagaagtccatggactattcagtccacggggttgcaaacagtcagacacgactgagcaactttctttcactcactcactcactcactcactcccctagggtgaggtgtttgagaatccacgctgtcatctttcctcggctgggaacccaaagccaggcgggggcagacccagtaatagactctacccttctcatcctcagcctactgctccaacctccaaaacttcccaattgctgtgctacctaccacgagtgacctttttctggaaaaaaaaaaaaatagaggccagagacataggagggttttccagaatatatttttgccctgtatatagtattcaacacattcagaatctggtttgagctgagaaaattcttgtcctcgaactgagtcctatattagttactgcagccttcgctgtgaaaacaaacaggcccccaaagtgcagtggcttgacacagaggaagtttctctctcttttgtgcaacagttgagtgcaagtgacctggggcggcaggggatggggttggggaagggctctatttcatgcagtcatttaaggatttaggctggcagagccccggctgccttcaggcttggctcccaaggtccct

SEQ ID NO: 28150 - DNA, 2013 bp, Bovine  19866881117308
  misc_feature (1)..(1): n is a, c, g, or t
ngcatggcaagccactcggtattcttgcctagaaaatcccatggacagaggagcctggtgggctacagtccatggggcagcaaagggtcagatacgacagaagcgacgacttagtacacagccctcacccgtgtttgctacaagatcgtgagtgctttgattttaactttatgatccacatagcttccacacacaggatgttttaaatatcaaacacgtgctagattgtcctccccctttatgctttgggttatgtatatataaaataaattattaaatcttcagttgggttataaaaaaaagaatgacactcgagtcatgatagaaaaacaagattattgtttatgaatataccactaaaatatgcattttgtaaggctcattgatttatttccaattggagaaaccacacagacatacaaaatggttcatttgatattcattatacctccttagctgcttttattagaagtgcccatggtgccaatggcaaggttgatgttttcagggcttgaatcaatgcctgaaactcatcaattcttataggcagttttggtttaaggtattttgatgattttatgaaatgttttaccctattaaagagctataacttaaacggtgatacagggcaggcacacagtagatgataaatggctttgtgtaagaggtttcaaatttgtcaaatctgcattaaataactatatttgaaatcggttagaaggttgggtgaattctccaggtgaaaatgacatttgttttatggatccctccaaaacaattcccccagagttttcacttgaataaatcacatttcgagttcagtgctccagaaacagcttgcattgtaaagttgcattagctgcttctctgtttcctctttgtaggaaaaagcgctcgatttcttcatttgtaaaggaagtgagactagataacctggagtgagaatctttatatcctctcattcattcattccatgggcttccctggtggtgccagtggtaaagagcctgcctgccaacgtgggtttgatccctgggttggaagattcccctggaggagggcatggcaagccactcaggtattcttgctggagaatctcatggatagaggaacctggtgggctatggtccacggggtcgcagagtcagacacgactcaagtgactgagcacacacgcaaagaaacaacaacatacaaaactgagatcttgttctcatggagatgacatcctagaaggagaaagacaatagataaataagataatttcatggatttataagttccttgggagaaggcaatggcaccccactccaatactcttgcctggaaaatcccatggatggaggagcctggtaggctgcagtccatggggtcgctaagttggacatgactgagtgacttcactttcacctttcgctttcatgcactggagaaggaaatggcaacccactccagtgttcttgcctggagaatcccagggacgggggagcctggtgggctgccgtctatggggtcgcacagagtcggacacgactgaagcgacttagcaactgtgtacgcccccccccccaaataatagaaggacttttaatttgactccttaaatactaccaagaacaatgaaggtgaaaaactaattggccaatgtttgttggccagagaagctttagtttttagcaagtgaatggaagttgaatatgtagagacagtctctgtataccactctttcatgaaatctgactgtactgaaacttgggtatgtcaatagttatagcgaggcaagtggaagagaagaaaaaattagagctacagtaaagtttataataatgtatacagtgagattacaggtaaagtagaatataagatcttataagcaggtataagatttaacagagaattgccgcttactctgagaaagaggtaagaagataaagtatatatcattatatgtcagtttagttaattgtctctgcaaataagtattgatgcaggataagtacggtttccttgcat

SEQ ID NO: 28151 - DNA, 1415 bp, Bovine  19866881174988
  misc_feature (1)..(1): n is a, c, g, or t
nccagcctcaaacagtccctcagtcacttgttgccaggtttcctaaacatgtgcagagaaggtgggggaggccgtcaggaggggcctgattgtatcggttgagatggtatatacaaagagactctgtgtcctctttctccccaatctttgttgcagttcctgctttccttcttcaagtctggataaagaaactgatataatgttgaagactatgtgatttagatgattcagtcactaagtcgtatctgactcttgcaaccccatggactgtagcccgccaggctcctctgtccatgggattctccaggcaagaatactggagtgggttgccttttccttctccaggaagactatgactcatgaataattagttgattggaataagtgtacttaagtatttcaaaggtttggcccaagaggtttcactacaatcaaacaaatatgtcaggaagaaagattcgacctcaccaagggcatgcccagttgtctgtttggaccttggagatgggtttgggcagggtccatttactccctaactagctggacggtctgccctcttcctacattccagtggctcctgaaccctggggtctcgtgttccaggcacatttgtaagcactttaccgcctgtgagataagaacttttattatccccatttcatagatgaagcaactgaggtatcaaaagagcacacagggggaattccctggtggtccagtggttaagactccgtgcttccaacgcaaggagtgcaggcaggatccctggtcagggaactaagatcccccatgctatgtggtacagccaaagggtcggggggaagagcacacaggtagtaaatggtaaagccaagactcggacccaagtgttctggttccagaggccacagtgctctgtgctttagaacatcatactttgaacacacagtttatcaaatcccaggttaggtacaaggcttttccccacaggagattgaagatgtcttctcatcttatcagcccctgaagccttcctctgtcccctcgtatgccttgtcacatgcaacctgagtaaagtacacagtgaatcttgttggcttaccatgggtgtccttcatagtgtcctacacattcaatagctggggtatccttcaggggcccaccattcttgcagttgtttcctgcgagccccacataagtaggacacggctactctcttagtctcctgaactgcatatgctccagaaatgttatatgtcacatttttgaagagttaaggcaaaactttatttaaaggaagttggggaaggagaaaggacattagcagctttgagcacatgtgcaatcagccagacagaaattcaggtggcagctctacttagtgacactgggaaagtgaccatcctttatttgacagagatgttgcaagatttcaa

SEQ ID NO: 28152 - DNA, 1551 bp, Bovine  19866881202506
  misc_feature (1)..(1): n is a, c, g, or t
nttatttagatagatacatgtaatttctgaaataaataatcctacaatatttataattctacaataaccagatacttgagatgtcttcttgagatgatggttgatgcctgttcagtgttatgtatccaataaaggttacagctggaaattttcaatgttatcactcatttatataatcatcccttgtttccccatcactacatacagcaaaggaaatgtcttgctaaaggctggcaaaggttataaggaggaaggaacagaaataagcactaatatcaaatcattacatttctttttttttaactcagaacaatctggaactgaacctctattcaattacaaattatgtaatgattttgccattgctaattatatttgtatgatggattctgtatcagtcttcattataatgtaactattgtttgaacagaatatagcaagttaactggacagtttatgccttaagatcctagcattcttttaccaatgctcatttgcattctcatcagtatgcatgaggttttcactgaactttaatactcttattggaatataacacactataatgagtgtagaagtgaacatgcaagttgaatatcccattaaccactaaaaaagactagaagatgcaggtaggaaaacacttgatgaggcataccttcttcaaacttcagtaagaactgaaaatggctaatacacttttagaagtagcatcaacaggggtttgaggtaaatgagacctttatcactagattcagtaggtgaccattcagaacgaaattataggtttacacaccataaagatcatatataaaaaagaaatctgtataaactgtattaaaaaaaagaaaaaaaaagatatttttaactatgaaaactcttcaaataatatattataaaatgagttattttctaattattgactctgaaaagtttcttaaggatgttattagatttagttggcataattaagttacaaatgttgtgatgttcatggctattattgttcgttttccttaatcaactttattgaggtataatttacatacaatacagtaaaaccattgtaagtgtgtaattccatgagttctgacaaatgcatacaactgtgtgacgagcaccacaatcagtgtatagagtatttccatcaccctaaaagttcccaagtgtctgactacatgcaaacactcaccttaactcacccgtagcccccaacaagtggtgctttctgtcactgttgattacttttgcttatctacaatttcatatacgtggaatattatattatatactcttttgtgctcaacatgctgttcctttgttactgtatacagaaaacagactctgaaggtagcctgacaacccccaccacttggtgattgtgtctctgaatgatctcttccccttgagtgagctcagaacctgtgacttatttctaactatgaaaatatggcgaaggttatgggatgcacatgcttgtatgatgatgctacagaaaataggcaatcttccttgtgaaatctctctttccctcgcggcgcaaggaaaaaa

SEQ ID NO: 28153 - DNA, 1462 bp, Bovine  19866881276515
  misc_feature (1)..(1): n is a, c, g, or t
ncccctggttatcatgagatgacatagtaccaaactaagtaaatgaaccaggaaactaagagcaaattgaggaatttagtggaagcctccctgatagctcagttggtaagaatccgcctgcaatgcaggagactccaggttgaatcctgggttgggaagacccactggagaatggataggctacccactccagcattcttaggcttcccttgtggctcagctggtaaagaatctgcctgcactgtgggagacctgggttcaatcccagggttgggaagatccccttggagaagggaatgactacccacttcagtattctggcctggagaattccatggactgtatagtccatggggtcacaaagcatcggacaaaactgcacaactttcactttcacttcacttttcaccatcctgagtgagccccttatacctagtgaaactgatcacaaaattagacaatgtttcaaagctcaagatatcttaaaagtcctaggccccagatttctcctcaacctgtatacaatgatacctgaaattcccatcagcatcgtcacttccacagagcccctggagacaggagcatttagaccgagtatatgcatcatggtacctcattagctaacgccttactttatttacaccagtggctcccaacctttccccccaggaaccctaaattacacaccagggagattccatgactctaaggttccaaagcggatcgtatgttttttttctcaagtgacgagtcttgcatggcgggataatgagcagaactcccaaagtcttaaaccttggactgcacctcctctgcccagttctcctagtcctttcctccatcctctcacccactcagacagaaacaaagattgacatgaaccacggtcactgctttggacctcggcatcatgttgccggcatcatgaaaatcaacttgccctccggttgtttcatgtccatcccatccccagtccacgccccttattctactttgctttttggctatgagactaataactccctcaaatggttgtttatggtctccagtttaaatgcttagaaatgccgctttccatgctgacctgggttgcaaacagtaaggtggttgacattgcagagtgattgttgaacgtgatttacccatgtggctccacagcccttttgctgagaggttgacctgtgggaataatatataggacttgtacatggaatgaaatcaggagctggaaggggttccaggccctagtggggatgccatatagcgacattgcctatatcccagggctgcagggcttcctccctgtgctgtctctcagcagctctgaaatgtggcacgcaggtctggacagaacatcgtctcaggagcctaggatccacaaggtcttgtttccacacagagggaacaattcagttttaagttaaacttttaactgaaggatccactaatctgtgcatcttga

SEQ ID NO: 28154 - DNA, 1787 bp, Bovine  19866881289365
  misc_feature (1)..(1): n is a, c, g, or t
ngatttttttccagtgtcccactttctttctaagctttgctaggggcagcttctctgcctgcaggtgcataaaggaaacccatcccagagacctcccttggcctgtaacacccactcaaaatccaacttttaaaaagtgttccatgatttcagggatgtgctgttttattttttccttctggatagtagtaatgtatgtctgatccatagtatcttcttgcttcttggagctgttactatactgagttaaatataaatatgactttcttctttgctgagatttaaaaaaaatttcagtcacagtatttggtgacattaatagtttggcctgaaagaggtactgttttctttttcatcagttcattgattttagtgggagacttgggagtgatggatataggcgatacttcaaagagaacattagtacaattgaagctgtgtgaggctgctgaggtgcacacagctcttactggtgggcagtttcgggtgctggtgggttatgttagcaaccctgttgatggagagatgcagtggtttgctgaagtactggggacattctcttcttattactaaattatagccttaatacctgtgtaactcttagggcagatcttaaatttttctttcctttggtttttaggaagcacctctgtttgcaggcgaggaaagactagatatgtctttccaggcaacatccggggtctttcccttctcctattccctcctgtgtgtaaccatgaggctatataaaggaacatttctggaggctatttaatccacttgcctgagatgccaagacctttattttttcagttgagagtaggcagttgtaagggtatgcaacctgactggctaatagaagattagtgataaagtcaggacactacccttccttataagacctggattattaggtttgccttcttctgatctcattcctgctgaccccataccctctccttgagttagtgaattgcatgtgggttcaactctcattgtatagctggatgcgtctgtagcaatcgtagcttactgtgtagactggtcacaagttaaaagtttaacaaatcttaatttatcatagttttagcacttaaagttacttaatgtatgtgttttgatgatctgatttatgaatatatcatattaaaaagggcttccctggtggctcagacagtaaagaatctgcctgtagtgcgggagacctgggttcgatccctggtttgggaagagcccctgaagaagggaatggctgcctcatccagtattcttgcctggagaattccatggacagagaagcctggcaggctacagtccacagggtcacaaagggtagaacacggctgagcaactaacactaactaaaatgctatattattgctgaaatattgagtagccctgctttttatgaccaagttataggatgagtaattactcttcacagtgaatagttcaaaatgaaataactgtgtgcctaaagtgtgatgtgacaccagttgtatttaagccccaaaggtatgtaattatcttagtctctcgcacatacccacaagtatatttatgcgtatggcaagagttttatgttcaagagaaaacactttctgataagtgaaggaacagttcattatttttgaggggctcagagattgttttacattagaggcaccatttcagtttccctgtatttctttaggatattatttaaagtcatacatcactggattctagagtaaactggtatcaaactgtaaatttcagatattaaggatagtttagggacttttctc

SEQ ID NO: 28155 - DNA, 1214 bp, Bovine  19866881383215
  misc_feature (1)..(1): n is a, c, g, or t
ngtcgctaagagtcggacatgactgagcgacttcactttcccttttcgctctcacgcattggagaaggaaatagcaacccactccagtgttcttgcctggagaatcccagggacaggggagcctggtgggctgccgtctatggggtcgcacagagttggaaatgactgaagcgacttagcagcagcagcagcaacagcctacaataaatagctggttccagtaaatcaactatacaccaataaaaatttttaaaaatcagtaggttctgcaagaattgactatgtgcaaatgaaattatcttgtaaaacgcaaattaattattattattatttgtgtattatacaaattattaatgttttatgttaaacatgttaatatgtttaaaaaacatattaatgttatgttgacagtttatataagagcaaaataaaaactgcattatcagaattatacatcagggtcctttctgtataaacttataatctaaattaaaaatctttgtagaaattttgaactaaaatgtaatcaaataggttattgatttggattttctttgggcatactggtaacttgttataaattgacttttgctaaatccaataactgcagaatttttgtactaaaatagaatgtgtgattttatgtgaaatttcagaagcagcagtagtagttacaagtgtttcagggtcagcttgcactgtcttataaaagtgaattattaacttttcaagaatttcctatgctgcttattcaatacagacattattaaaaattaaatcatgtaaccatatacttatattgttaacatattaaaaacaaagataataaatacttaaaattcattcctttataattagctgactgttttttactattatctgttctcttgaggtcatttatgcctattgtgtctttatggtagaaatactgtataagggtgagctactgtacatctctataaactccgtgttcagcaacattgtgttagtagcttgaacttggccatggtagggaatttatagcacagaattagcaaatgctacaaatcagagcttgatgtattggtttgttgattgttggcacttaaggtaatagaaaaaatgttaatacatagtgtatctatagtcattatgttataaattgtataaaaattgaggaaatattctttcagtattaaaaaactatagtccagtcagcattcatgaaattatac

SEQ ID NO: 28156 - DNA, 981 bp, Bovine  19866881953696
  misc_feature (1)..(1): n is a, c, g, or t
ntaatatcttaatcttcactgaatatatcattggacttactagatgcaaatatttttccaatatgcaaatgaatattgtcaacaagtattactctagtatgataatatgctttggctttttataattattgcattgaaattactaggcaatgtaaatttcttggcaaaaatacacatcaagtgataaaaatttgggaaccattcaatagaaaatcttgttagtgatggtatttcaacaaacacatatgaaatgaaatgtttttatgataaactgtcatgtaatttggtgaccacagataacacaattagtctgactttgtgggggagacgattactgaacccctaatgcttattagtcctcactaaattatacctttgccctgtcagaagaagagaaactgtcacaacaaataattatcgaaaagccagaaatagtttgaaagaggacagggaaaaaaactttactttcctctttaacatttcaccaactatgcaattcagaaaacatttcaaccttattactacatgtcaagaatttcatacattaaagataaaaagcaattttaacccaataaaagtatttaagtacaaataaaaggaaaacatttttaataaaagtcaattaaattaaaagcaagtacctaaacttgtggcatgtaagtaaatagcatttcagcatcttccatcagaaatggacctttcttttagtactactgtattttggcttttagtataatcaagtttctaagctaatgataatgactggatacacaattttgtagaaaatgcactgatttgaaataatattttctaatgtgttggttatttattatcattgtagccaggctttaaggttatttaagatcaaaaatagaaaaattggcctatcacaaacaaaaccattcatttctaaatttgaatatataaactcatagttaatataaactagcaacaagctttctaaccattcaattgggtttt

SEQ ID NO: 28157 - DNA, 1170 bp, Bovine  19866882010791
  misc_feature (1)..(1): n is a, c, g, or t
naccacattcatttcctcagaagctctgcttgttcagtttactgacaccgggctctctaaggctattgtcatgatggtacttgaagcctattctggttggctagaacatcctttgaaattgtctcatacctacttttctcagaatgtgtacaatgaggaaaattcatttccctcctgttgagagaagttaatgatcattttctgttatattaaaatattacccattgttatgacttcagtttaatgttcctgcagaaatcaccacgtgctgcagagtttagctatgccatggtcaaagcacctgtgtgttatttcagagtttctctttaaaaaaaaaatgagttgttgcagatgagttatggggggaaaaaggaaaatcacaccatttcaggagaattattcagtaattatatttttaaactcacttttagcatgaatacccaaatttttaacaatgttgtctccagaatataattataagtgccacattgagtctctgaaccagaaataagagccttcctttaagacataataaatgctttaagtgtcaggacaatgttcctcttcagggagagatgaaaagtagaattacaggctatttctgcattgtatttcctcatgtagtttagttaccattgttattttttcaatttcctgccctccttgggggttcatcaactgtgtccacaaggacagggacaggctgggaaatggacaaatggaaaaaccagagtgacctcagaggattcccaaactccatgaattaggggtgtctctttcatgttttggcaaatgtctgaccactaggaccagaattttagcaatgtgaaggagactgtagtgggagcagcgaatggaaggggcaaaaagctgggatcttaaagtggggtgagatacttttgaggagaagggggaacagtctggaattcatttccagcaggccaatctagtattaattcctttccttctttgttatttgcattagttcaatcgggctgccataacaaaatacatgtcacacacggggtggcttaagcaaccgaactttgttttctcacagttttggaggctgggtgtccatgatcaaggcatcagcacagttcgtttctgctgaggtctctctccttgcctagcagacagccaacctacttgttatctatttacaggttt

SEQ ID NO: 28158 - DNA, 1579 bp, Bovine  19866880141311
  misc_feature (1)..(1): n is a, c, g, or t
nagtcgtgtccgactctttgtgaccccatgaatcgcagcacgccaggcctccctgtccttcaccaactcccagaattcactcagactcacgtccatcaagtcagtgatgccatccagccatctcatcctctgtcgtccccttctcctcttgcccccaatccctcccagcatcagagtcttttccaatgagtcaactcttcgcatgacgtggccaaagtactggagtttcagctttagcatcattccttccaaagtaatcccagggctgaactccttcagaatggactggttggatctccttgcagtccaagggactctcaagagtcttctccaacaccacagttcaaaagcatcaattctttggcgctcagccttcttcacagtccaactctcacatccatacatgaccacaggaaaaaacatagccttgactagacgaacctttgttggcaaagtaatgtctctgcttttgaatgctatctaggttggtcataactttccttccaaggagtaagtgtcttttaatttcattactttggtcagtaaagagaaagagttaatgttagacataataatgtagatttctcagctccaaagagactgtgttgtcaggtgagtcttcctttcaaagttgatgtgcattctgtaggcttctactatacaggatctcatgaagctcttacgaagaacaaattccttacaaccccctagagggatacagtcactggagagccatggcaattacaggatgtggtgatgagagaaggaggcaaagaactgggtctgttaggccacttttcaaaagattcatgcagtatgtaagcttgttagatacccacaaggtgacccagcgttgctcaaggaggctgcagttaaacggggctggggggttatgtttatgcctcatggaagagaagtctttatccaattctgctctaagactccactttctattacatggaaattcagctctcttgctttttgtcatcattttcattcctacaatgaaatatattaagtaaggtaaaatgcagtacaaaattatttacattgtctggtgattctttgtcatcatagttagatagagataaagatatatagatacagatgtctatctatgaagtctctgtgaagtgtgtgtcatatgtatgtatgaaattctgagaagtagtttctatcacttctaaaagattgattgttcaggggcttatatgtcacttgatcatatatgtctttctaatgaagtctgttagtcaataagaatttactgaagttggaccatgtaaactgcagtggaaaatactctttggaagaataagaaagtgatttttgctttgaagaacttcctaatcagactgagcacccgaaaatagccaaccgtgtgtaatgtatgagcatctactgttataagttgaattatatcccttcaaaatagatacataggcatcctgaccctcagcacttcagaaagtgacccttatttggaaataggtgcattgcagatgtaattagttaacatgagggtataccggaatagggtaggcttctaattttatatgggcagtatccttctaagagg

SEQ ID NO: 28159 - DNA, 1759 bp, Bovine  19866880361601
  misc_feature (1)..(1): n is a, c, g, or t
naaacctgcagtccatggggtcgctagagtcggacacgactgagtgacttcactttcacttttcactttcatgcattggagaaggaaatggcaacccactccagtgttcttgcctggagaatcccagggacggggaagcctggtgggctgccgtctatggggtcgcaaagagtcggacacgactgaagcgacttagcagcagcagcagtatatactagaacggtagttttctgagtagtcccgagaccagcagctggtgcatcaccaaggaagatgttagaaatacaagttcttgtgccccttttatccctattaaatcagaagctctagagatgttttaataagccctctagttgtgtcaatgcaggctgaagttgaagaaccactggctagaaaaaccaaccttcttctctgccttctttcatttctttgtctttattcaatgtcattccagaaaggacttggggtggaaaatctgacttaatggtttgtgtaagaacaaaggttttattttacgaaaagtttagattcagtggtgtgatgtggctgctgccaaaaataaagagttggcattggaaatagtgaccagaacaagggaagcaagaggcagccccctccccatttggcatattctctatatttgccatattgcactagactgtacctggagtttgttgaggaactgattttcagagggatattgaaaaggggtttgacaaggatggcagagctccacaaaccttgtctcgaaggaagaagttgaggaaagccccctcctatgatggggggctgacagagagaagaaagagaacttgacatcttgttccagagggcagaaaacatacagtgttggaaagccccctccactggtatgaacagggcaagatgtttccaggctttttctgcaaggtgttggcaatccaggtaagtccctcaggctttttctcctccagctgtagtacttagatgataagggctagaatgtccacttcacaggtgtctgtgaagactgagaaatgtgacaatgtttcaatatttgaaaaactagcataattgtatgatgatgaaccaatggtactgttattaactaagacgagttgatggaaattttaagttcaagatgaagaaaaatttcaacctaccagttggccaaaagagggatgatcttcctcaacaagtagcaagttcactgtcatgagaggtcttcagatcaagacagagatgttagagtatgaattgttttggtttggagagatggcctctgagtgcctctctgacgcttgtatttcatgacacagagattagtgactcaaggtgaggtagatctaagagattggtgcttggagccagcagaatgaaggtttaatttggcattgcctcgtcactctgtgcatgccaatacgtgccacagcaaacgttttaaacactgaaatgcatttaaaccttaagtacattaaatatcaggcttcccaggtggcactagtggtaaagaacctgcctaccaatgcaggagacatgagctgcaggtttgatccctgagttgggaagatcccttggaggagggcatggcaagccactccagtattcttgcctggagaatcccgtggacaggttgcacagagtcggacgtgactgaagcaacttagcacgcatgcacattaaaaacatttaaaaagtccatccatgtctctacaaatgaaccaattttgttcctttttatggctgagtaatatttctttgtatgtatgtaccacatctt

SEQ ID NO: 28160 - DNA, 2637 bp, Bovine  19866880550623
  misc_feature (1)..(1): n is a, c, g, or t
ngattagagcctgtgagaaagaaaaaaaaaaaaaaaaccaaacccaaccatcacaacactggcaaaaaaacacattttcacaggttagcaataaagcaaaacatttttcatttttgcctcaaatttttggcacagccaagggacaattttctcaaacagaatggaagagcgcagaggagaatggcagtatgtaagtggactgttcataaacactggaaaaggatgaacattctagatgctggtccgaggtgtgatttttttttgagaagtctctagcagggtgttttgcttgctttccgtgtctgtttctttctttcctttttacagaaatgcatattttcctatccattaagatttatagttttctgccaactacttcactggaataagttttccctttaacaatgcacatactagactgtaatgtacccataaaaatttcttctcagatagtgcttacaaaatgcatttctttaggactcaagacaaatagaagtacagtatgtgccatttagaaccaagtatggctctcacttattaggagaatgtgttggaaccacaattgttttatcagaagatcaaattcaagaaatgaaacatctccaggttgggacaaatacataaactaacagtttttgagaaaaattaggactgtcactgaatcctctggctcattggatcttctgtatggcttacccattagctggactgcaagaaatgcatctccattttcccatcactgccagacccatgaacttggtggcactgaccatagcactctaaaaaaatcaaggtttaaaaaagagatttaaaaacagagaaaattttttaatcatgctttcataacttttggtgaacagttggtttaaatttccaaataactcttttcaaaaggatagtatcaaaacacatgcaaaaaataaaagactaaataaagcacaataaattatttcactgcctaaggtattagatttcaaagagagaagagagtacacataaggatattagagtggacgctattggatctttgggaattgctgtcagatattgatgaaaacagaaagactgtaggagatcagataaaagagagaaatgattacatttggaagaacaatgtggactacgtggccaacagagatttcaaatgtaagctaatagcagcccacgaaagaacaaagttggagccagtcccacatctttaaccacatttacaatcattcagcatctgtaaaaatttttacatagcatttttgctcatttcgaaatttgcaaaatacatatttaataggtttagcatgtcagtcagtcatttcgtccacgggcagtgaaaaggatttgtgttttttaaaaaatgagctgggttttgatgcctctgccctttcagctctgccccagccagctgtaatcacagctgattcacagcccagagatgctgtaaacaatgtgttctgtacatttcagcatccacgctgctgagaaaagccatcatcttatactttcatcttctttctcccaaatttcacatcccagcaacctggaacagagaggccattttcaaattgcttattgtcctccttaccttaccaaatatcaccaaagagaaaaaataaaaaaataaaagatacatattttcacaaaacatattttcctatctgataggaatattaactgctacatttgaaatgatcagagatgactcaaactgaaacataatttgaaaaaataataattgaaaagccagctgggacagtaactgggaaattgagctaggtctgccagttctgcaagagcagggttgtcaaatacacctggactgaaagtcccttttgtgatgatttcattatattaagacaacctgaagtagtcacagcatgaatggctgtctgtttcatttcaattatatagatgttattttactacaagactcaagcttttcaaagtgtccctgaaacttttcaaaggatagaaatggattccatcctttcttcccatctctggtcatctttatttacacttagtcaacaattgaaaagaaaaaaaaacagtcgatatcaaagacatgctagaaaggcatcctgaattaattagtagcatagatgctattcttcctattgcttaggatctattacaacagatatttgcttccagatggggcatcaatacttcaattatggggtatgagaacctcaattaataagtgactggattagagacctttcctatctttgtgggcaacagaaaagaaatacaaacagaaatttgtaggtgaaaatctctcaacactacccaaattttgttatcacttataaaccctaaactaatttgatatcaaaacttcctttggtgttgcataaacagagatttggaaagctgctccactcagttcatttcatctgccatctgtaacaacttcatactgactccagatttatgtgattctatacccagaagttcataacagaatattatgacttgcagctgaattacaaaaagaattatgcagatacagtataacacagagcatttctttcatggagatcgtttaggaaggggacttattttcataatctgctttccaattttactggaagaagaagacatagctcagggtagtacaaaattattagagaacttaca

SEQ ID NO: 28161 - DNA, 2020 bp, Bovine  19866880585559
  misc_feature (1)..(1): n is a, c, g, or t
nattcagagaagttagtcaacactgcggtaaccagtcaccctagtttgggtcattgaagggaacggatctgagttataattaaggttttgttccaggaaacactcagccaagaactgtgggttcgggcaatcattcttcttattttcatcagtctcaaagacaggttctctttctgtagtccttgacccacgagagaattatcgggcatgtattgatcgcctgtgaccaaggcttcacgcgctgcagctgaggggtgggaccagcagttccctgactgtgcccggacccatgcacattaatcattttaattaagtgcatccagtcatccttgtcaaatccatggccaatgaactgcaaactatcagaacaaggtgttggatggagtcgatcatactttgatgagtaaaccaacttgacttgttcatttatgaaagaagtttgaaatgcgctcaggcttagtcatgggctggtgagggtgttttcctcttaaaccactcttcatagaggacaacctgtttctaaaaatgcaggagacgtgtgggcaaagtgaccccagtccctgaataaattgctgcactgacttttctatgagtaaaatattataaattcgaataacctcttcggagcatttaaggtacaggaaatgagtcatcgaaagaacctcctgcagcctctggatgctggcaaacatttttttttaaaaaccctcattaattagtgggaaagtaaacttgaaaaacctgagttaatattattttgaaaagaaatatcgtttatgactttcacgttctttccagtataatgacttcaaagtatttcttaatccagtcctttggtgaatgtgttatttttttttaatacacgagaataaaattcagtcatgtgcatggaaagtaagctgctataacaaagcaaactgttataatgtaattacttcatgtttcattggtgtttgcttattagcaaaagaatgaataggaaattttctactaaggcaaccgaaagcacacattaacttttttaaaaatgtgtctttgttgtagtattcgctctgcttcgtgcatgttggactaattctaaattaaattaaaatttttaattaattattaattttcctcatgaggaggacagtttggtgttctgaagttctgggatttttatctcccagtagtccgtgatagatgttttttagtcgtattggggcagaaaatgtgaaagtgttagtcactcagtgtatccagctgtttgtgagcccatagactgtagcctaccatgcttctctgtccatgggattctccaggcaagaacactggagaggatagccattctcttttccaggggatcttcccaacccaggggttgactctgtgtctcttacattggcaggcagattcttcaccatctaagccactagggaaggccagaacccatgctgtcaatatcccctccattagtctgggttctccagagaaacagaaataggatatgtgtatatataaagaaagaggtgtattgtaaggaactggctcacactgttatggaggctgagaaggcccaagttctgtaagtggacaagcctgagatccaagagagtcaatggtctaagttccagcccaagtgcaagaaaagactgacatttcagctcaaagagagtcaagcagagagaatgaattttcacgtattctgccttttgttctattcaggtctctaacagattgaaagaggttcacccaccttagagaggacagacaacctgctttactcagtctacccatttaaatgtagtcgtagccagaaacaccctcagagacacatccagagtaacatttaagaaaacatttgggcacctactaacccagttgacacataaaattaaccatcacatcttgcttaccaccatacaccaacacacacacaaaatctggcagtggcttatgaaatattagaggagctaggttttaatgaagaaattagaacttgatacactaaggactgaaacaagcagtatgaaataggtca

SEQ ID NO: 28162 - DNA, 2689 bp, Bovine  19866880693225
  misc_feature (1)..(1): n is a, c, g, or t
naggtcttctaagaagaactgtgtatgaaaggataagagatgtgtagaagaggcagctgttgtgatgagggaaataaggtgacctgtagggttgtaggtaaatagtagggaatgatgttggagaggcaggcatgactgatggatataaattaatgagagaaaaataccacatagtacattatttagtgatggattaattgatgttaaaaaagttacaggcaagagacagctcagggatgagaaaggttatgtaagaggctggctgggatatgactgtgctccaagaactgtgactcttcacctctaaagatgccccctccctggagaaaggtcataaagaggctacatggtccagaatcagtgctggccatgaggaccatggcagccccagggatcaaaagctctcacccgacaccctcacaggcagtgggacagtgactttcctgtccttccgggaagcctttagtgaagacagtctggtgtgaagatagctcactcctttttctgcaaaggaaaagactggaagtagcttccgtatttgaaatgactttctcacacatgtgagttctattgttctccacacaatgggaaagaggaaaaacttgtccaaagaataactggcactagagttgttatccaatttcaacctattcttcgtgcctctgttctggctcacaaaaatttgtttgaacctcagagtcttttgaagctatcagaataatggaaataaaatttttgtgctgtccataaaaattttagctcaataaattccctagtgccaaaccattacaggatcctggagtgggcacctaagacttcagtgaataccaatataagggtcaaatattgtcaccagtcactctgaccagttcttgctgacttaatcccaaactgattaaagaacctcagaaagtgtcttacttcatcagattgttgtcacaaaaatcttaatggtcctttcaaatgaaaatgtacctcgcaggcctagtaactgacctatttgattccaacatagatcataataatttgacagtgtcacttattttagagtctgattgccttctttgcctccgggtgctggagaaaaagggattttgtgactgaaagggttaagtggattttattataatgtgctcctatttcattccctccctccagctccttcacaaaatgttaatctaattgtgatactatcactttgatgacaatatgacaagacagacaaatttgattttattctccacagagcaaagcatatgctgcttgggaggctttgacagagagaaggacataaaacaaatggagttcatgaatatacaatttttattgtacacagtagtgacatccaaacttcagagactaggtgggtgagactgaggccttcctattgagattaatgggtatgtaaaaaggtaccaatggagagtactacagtttatgttaaaaatggcgatgtggataagaataattttcttctcaagatgaatgatacacttaatggttgtgagacattcgcgcccagtagcagttcctccaaagtaattttttgttgttattgtaaattatataatcttaactgcaattatagtcctttttaggtaaaggtcaacttagtgctggggatggttataaagcaaaaaggaaattggtatatggattcccttgttgatagcttatgagtgatttcaagtgatatgatttttttagtaactctatttctcgtttaatgtaatatagcgagtagagacagcacacattaacaaaaccacaaattagatttctctaagtaaacatgtatcttctaaaggagttagggccgttggagaaaggacagtttgaaggttaaagacaccagccaaacaggggaggcttattttgaagaaaagcagaagaatgagaagtatggtgaaattctcattgttgggcttatatctctatttttaaaatttggtttcctgaaacatgaaatccaacatggttcctggtctttgccttaagaatcttactaggatgttaaatgagattcagtgattcattcaggatgaaaatgactgtctgaataccctcactgcaaagcagtagtttgaatcttaggatcctaagttcagagtgatcaatacagatcaacgtcaaatctccaagtttattctttatagagaacaaaagtgcccagatcataataggaaatgcaaaagcggtctgtcaaacttcaaagatctttttttaagactataatacatttcctaaaattaaaggcctaaaaaaaagtacttggtattaacagaaggaattgtgtctcaggaagtacaaacatttatggttcaactatatgatttcctctcactggagcttctatatgattttgatcaataggaaaactttcacagaaaataatgttacatggaaaaggttaaatgaaccttgacactgaaggtcttttaagatcctgcagtataacaatacatacttatatgcttagttgtgaaggactctctgtgaccccatgtactatagcccaccaggttccttggtccatgggatttcccaggcaagaacactggagtaggtagctatttccttctccaagggatcttctcagcccagggactgaacccacgtctcctacattggcaggcagattctttaccactgagccactaggaaagtcctgtagtataaccaggtttcc

SEQ ID NO: 28163 - DNA, 3096 bp, Bovine  19866880695307
  misc_feature (1)..(1): n is a, c, g, or t
naattgccctgttgtgtggatgatgcaactgctggagctgttttgctgaatgtgaactttgtccaccaactggactctaaattggttttggatccttgtgaaatctaaacggtcagaccatatttttctaatcttcagttggactgtatctttgctctgaagtggagctgattcgtttctgttcacatccaccgcaggggttgcttctctgtttttctgctctgcgttgcttgttttctcaaggctgctacttacctcgtccattgtgtgtattcaggagagcaggagggcagctccctgtggtactgtggccactgtggcttcagggatggtttactcaagtgttattgttagagagagagctgactggttttcagaaactgaacaggggaagcgtcaggaccagctcacccacaggtatgctggtactatgacaaaaacttggacttggacttcagatagcagagcactcagatcctttactggaagcgctgaccctcagggctgtggtctctacttgggtactctgctactgagattctcaacttcactgtgtataatataagaatcataaactcagactggggtccacctccagaaattctgatttgattggtctgggctgggagctgacatctttagttttacaaagcttcccagggcattctgatgtgcagccagatttgagaatctctgttttgggagtttatgtaacatttgctactgtgatttttgtctagctatccatgtcctgttatgagtttctgcatgaatttctgcatgaaaaaaaaaggcaaagatctaggtggggtgttaataaatgaagagtctggatcctggctttagtaataagaaaatgaataataatgatattgatcactgttagttattgcatacttacgttgggcactgtgctaatctttatactagccctataggataaacagggcatccctggtagctcatcttataaagaatccgcctataatgcaggagaccccagttcaattcctggtcaagaagttcccctggagaagagataggctacccactccagtattcttgggcttccctggtggctcagatggtaaaaaatctccctgcaatgcagaagacctgggttcgatccatgacttgggaagatcccttagaggagggcatggcaagccactccagtattcttgcctggagaatcccctggacagaggagcctggtgggctacagtccatggaatcacacagagttggacacaactgagtgacttagcaaagcacagcacatcataggataaacactactgttattttcagttttacagatgaggaaactgaggcttgcagacatcatataatttccccacagtcacacaggtaacaagtggcagagccagaacttgaacttggtctttctggttccaaagttcatccaacccaatcactcccctaagacgatgaacttaaatatgaacaagactatttggggtaaagggatgagatgtcaagaaaggagaattcactgagtgaaaataatatataactatatttaagggagatcattcttttctgaaaaatgaaggaaaaaaagatatctttggatgactttcttattttcttttgaagccagtatttgtctcccccaaacctatggaaattcagagtgagcagcagaacccaatgacttgcatgatggtgttggaattaggcagtggcttctgagtttagctcatctttacctcctgtctgaggaacatctttacctacccccatttgaggaacgaccatggttgcttcttatccaaacttgttcactgtatggaacatcctgaagtgattctcttgtccacactgggtaattactggagtgtgcaagggaaaatcctggagtttttcattttttctccctatataagaacaactgttgttttttttttttttttcaggctagtaaatctgagttcttaaactactccattaatcctttaatgcctattaaaagttcagaatggtaccagaccaaggccctggaaattccgtctccagctcttggccaccctagtatatatccatacatgtgaaagaatgttgcagattgaggcatccagtaaatatttgtcaagtgagggagtgaatgaactttgcaaatatggaccataatagatatagcatattgctaaggatttcttggggaatgagtgaagtcttagtccactggtctgctcccaggttttccatggggccacttgatcaattagccaactcctaattccttcctggggtaactttttgtacactaagcacagcaatattaatagggttaaaacaatcttattatctctgacctctgtttgtgtctctcagcctggatgaaaggacactgcttttttcttcagtctcagtagtatttttcatgttataagttgggtaaaattcagagtcccctggaacatggagagagaaagaggcaagttacttgccagcccataggaaagccaagcccaacgctgatgcattcttgtcgtggatggtcccacgggaacacctggattagcccccgctcccgctgtgggttcaaagtgctgtccctggagttatagaggggcagttgggtcctcagccagatggcacaagtatttttagggctgttcgcctctcaatctaatttctgcttgaaactttaacacatgcagactgcacagaaatgacttttaaactactctctgggtagtgtaggagggcttggattagtaccacagcctttgagcaattttttttttttttttattgctaactatccaacaggctgaacagaggaaattcaagtctaaccctggagggacccctgtttagtcatctgtctagacagacgagttcatataatgggcctctctgtttcttttgctttgttataacagacggtggtcccttcctttcaactctatgaggatgtcaacctttggtttttgatcccagcctactgttgataagccaagaaagtgactcacacatgagccaaggatgactctcgtgtgtgacacagtctgtgatataatagaaagaaaacatagactttgcataaaggagaatcctgggtaaaaa

SEQ ID NO: 28164 - DNA, 3217 bp, Bovine  19866880735400
  misc_feature (1)..(1): n is a, c, g, or t
naaataaaatccaaggattaaagaaagggatgaggaaaaagcagaaggacagattgtattttacttctgttcatcaaagttgtgatggagtatccagtagaggtggggtgggagtctcttattaaggcaaaggtaacttcaactgaagctgaatgctccatctctacaaaaataaacactactactgcccttcttatgaccaaggtcaggaaatacgtttccttggaaatccactgagctcatttcaccccaacacatttatcttccactgattaacagagaaccacaagcagactgtattctagaaagctatctgacagcaacctctgtggtctcatgccagccccatgtgagaagatgacatctctcctgatgtttcatgatgtatcaacccagtacatcacactgcatcaaggagttcttttgtttttcttttagtggcctcaagctaataaattaacctaaaaataatctggcaactgactttgataggtaattttgtaaaaggctcttcctcttggaggaagtaaagacttagaagtcaaaatctaagagatgacaaggaaggaagggaactaacatagatcgactgcccactctccatccagcaattatatacatggttttatttcacccttacaataaacagcaagtgaactggaattattaagaaagtttagatcgcaatactcacaccactaaacactacaccatgttgtctcattaagggtgactagtgaactagtcaatgaaaaaaaaatactgtgcatagtaattcaccaaacctacttctatctcaagctgatgcattcagatatttctgctataagtattgctgggctcaaagaaatatcttgattcaggcagatggtgtattatcttggaattatctgtctgtccacacaaggaatcaaccaagatggtaggatgttgccaaattctcacaattcccttctggaaggaatgagttctgaggcattcctttggattctccagattttgcactagaagtctcttgggtatatttcaattagcagaaagacggtactattgaaacaccatttacacatctgttcctccaccagaccctgagcaactgcaaggcacaagctgagtctgatatatatggctagattatttatgttgttcagtcactaactttgaactctgactctttgcagagtgtggactgcagcacaccaggcttccttctccttcattacctctaaaatttgcctaaactcatgtctatagagtcagtgatgccatccaaccatcacaccctctgtcatccccttctcctgctctcaatctttcccagcatcagggtcttttccaatgagtcggctcttctacatcaggtagccagagtattggagcttcagcttcagcatcagtcctttcaatgaatattcagggttgatttcctttagaattgactggtttgatctccctgcagcccaagggactctgaagagtcttctccagcaccacagttcaaaagtacaattctttggtattcagccttctttatggtctaactctcacatccatacatgactaccgtaaaaaccatagctttgactatctggacctttgtcagcaaagtgatgtctctgctctttaatatgctgtctaggtttgtcatagctcttcttccatattgctagatgactggcatcaattctgctaccaatgccaggaggcactcactcagagttttctgtctatgaccctgtacagtgtgttggtgtggcagattaaagatgggtgcaacttctttgacactctttctatcaagagatggggtctatttcctttccctttgaatttcacctgggttgtagcacatttgatcaatagaataaggtgaaagggaagttctgctaggtttgaaccttgtctttaagtggaccggcagcttctgccttggacacttgggcccctgagcctcaggtgaaaaatcctgactcttcttctgggaagaccacatgggtacatcctgaaactacttagagaggagtaggggctcagtcatcccattccagctccaagcttagaagcaaattcatcatagatcgtccagttcagcccagctcccacctgagcaccatcaagcgacccaggtcagagccacatggagcagaagaacagcccagtcaagtcctgtccaagtttctgactcctaaaaatcgataaaaaattggtatctgaggccataaaatttgggggagtcagttaaacagtgactaaccgaaaaagttataaaggtacaaatcttattatcctagaggtgataaagtttgaaatgagcagtaaacagagccacagacagaaaaaagaaacttatgattaccgaagggaaaagggagggggataggcgtaaattaagagtttgaggatctactgtataccacagggaagtatactcaatattttgtaataatctataagggaagagaactcgacaaagaatatatatacatatatatgtgtgtgtatatatatatatatatatatataactgaatcactttgctataccacggaaactaacacaacattataaatcaacttgacttcaatttaaaaaaaaaaaaaagggcaataagtgtgaaaagggtataagttggtgagaggaagctataaatagctggaaggtccaaggtctttggaggtcatcatccctaaacacaagtattccttggtggtttcctgtggccacaaggtcatagatacccttaactaacttattaatttcttggtgactcatttctttgcttgtaaatttgaggacttagcttcctccatggtggcagattcacttgctcatgctggcgatatccaaattgaagaagattcctctttcctactttttccccttctcataactctgggcatgattttaatcataaatacaagtgtgatttaatcaaataaagatgtattcaattttccaaaaaggctgagcgctctactaaatattagtaggttcaaaaacattcccagagcactggagctttatcggaacacatttcaataaaggctccctttggcatagatctctaaaaatacagtaagggtcactgctatttggaaaaaaaaatttccgttttcctctttcccttcatatcagaaggctttatccctttcctattccgtgtgatactgctgtccatctggagtcataacatgatcacaccactatatgctctttg

SEQ ID NO: 28165 - DNA, 896 bp, Bovine  19866880823197
  misc_feature (1)..(1): n is a, c, g, or t
ntctgtaaaattcataacagcacccaacagcacagaataaccttgaaaatcatcttcatttgtcttaatctttaaaaatctttaaattatttgtttactgtctctcccaaatttcaacattctaaatacgaaccacaaaaaaattcccttttgtttctgtcaattctatgcatcacattatttggcttataatatccttattttataacaaatgaactgtaaatcttttcatttaatattggaaataaaagttatttaaagtaattttttaaagtaattcttgataatgactaagaattcttgataaaagcatctgatactgcccattgaattatttagaaatcattgtacttatattcaaattacttaaagggttattcagtaaaaaacatatatgtcaatttaattcattactgttcatgtaaatacagatttatgcagactcatttctcctataattttaaagtaacttgaagagaaacagtcttcctttgtgctgaaaattggtcattttttaggacttgacttaatatctggcttaaatgcatacacgagagacaagaaacaaattgtcaggatatttaaagagtatgtttcataagcaataaactttaagtacactcaacctaatttttgttgtatttatttcatgtagctcttcataagtgcttgaaactgctttttgtaaaatatccctttcactttaagaaacatgctatttttttttgctataaacaaaatttaggaaatattttatgtctcacattttgaatatcaaaatattttaaaatcatattacactgatcttaaaatcacgatatgatgtgtttaacagttcatttaaaatatggatattttttgtacaaagataatttgcctttagagggtacagtcat

SEQ ID NO: 28166 - DNA, 1284 bp, Bovine  19866880826038
  misc_feature (1)..(1): n is a, c, g, or t
nttgttcgcgtggttttttaaagtgacaaacaatatttttaattctctgttaatactatattgcaaccagatgaatgtaaaagctttcattcccacacaactgcttgcatgctagtaccttcaccagtttaatgaccattgcaatttgagcctacaatcataatgaacatggaaaataacataaagctgatggatggtgcctaatgcaaatattttacacttgttagctaggtgtgtacgtcagataactgtgtatttactactctcggatctcaattaattcattcaagatgattggatatttgtgaaaataaaaaaatgcaaacatcataacattacctgataggatatttcattacctgtagaatgtaggagacatttcgctcattagcatggtctactaaattaggcttttatgttgttagagtatttgtggcttagtcaaagctcataaaatagatagtagccaataatggaggggaatgatttattggcaaagagccaagtctctaagtccttttggttttcttacagtcatgtaaactgaaattacttagacacatcttttcaaatttctctcaggaaagagagaatagattgtttaaagtcaaagactgtttttaaaagaatagatgaaaattgaaagaccttcaaacttttatactggtcactaaagcttcatttatattgatccaagtatcagctggaaacacagatgtaacatgattttttagagtcatttcccatgtgttccttctgttatatttgccagctctatcatctagataaggacacattttaagacgggatgagttattgacttgagtgcataatagcaaccaagacccaaactgggagttagtgttcacagctcaaccaagatactgcgctgttatgcccctgtatccctagtggacaatagctgcgtgtgtatctgagcatatgagtatttctggaggtttcattgacttcctccagtctcaccagcctcaaacactggagcactgcctttgttacacagatgtgcagtacaaatggacagatgtgcagtacaactgaaatgatatagtttcagtttgtaatagataaaaaggttgataaggagtgagtgaccaagaatgagtgtgaaatatgtagagaacaaactagcagttatcagcgggggaaagataggagagggacatacaggggtaggggaggaaagagtgggatactacggccattatatgaaatcatacatgtggaactttcggaaattgtaaagcactatagaatttaaggaac

SEQ ID NO: 28167 - DNA, 1112 bp, Bovine  19866880830151
  misc_feature (1)..(1): n is a, c, g, or t
ntggtgcgcacgtgtgtccctgtacaaacagtgaggcactcataggctggaggagaggagaatgattttcaaatcaaagaggtcagcagttgccagagtagcacatgtgtaatgaaccatattttactttcatcatcacttcatcagatgagtaaatagagacaagatccccaaggtcagcaaaaggagatggtgaaaccggtctctagttctttctgcccttcctggatgggggctgccatcagcaccctcaccatagctgggttttttttttttttttttttctatttttttggcgtagaagtgtttgactgaaaatgaagccagagcattggcagcagccccccgcccccaccagaagtgctcagggctgtcttccaatgaggctggaaatataaacagaagagctagtttgcctgggggccccttgcaagagcccttattcgctactgctccctttgctttgggggtgggggaggtagggagggcgatgctttggttgaatctcacccaaaaagctgtatttttagccgaagatggaaaattataaaagcaaagatgtgaaatgaagctcttcggtgagtgttgtcagtggaagaagtcacccccagcatagacgaagtcgctccaagattcccatccacactggagcagggcccctgactccccgcagcaccggctctggcgggactgataaagggactggtcttaagcacttggttttgcttgaacactgaagtcagtagacaggtttctttctctgtgcaaattcagagtttttctttactaccttcacatgccactgtgtcctgtactggacacttgtcataggaactgaatccaaaggatgatgttccatcatttcaaagtttggtggtggtggtagagggggtcatacatacaacagaccttggttatgctactattttgtggagtggattttgtttcatgagtgaatttggtctctacattcccttttctgattcggttttggcatcaagtttatactgcctgcctgagtgagttgggatatttctccaatactttcttttggatagtctgcatggtttagaatgatgtatttcctaaaagtctagggagattcttctgta

SEQ ID NO: 28168 - DNA, 536 bp, Bovine  19866880934471
  misc_feature (1)..(1): n is a, c, g, or t
nttttagttgtaggttttccttataaaagtgcctttttaagaaaactggatctgttgacttactgaacattacagagcttttatgaggtatgatgatgaattagctataaaagcagaaggatttacaggttctaattcctgttaaatgcatatcagtttaaaaaagaggagataactgtgctgtacaacatgtattcaaattttgccaaatctagatgtttgaaaacgggttcaaggtgttagccaaaccaaaaacgcagttatagtcacccaattctgacttatgccatgtatttaagcccatttcccattgggctgtttcccagaatgagcactctctgttgactgccttaaaatatagaccaagttcagcaaaacattacataaacaaagggaattattctgtttctctgcatcagactgaaatgcaacccaattatgatttattgtccatatgagtggccttgattttttagtgtcggtcaaaaacaagtgtcttttaagaaaacaaacttatggataccaaaggggatgcg

SEQ ID NO: 28169 - DNA, 3230 bp, Bovine  19866880995646
  misc_feature (1)..(1): n is a, c, g, or t
naggtgatgaatatgttaattaacttgatggtgaaatcattctacaatgtatacatatatcaaaatgtcatgttgtacaccttatatatacacagtcatatcaataaatatggggggcagaattatcagacataaaaggaacagggataaagagatgaaagagaagaacagattcagaaatgtcagagatgaagccattagcagataaaaacactgaagtagctatttaaaatgtttcttatattcaacaatctagagggaaacaggaacataatttagtgagaaaaggaagagatacagaagtcccatgtagaatttctggtggtcaaaaaacaccaaatctgaaacaaaaaatacaccaggtggatataaaggataccgctgtgatcatttctcagtgtatcattctaaccattaaatacaagtcattggaccctctttgttcataaacacaaaaactctccagtgactccacaaacaaacaaacaaaaaagcacgctattaatgatactttcctggtggctcagaggttaaagcgtctgcctggaatgcgggagacccaggttcgatccctgggtcaggaagatcccctggagaaggaaatggcaacccactccagtactcttgccttgagaataccatagagtaaggagcctggtgggcttcagtccatggggtcgcaaagagtcagacatgactgagcgacttcactttcactatcaacatactgattaatcttttcatcacagcatatttcacaaaggctaacacaaagcaatttcttaataaatagtgttaaatggaaaagcaagtttgatgtggaaaataggggaaaaaggagaaacatgaaagggttcctaggtgtcttacttgatctctgtgtgggtatttgtgtgataataaaagaaaggccaaaggcagtttatgtttcaagaggggggaaaagcatattaggtttgagtttgaaatattcctaagacatcaggtgtctggcaagaagttagagtctggcactcaacgtaaagatacagatttgagggagtgttacaggcatttttgctgataactcagcccatgggaatagacaatgaatagagtaagaagaaaaggaagacaagaggcacaccagacatacaccagtctccaagctcttttccagacgctgttccctttgcctggagtggccttcttccggatagcccgtgaccccaccctcacctcctacaggtctttgtttgtatggtatctcagtgagatgccttgacaaccctatttctactggacaccctcctggaactttcctctatgactcttctttattgcccctgatagaacttaacagtatctagtctattaaatattttatttctttttgttttttacctacgatttaccctctctaaaacttgcaatccatgagagcaggcttctgtttgctcctgctttgtttattactataaacagggtgcctacaacagtgttaggcacataggaagtacttaatgtatattaattctatgaactaagaacctaggaaatcccaaacaatgaagggtatttagattatgcaaaggtcagagtaaaaattgaaggaagaccagaaagacagatggagcatcaagagaaattaatgccatggaggattaaggagaaagagtttcaagttaaaaatagtggtcagaatgttcagaacatcatggagataataagaaagaaaagaactggaatttcaattggatagaagcaataacaaatcttaaattacatgggagaaaatgtctctaaagagcatcatgcattcagacttcttatgcgtgtaagaatttctgtggaaacctggttctcacaatgaagcaggaagtaaaagcacgctataagagcatctgttctcatgagattttcagagttgaatcacaaactaaaggaagtttggatagttcggataaagttcagatacttatctgaactttgggggtggttttttaaccaaactgaatacagtgtacaacagttcatctcctaaagactaaatcaattagtgttctactaaccataatggtattcacaccacatatttaattactgacctttcatattttctgtatataataaagaggaaatggagaaaatacatagatttttgtgctatcattatattggttagaggtgaagttaaataatcatgtaatctgtttttgcccagtgtttaatggattaacatgtttatgtatttacatcttagttttatagtaatattccagtgacatttgaaaagaatatcagaagtattaagacaacattgagaataagtctctcccagctgcagatcaatgagtgttttgattataatacaaaataatggctcacaacttacatacctaaaagatatttttaaccatttttaagttgaagtatagttaatttacaacactgtgatagttttggtgtacagcaaagtgatgcagatatatgtgtgtgtatatggatgctaagttccttcagtcgtgtccaactctgtgtgacactatggactgtagcccaccaggctcctctgtccttgggattctccaggaaagaattctagagtaggttgccatgccctcctccaggggatcttcctgaccctgagatcgaacctgtgtcttctacatctacctgaatggacaggcaggttctttaccactagcatctgcacttctcttggagtggagacatcctatgcttcaagactgatagattcttaagtgaatttcaggattacagaaggggttaagactaaattttctgaatgtacaaaataaggaaaatgaagatcccttgggagagcagcatgctatggtatggcaaaccctaaccctcccgtccattcgtctgtaaattcctgctacgtggggttgagtcttgcttgaaaaatgccatgtaggaattttcacttcctctgtcaaccagtaaagaacttttggacaagctgaacagaaaactccttttccaactcctgtgttatgttagatattggattcagtgttccttttcaataatgccttctttgacccctagccatgacacactccattccaatttatagtctcctttatatacggagaagaaaatgcagtgagttgttcgatgcctattgtctgggctgtaatgatgatgattcagctaaggtttgccgagggtattgacattcttagaggaagggcacagaagtgcactgcacaggcctctgg

SEQ ID NO: 28170 - DNA, 1765 bp, Bovine  19866881001097
  misc_feature (1)..(1): n is a, c, g, or t
ntgtagtttaaatgttttaaaaattgcccaagataaccattcaattttaaaaagaggcagcaaggagaactttcatcaggttacataagaaagattaaagagtgggtgaggtaaaagatggttcacagattttgataattctttgagaaatatgaaataatatcagaaatattcattggaaataacaggttggggcatcacaaaaccacacatgggagtaacttacttaaacactaaaatgtgggtcttttcatatagtctggggtgtaattttagtcttttatcttccctaaatgaaaataacagaatctgttaaagtcaggttgcaattttctactaagaagtaaaggcatttttttttttttgaaagagttaagttttacaattatttcctgataactcatgatcataaaaaggaaaatcctaatcatttgtatgtttcactattttgagaaataaaatggtgtatataaatccagaaaagtaatgcttgaaataattatgtttttcccaattattcctgtttatagacatttataaaatatataaaatttcaaaatataagccagaacatccatatttttagcactcagggagaattgttattaacactttaattcatatagttttggttattttcatttttattcacattgtaaaaatacttggatctagtaaacatactgttttacaaactaattttgatttaaaatacccttagaacatttttctgtatcagagaagtcttagaaaagaaaaacattatttcatagtaatcttttattaaatagtttgcaggctgttgtatttttgtttacatactactatcttaaacgatactgagaggatcatgtttgcacatgaaactctgagcatctctttaattgtcatcttaggataaattccaggattagggcttgtgggtcaatacgtaggcagtttaaagatatttacacatattgtcatttttgttttccttctagaagactatatctgctaatacacccatccttgttgactatttacggttttacccaactcctggtaagtaccttgaaggaagaaaccctaaagattctactttaatttctagacacttatgtactttgtattcagagctgaagagaaaacagaagggctataataattttaagttcttacagaacttccttactgatcagaaagaatgattgtaaaaatcttcccacctcagttttgcagatggcagaaatcaagtttgacagttcccagagctgacagctccttcatgataccatttctgaagaagatggaacacaggacagggatcttctatccctttgcctttgacagagttactttccagaatgcaataaacatcccaggatatactattgaactgagttagaaataaagacccccaaggcctggaaaccatttaattgctattcaagcatttctgaaagtgcttggagcccctcacaggaaaattcccttatgcacaagacgagggaattgctaataacaggggtgggaggaaagccatttttaagggtaagaattggcttgggatgccagaattaaaacattcaatgtgtcaggtcaacctttatattaaattataaatatttacagtttccttttcttctaagaagaggaaatagttttatgcttgtttgtttctttgttcatttttaatgttgattagcgggaaaagtgttccattctctggccttgccccctccctgcctctggggatgtcatagagagatgctctgctgtataa

SEQ ID NO: 28171 - DNA, 837 bp, Bovine  19866881027194
  misc_feature (1)..(1): n is a, c, g, or t
ntcactcagtcgtgtctgactctttgtgacctcatggactatagcccatcaggctcctctggccatgggattctccaggcaagaatactggagtgggttgccatttccttctccaggggatcttcctgacccagggatagaacccgggtctcctgcattgcaggcagacgccttacctgctgagccacgagggaaacccctatatatatgtatatatatccttatatgtatatatataatgtgaataagtatttgtagtcccttctataaaatgaatcagagcctcatgtccttttggtcgcaagatcagaaaagactttcctgttaaatgggacataatcttttgaaataaaacattctatatccctaatggagaatgacttggtacaagagtaggatgctcagccagaaagagcatcttaaacttacactactgcccccccaccccaaactcccaactgctttgaaccaatactcaccaattattttcacctgtctttttatggccatttaaattatagtttcccactttcagttctgctaaatatgaatgaagcaggcgaagtgtggccccagagcagggcagtgtgtggggctggtttctatctttagcagtgtgtgcgctgctttagcagagatgctggaattcattctcatctcatctgctgagcaccctatcattaaagtgtcattgagaactgacaccacttaattttagcagctttcaattctcgtttgcggcaagaatagctttaaatggaggaggagtgcaaattacagagagagggatatttttacaccacactcagcattttatcaaacaaagcagcctcccgg

SEQ ID NO: 28172 - DNA, 2161 bp, Bovine  19866881056058
  misc_feature (1)..(1): n is a, c, g, or t
ntcaaaggctgttgggctcaagacgcattttgttttaaataatccttcataaaaaattcagctttagtctaatatgattgaaactcagcttgagtgtgttttataatgcattgaactggaaagactatgggcattgaattattcaaaacatggtaggtgaaggagtgatatgtggggaggaggtgatcaaaggaatcagtgagacttgatatatcttgttatctcattttatttaccttttagaactcctccaaatattagagaaaagaaatcaatatcaattttcacctctgtcacgttccgcacttcaattattaatgcatgtcaaatttgaccacagttctctataccacctgctttgcaataatatttctgagcctttattaaaaatgtaaaattgtcattgaatttccaaatatgattctccagtggctaattcagcttgttttattaataagcgagttctgatgagtaatactaatttagtacgccggtatgtaagattaaattataaattatttcagctgaaggtgatgagatatgactgtgatgtggtttttgggcaatcaccttcctcaataaaccctgcaagcacacagttattagaagaaaccagtactatagatggtagcaaatctgatattattttgcatgtctcttttagcagtggaatgcacagacccatacacacaaacatgatgggtgaaaaagcacacatgcataccttagatgtttgcattaatttctgaatacaattctccaggaagaaaaaggctttactaatgatttgtatttttatagtttattattttatccatattaaaacacttcaggaaatcacttgctcttttgttgttcatggaatcctttcaattttgagatgctgaatgtaaattggggcttccctgctggcttagaattgacctgcaatgcaggagatccaggtttaactcctgggttggaaaaatcccctggagaagggaatggcaacccactccagtattcttgcctggagaatcccatggacagaggagcctgctgggttgctgtccatggagtcacaagtagctggacacgactgagtgactttcaaaaagcttttgaagcttactcaacaagttcttctttaaaggatagttggtaaatgcttttttaagatgtgtaggccagcccttggcttagaactaaataaaggtgttggtctgtgccatctacacatccacctttgagaaaagagagtggggagagcttcagaaagtgcctgagttttgacccctaccaccaagactttgtctttcctttttataagtttattatttttaaatactgtttatttgtttctggctgccctgggtctttgctgctatgtgtgggctttctctagttgcagcgagcaggggctactctctagtcatgtgcaagagcttctcttgtcgtggagcatgggctctagggtgaaccagcttcagcagttgtgatgctcgggcttagttgccctgtggcacatggaatcttcctggatcaggggtcaaacccgagtgcctgcattggcaggtggattcttagccactggaccatcaagaagtccaccactaaggcttctgaaggcttagaaagataatagagctgtaagacagagctaaagcttccccaaagagaagaaactttttttttttttccttaagaattctctttccattttcaaaatggcagtgcccttttcctttgctggggtgtaaagtgacttgggaccaattggattcactctgtggaggtcctgcctactactgtgtaaccagttttctttcccagtgtcccttcgagcgtatgaaactgtgtacatgttatacctctatacaccaaagtcatgagattgaagctagatggcagggcttgctgtcagataattaaataaaaataagacactcaaacatttcaaggtacttagctgtggtctaggtctgccttggagattctcactttaaaagctgtgttttctcttcttgcaaatggtggctcgaccttgaacgaaagctgcttagcacccaaatgcataagaattcttaaaacaagcataacacctgcggctccattccagaactcggtcatgccacagttcatctggattcctataattcctgtatgttcccatatcttaatt

SEQ ID NO: 28173 - DNA, 922 bp, Bovine  19866881126930
  misc_feature (1)..(1): n is a, c, g, or t
naggatgagatggttggatggcatcaccgactccaatggacatgaatttgagtaactcccgggagttggtgatggacagggaagcctggcatgctgtcatccatggggtcgcaaagagtcagacatgactaagcaactgaactgaagctcacactcagttgtgtccaggcaagattcctgggatgggcttcccaggtggcactagtgataatgaatccacatgccaatacaggagacacacgagacgggggtttgacctctgggttagaaagatcccttagaaaggggaatggcaacccactccagcattcttgcctggagaatcccatggacagagaagcctggtgggtgacagtccatggggtcacaaacagtcagacacgaatgagtgtgcaagaccacactatgaagatcacacaactaactcagttctctgcctcttctctgggccctactgatgaatgaacaccaccaagggtagattattgaaccagaacaaagctgaaagcaaagaaattggaatttgatgttaaaaaccattaacaattagtagtttcagtggtgccttaacaaggattccagatgcctggccttcatgctttcacctgcaggcgatggctgtcaatttctgcagcccatacaggagaccaaagtgctttttgagaatgtgtaacggctgttacgatatctgtctgtggtaagtgagtccataaatgtcaatgtgcttttcaacataaactgggtttccaggtcaaaaatcacctggcttattccacgttagctttctggtgtaataagtgtatttaaacaccagaaaaaatgaatatcagcagtggtttatttatagctcacttctggcctttcaaagtccctgtttccagaactccttacattttctgccccagaattcttaatagttcca

SEQ ID NO: 28174 - DNA, 913 bp, Bovine  19866881281953
  misc_feature (1)..(1): n is a, c, g, or t
ntaaattatcagtgctgtgtacagtatatcattatagtctgaaggaaaaaaagatatgaataatttaataatacattactaatttatcaatgctaagtgacttcgaggaggctctttgtagttcattgttttcaatttgatatttgattgactgctcatatgattaaaattgaacctatttcatttgttaccaggaatatatagaagcagaagattttatgtatttttttttttttttttgagctgagcggtgtggtgttttctgccttgatgagattacaagatagctactactgggcgctgattagcaggtaaggtaggcatttgtcacaatcagatgtgtgcagtccctacttcttggttgctttcctgaggggaaggtgctaacccttgctttgttcataagcccagcttgcaacacagcagcaattatcattatggcttggaagggtcaagcttgagggaaagcaatttgcacttcacctagaaatgttcctgctgattgtggacaatcaatccactgggcgggctgtccaggagttgcattctataacctcagtccaacacttgggtgtattgatagccaagcacatatttggggaaatagtagcttaccctgaagtgtgctgtcttcaaagacaagaccaggatcttgtagctcttccctgtgatattctattttgtatgaatttgtatgtctatcttttgatatcgacttggtaacatactggtcatgctagtcagatctttgatttttcacataactatatgtcttggtgtggagaaggcaatggcaacccactccagtactcttgcctgaaaaatcccatggacggaggagcttggtaggctgcagtccatggggtcgctaagagtcagacatggctgagcgatttcactttcacttttcact

SEQ ID NO: 28175 - DNA, 2023 bp, Bovine  19866881333146
  misc_feature (1)..(1): n is a, c, g, or t
ngtacacaggtaccagtgtgcaccagcaggtacaaagggaaaggaggactgctggagagtgagtgcgagaacgggtttgtgtataatctcaaacaaatacgtctgcatgcctaacacgtgtcctatgtcaaaagaaagaacattctaaaataaaaaagttagccaaatgtaactgaacgcttccggttaggaatcatggcagcggccgttggagactcacgtgtgagtgcggggaaaaagctgaaaatttcactaaggaagaagaggatgaaaatggtagtagcgtctgtagcatcagagctggaagataaggacaaagacgcttccgataatgaaagttctctaggaagctgtggattggaaaaagatcacttttcctctggtgatgaagcagtagaagctgacgacgaagatgaagctgagccccgcgaggatgacaacgacagtgctgcagaagctactgcgggggctaacgcgggctgggcagatgccatggctaggatcctgagcaagaagattcctgaaagcaaacccaccatcctggtcagaaacaaagagctggaaaaggaaaaggagaagctaaagcaagagagactagagaaaagaaaacagactgaagcgaaatcagaagagggcccaggatggacgatcttgcgtgatgatttcatgatgggagcgtccatgaaagactgggacaaagaaagcgatggaccagacggcagcagactggggtgtggaagtgactctgacacataacgctgtataagaaacacagtttacattttgtttttcctggaaaaatagttcatactctgaaggttgggaaattataaaggttgcatttgtaagaaagccaaaagactttcattattaccaactttggtgtttccttttttctgtaaactttgttaaaattacatttcaaaccttatatgattttaagcattgttccttagaacatttgtaaaaagaaatatttctacttgagaggtgcattttgctaggttcactataggtttacatattgctcttggatattggtatttcagctatcaccggtgtttgtggaaatgcaacatcaatttataattaaaatgaactccttgatgttagtgtttttaagcctctaacttacaggcctgaatatgtatattttttgtgggaaagggtgggttggtggtttttgtgaggtattgagaaaacctatgtattaataacaaaatttttaaatcatagcatttctgatttggggtaatgattttatttatagatactctggcaaataatgatttaagaagtataaaatttctacttatatgttgccttttatatgctaagtaatgtatataaataatgacttagatttattttaaatgttgtttatttttgtatgagagatttactgaggtggaaattctcatatttaacttacacagtgaggcataatttcttaggaagcatatttgacatgttctagtttctcttattttccctatttttgagtttttcctcctatatttgagttagcttaaatactcttttatggacggactgaccagtgaaatggtagacaatagatgcgtaggtgtgtgcttagtcacttcagccgtgtctgactctttgcgaccctatggactgtagcccaccgtgttcctctgtgcatggcattctccaggcaagaatactggagtgggttgccatgccctcctccaggggatctttcccacccagggatcgaaccagcatcttctgcagctcctgacttgcaggcaggttctttaccactgagctagcagggaagcccagacaacagatagtctgcatcagaaagctgcatctgagttgacacttgattccttatagttgccttaaagattactaaattgggtgacttttaaagtctagatgttaaacagaaagagataagaaagcaggactatttaaataccattctaaaatttctgtgacactgggcctaagctgcaaagtttgtaggggaattatttaataaaagtcatctgtt

SEQ ID NO: 28176 - DNA, 1199 bp, Bovine  19866881353030
  misc_feature (1)..(1): n is a, c, g, or t
ngagttcagaagagtctcagcctttaacatggtgggaaatatgaacccctgagagggcaccagtacccaggtatctcctaaacttcactttcaccacagaatccttgtttatcagacatgttctggaaccagtgcttcttagaaatacatagtgggtgagaacatggaaatggattctgttcacaaaatccagctctgcttcttacttgaaaaaggtacttagcttctctgtaccacagtctcttcatctgcaaaatagagataataaaaatactttgtgaagattaaatgaacatgtacatctaaaggatctaccggcttctctagtggattagacagtaaagaatccacctgcaatgcaggagacctgtgttcaatccctgggaagggaagatcccttggagaagggcatgacaacccactccagtattcttgcctggagaatcccatggacagaggagcctggagggctgtagtccatggggtcgcaaagagtcggacacgactgagtgactcagcacagcacagcacgttactaagtgtaaaatgtgtctgctactgttactacagctactttaactctctacttactaatgatatagaccccatacacatggaaagtttaaattccaaaagttagagaaagttccttgtgacctttctgtaataaaaggaacatctaaactacagaatgatatagtggccttgagtctgggggaaaactcaacagtttgcagtttaaatcatctgtctagttggtatggctacagtcatgatgaaaatgttttttgagtaaaggtaaaagaaaagaaaaagggaaaagtgaacaggggcaagcattatttttattcatctcatttggactaggttgaaatagaaaatgtcaagttataagtagtgtataacagcagacatctaacacttaaaatcccagcttcctggatatatgctgtggaaaaaaatgaagttggtcactcaggtctagctggggaaaaaggtgaagagaaagcctttggcagcaaattaagaggatatccattcaaacagcaaaataaatgcaattcattctctgggtgcacaagataaagttctgtttcaagtgcagaaccaggctgtgaacaaaaaaaaaccataataagctttaggacagaggtagcagcgcaggtgctgggaatctcagaaaagactccactaaaaga

SEQ ID NO: 28177 - DNA, 1355 bp, Bovine  19866881630608
  misc_feature (1)..(1): n is a, c, g, or t
ntatctatacattgaaactgtcagatacctcaccctttttgacttcagcaattactaggaaagggtctattcacagaatatgggagaacaggaagaaataaaaaattatgaaaaaaatacagagggaaatgttgtttatctctttaaggtggaaaatgtgagaccatctagatttcacaagactattctaattttaccagacctggttcttcagctgtgttgcacataataccctcttctctgatcccctcctcccctattttcaaaattatttccttcaatattttaatcatcaaattattttctttcttaaatccttatgggggtttacaattccttcttgaatcaagttaaaatcttctcattattcataatgaatattacctctcaggttccaatttcctgctagacattgatttaccctcaatagggaagtcactcaaccatcctcacatatctgtcatatctctttccctctcgggctatttaatgctgttctcattgcctggaatgacctttctcatcctctagcaactaaaatgctgttcaaggctgattatctccaaagcctttgtcggattatcccctttttttcactccatctctctacctcaatacacatggatgcattcagttatatttgtttatgcctatagtactctatcacagtattttgtgagtcaccactcatattatgtatgagaaactcagagaaatccaccaaaacagaagaggtccttgatctctaaagctcataaaaatttctgtgagaaagtcagctttcaaaatgtaccaggtgctaagagtgggtgactgtcttatacagtccctgttagtaacatctaacctatattctccacttctgcacggaatgggacaaacgcaggatgaagagaattagggagcgaggggaagggacagacctcttctgcacaaggagctcacccacagcaggatcagctggggtggggcggagtagaacatttagatttaaatcaaatttgaagttttgattattacagagattgtcactagacacaactaactaccgaatgaagattgtgtttttacctttttcttatttcctaagagtgaccaggaaaccatgaggctgctcaagtttttatgctaagtgaggggaaggcatattcccactgaaaccatttaaagatactgtgggaaacactgtgactgaactcttatgaccaaatcctcaggagtcctgattgtataacatgatgtgatttttccacttccagtaggatttatctttacagcacaggttaaagaaaagcattgacatctttccagtctcacctaccttgttcctctggaagtgattatttggaagatct

SEQ ID NO: 28178 - DNA, 2387 bp, Bovine  19866880244773
  misc_feature (1)..(1): n is a, c, g, or t
naaaatacctgattttaaaacagctttatggacatggatgtatttcccatcaattcgaaacttcagatcggcagtttctggactgtcaaattctttcttcagtgactctgcaactgttagaaagtcttcatgctctgaaggaagcaagcacattaacacaggtgctcaagctttgaaagacttcacaaagatactgactagcacgatggataattccattagatttttctcagaagagttcaccccttactcgacaaatcaactttccagtattaaaatcaatgtcatagaaattaaattaaatttcataggctaacagggagacaaaaaattccaggggccgtcgtcagcactgaatgaaggtactgcagacacaggagatagctcttgatgtccccaagatgagaaggtctcagcagctggtgatacccaaatgtcgctaagtgtatgctgctgctgctgctgctaagtcgcttcagtcgtgtccgactctgtgcgaccccatagacggcagcccaccaggctcccctgtccctgggattctccaggcaagaacactggagtgggttgccatttccttctccaatgcatgaaagtgaaaagtcaaagtgaagtcgctcagttgtatccgactctaagcgaccccatggactgtagcccaccagggtcctctgtctatgggattttccaggcaagagtactggagtggggtgccattgccttctaaagcagccttaatatgagctcaggttgcagaaaaagattttagtgaaatgaattcagattctcttctccagactaccattccacgagtctttgttttttcttttttacttttggtgtttttttcttttgctgacacggtgttttcattgcggagcacaggcttctccagttgcagcattcagccttttctctccacttgctatatgcagtcttaattgccctgtggcatatgggatcttacttccccaaccaagaatcaaactcacctcccctgcattggaagatggattcttaaccacgggaacacccaggcagcccccattccataaatctctggaaagttatggtaccatttggttccagtagtgggtctatgcattaaatgaaagtcagaatatatatatatatatatatatatatatatattccatgttattcagattgaatggaaactgtgctcttaagagtaagggcagaaaagagtcccctaaagaggtctgttctctcttgttacacctggtacatgcctgtggaaccctggtgccctctggaacaccatttgaaaagcattgttcgagaaagaggaattactgaaatttattagtaagggagtaacctagtaaaagtaatgaatgttttcttctggttctaggcaaagtgagaaatcaacacaattggattgtaataagaaaacatatttattatgcagaaatagataatttctttgttcctccaaaaaagtcctgaatctttttaactactaacagatatgtgaacaaagatgacttacaaagggtgagtttcaagtacagtctctgatatatgggtatatatgtgtataattatttgctacatatgttcaaaatatttctgtttcaaggacccaacagccataaattgaggaaatagaaacagacaagttaaacaattgttccgagctggcaccctgactcaagagaatgtagtgttcatcaatatggcagtttgggtttctttccaagttcatggcttcatattccagtcttattccatttctttttttcacattaaaattctacaacactccaagagaaccatagagaatttcaacctttcaactattagacaatggaaaaatagagggaaatgtgtgtgtgtgtgtgtgtgtgcgtgtgtgtgttgtgtgtatatatatgtatatttaacattttagatgtgtcaaacactcacacaattcatcttatgagaaattaccataaataacacatcatcattgatagcaacagtaaagggctattctagactaaacccttcagccagtatttgggtcaggaaaggttttctttttcatattcactggatgaaagaagggttttcaggaggaagccagtggttttgcagcttaaaccctatggcagttaacttcctgggatctgagaactatagaagtctctgatgacatttattataaagtactgtgtttatgcaatggagaaggcaatggcaccccactccagtactcttgcctggaacatcctatggacagagaagcttggtaggctgcagtccatgggggtcgcacagagtcagacgcaactgaagcgacttagcagcagcagtgtttatgcaagataggcaatacccttatatgaacattaacttctttgcagagagatattttt

SEQ ID NO: 28179 - DNA, 677 bp, Bovine  19866880693146
  misc_feature (1)..(1): n is a, c, g, or t
ntggacaccagaggctcgaagcccggaccagcaagaatcgaagacatccttcagtcacttctactcaaccaggtttgtctaacagaagtgggttgtgcctccttgccttaactacataggaatgggagctgacgttccatgtcttcagggggagaccctggtctcttctctgcagcaggtacccctccccccgatccccagagataggtcagctgatgctgactcacacagccctacttccctgggtttgaaagatgacactgtggacattaccttgggtgtagaagcccttctcccatggcccacacggatttgtgttccttctgacgactgcacctggcctttctcccctagggtctggcagtggcccccatggggtctgtgagttcccgaagccacagggcggaagcccaggtggtgatgatgggcctggactcggccggcaagaccacgctcctgtacaaactgaagggccaccagctggtggacaccctgcccaccgtgggtttcaacgtggagcccctcgaggcccccgggcaggcgtgcctcaccctctgggatgtcggggggcagagcccactcagggccagctggaaggactacctggagggcacggccgtcctcgtgtttgtgctggacagcacagacgagggcccgcttgcccgaggcagtggctg

SEQ ID NO: 28180 - DNA, 1352 bp, Bovine  19866881101390
  misc_feature (1)..(1): n is a, c, g, or t
ntgatatgttcagcatgaattatcattcattgtacattaataggtgaatcaatgttttgtgttttttttttggctatatggatataaaataaacatgaaagaacaaaaaagacaaatggaaacagagattattaaagagtttaaccctctcaagggcttcctctatggttcagctggtaaagaatctgccggcaatgcggaacacctgggtttgatccctgggttgggaagatcccctggagaagggaaaggctgcccactccagtgttctggcctggagaattccaaggactgtagagtccctagggtcgcaaagaatcggacacgactgagcgactttcacactctcaaaggataatatgccaacccactcagatctctgtattatctctgccactagaaaatacatcctaaaaaaacacgaatatacatcctgtgttgccacagactgactctgtatgcactaggaccacagacctgtatcacattccctgggctggcttctcctagcaactggcactgtccctcagagttggtggcatggggaagaaaaggttgtttcattgcactctctgaaagcaaattcaatcaagaggagagacacagaccttccaattatagaaacctgcattagacctggagactgaggagtatgcagccagccaatcttctgatccccctaagaaccgagtgttaagggaaggtacggggaaggcactgttttactgatctagcaaaaatatatttgaaaatgtttagagttttttttaaaaacaggaaatggaggaaaataatacaggaaaactttcatactgaaagttgctgatcaaataatggtctcaatactaaacgataccagaaatttagggtcgccttgtaagccagccctcggcgtccacaaagacctcaccccccgaactctacccagatgtatttggcacaaaagagactgatgtcacagatgggacttcacccccgcaacctgtcttctgctcacccgaaagcttgctaaggaaaagagattataacagagtgagacacccagcagaactggttagctcccagactctgactcctctggctggtgtcatcctcggggcatgaagtgagactgtatcactctttatcacggaagctgatatcctcacaggaaacaggaaggactctgagtgttggaacaatccatctaaaatgccctatgtgttcctcagcataccagccatagccaggtttagacgacatccagaaacagtcatggcaaatatgaaaaatgattttttaattgaaaaaactttagagcacttataatacaaactgaagatcccaagtaaaggtttctctattttcataaa

SEQ ID NO: 28181 - DNA, 1322 bp, Bovine  19866881425697
  misc_feature (1)..(1): n is a, c, g, or t
nggctggctataaagtttagcctggatttttgacggcacaggtggtcagcagcatagctgtcttaaaaggaaaagcctgactgtattttagggaacaatgtaaaatatatgattatttgaaagggattttttttccataggacaaaaccaaaaagtgaagttataagcaaacatttgccaaagatcacgcactaaattcttctgtttgcttattcttgtctctagatcaagcacatgtgaacttgagcatgccccttaggaccacctggggggcttgttaacacggtggctcctttttgatccagtgaaggtgctaggagtttgcatttccagcaagttccctggggcggctgctgctgcaggctgcagggggtgcctgctctgtgtgctgctccttatttggggttactctgtgaggtgtttctgtctatataaaactgaaaatgtttttctccctccagactatgaagaaatcgggacttcactttttgactgtagattgtttgaagacacacttgtaaactttcaagcaggtatgtgagttataactgagcagcagagttcataaatacttccatactgaaaataatataacactagtcaggtgatcaaagtcctattctggaagaatgttcaattcagtttcattcaattaaaaagcccattacaaacatgagccctcacccagaaggaacacacatatacacagagacacgtgcacagaagaaccgcacatgatggaaacagcaggtacccgtaagtggctggattacagtaacttcttttgtcttagtgctcactgtactttccacatttaatacagacacaaaatactttcctaatcagaaaaaaactcatttaaaaaagtagaaacaacaaaaaaaaattgaccgcagaatgaagtatttgggcaccatgtttgaacaccagcaggagtgggtgaggctgtgatatcaatcatgaggccaccgtctccctctcacttggtgtgatgtgtatacatttcaattctgccaatattaatcttcaaatctaatgggggagagggaaagttgtgatcaattctaaagttcatcatcaaaaaagaaccgccaagaaatttttgaaaaaacctgctggaaacagagacataattttcccataaaacactgagcagtggtcctttcaccactgtttcagatgcctttgaaagaggctaagtttccacactgatgggtcttgcctgacttccccaccaaggctgccacacacagctggccaggctgtgccctgcacatcccaggcaggcgcggagggcacagggttggggcagagggctcccc

SEQ ID NO: 28182 - DNA, 1893 bp, Bovine  19866880406783
  misc_feature (1)..(1): n is a, c, g, or t
natgaaagtgaaggaggagagtgaaaaagttggcttaaagcttaacattcagaaaactaagatcatggtatcttgtcccatcacttcatgggaaatagatggggaaacagtggaaaaagtggcagactttatatttttgggctccaaaatcactgaagatggtgattgaagccatgattattaaaagacgcttactccttggaaggaaagttatgaccaacctagatagcatattaaaaaacagagatattactttaccaacaaaggtccatctagtcaaggctatggtttttccagtggtcatgtatggatgtgagagttggactatgaagaaaggtgagcgccgaagaattgatgcttttgaactgtggtgttggagaagactcttgagagtcccttggactgcaagaagatccaaccaatccatcctaaaggagaccagtcctgggtgttcactggaaggactgatgctgaggctgaaactccaatactttggccacctcatgcgaagagttgactcactggaaaagaccctgatcctgagagggattggggacaggaggagaaggagacgacagaggatgagatggctagatggcatcactgactcgatggatgtgagtttgagtgaactccgggagttggttgtggacagggaggcctggcgtgctgcgattcatggggtcacaaagagtcggacacgactgagcgactgaactgaactgaactgaaagctctgtgattgacaggcaagtcaagatctccattcccgcctttcaaaaggtgcaggcaatcaactccacaatctactaaaacatgcaagggaccctagggggctgaaaactcttcaaaccgaaaatcatcaaaacaggttttattttatcatctctaacaacagtccagctgtaatgtcaactgtgcttgttcatttgttcttagaacaaatgaaacttgaatcaagttttggcaagtcttcagagactatctgtacagatagataggtagatagataatatgacaccgtaatatgacacattcccttcacatagaactttctgcagcaggagcataaagaagataatttttcagaaatactggagggctccatcaattttccaaagactctcttaatcctttgattcacaaatcactctcttttgaagcacctgtcgtgtcaactggcctgatgctactacatgctcatccctcaaatgctttgcttgtaattagagccactgtccagcaaaattttcatccattttatgaaaccctgcatcttttgcaagacttgcaattccactttgcaagcatttgcatcatatttgcatcatactgttggatatctctagcatctggcaacctcccccataaagatgttggtgccctggttgacaattaggcttgtgtgacgtggaagggggaatatgtgcataagtgatgagcttatgggcttcccaggtggtagctaatggtaaagaacccacccgccaatgcacaagacataaaagtcacagatttgatccctgggttaggaagattctctggaggagggcatggctacccactccattatttttgcctggagaatccccatggacagaggagcctggcgggccatagtccatagggtcacaaagagtcagacatgactgaagtaacttagcatgcatgatgagcttattggtcatttaccatatcatgacaatatttgattctctgcatgactctgtacaacatgagctcagacaatgaattcccagttaatgagatctcctaaactttatttctaacccttgagtacacaggatatcatctggtatatgctacacttaatcctcttggcgtgagctagactaagtttctgtccacaaaaacaaatattcttaactaaat

SEQ ID NO: 28183 - DNA, 1505 bp, Bovine  19866880427300
  misc_feature (1)..(1): n is a, c, g, or t
naattcatctaaacatgttacacttaagttttctcatctataatatgatctataatttaacacatatgggatcttaactccccagttatagatgagtacctacttctcacaggggcgtgagaagcattgaatgagttaaaggtgggaagctcttagaagaacatctggcccttggtcaatcctcagtaaatgctggctcttgtgatatttccagatgcttactttcaagaagggctgtcagacaaatcagtgaagagcagagtgatgagtgttctcagtctaagaagtaggtattgattggggagcagagacaggaagcctgtttcaatcaagtgggtcaaggaaggcctctctgaggaggtgacatctgagctgagacctggaggaggagtgagaagcctccaggactgaagaagaggggtccaggcagcaaggagagcaggttcaaagaccctgaggcaaaaccaacttgggatgttcaaggaacaccaagaagaccgttgaaccaggtggtgagactcgaggtcaaggtcagagaggtgtcagggaccatggaggccagagtaagaaatttggattttgttccagtgacaccagaagctcctggaagcgtgttatgcgaagaagggatgtgattctatgtatttgtctgggccttttcaagaacaaaataccaagatgggattaaatgtgcaggaatttatttaggggaagtgcctgtttgagagcaagtagagaggcagagagccagaacaggcagggagagctgttgaacttcaatgcaggtgtgatcctgagtgagggaggagacagggagagaaggccggatggcaggatgcctgggtgccatgcagactaaggaagacccaggaaagccatggggaggcctggagctgtcagaggaactccgtgtctccctgaacagacctgcctcagtgtccttgtcagtttcagaggctggctgaaatgaggtccccaggaaccacggcccatggaagatgtggtcgcccaggaaatacagggctgcttcagagtccagcagctggggcccccggttcactgtgttccttgcagttgttggtctagagatatatcctcatcttacctttccaaattacattttattttttaaaagtcttttttgaatttgttacaatattgctttggttttaccttttggctttttgaccatgaggcctgggggatcttaactccccaaccagggattgaacctgcaccccctgcactggaaggtgaagtcttagccactgggccaccagagaagtcgtcaacttgcattctagacttgcacagggcctatgctaaggagcccagctgggaaggtggacgagaggcatgctgatgaccactgaaaattctggccctgaaggcccaggcaggaggggctgagtgggcgacccagatggaacttggtgggaggccagacagaggtgtgtgcctcccagtgagtcaggccccacctggctccttccctgcccgcccag

SEQ ID NO: 28184 - DNA, 1460 bp, Bovine  19866880446442
  misc_feature (1)..(1): n is a, c, g, or t
nctccaggaagaaccactaggctaaagagagatgcaaagaaaatgtggaaggcagagttgtggaaggctctagaccactgtcccctgcggccttgtgctgtgtgagccagagtacgaatgtgaatgttattccaggatccgctgaagctgctggtaagcgcctggtgtggtcttggctttcacaggctccctcagtgaccggatgggagatgggagcgggggcgaaggtggcacagggtgaccagaaggaaggtcttccccagtgaaccagtctggggcctgcagtgaccccagtggccctcgcttggcgccaaggctggagcgaggagcccctcccgggccaggcttggccccggggcaggacacatcctcccgggcagcggtccagacgctgagccggggaggagttcctcttccaggtccgctggctccaggagacaataccgacatcccgaccaccccgtgactcagagcaaagggcctttccctttctggaaagattgctcagttttcaacaaggattaggtgtcaacgggagaacgctgagcctttacatcggagccaaggcaccgtgggagttctcctggctgaatccacagtgtcaaagggaaggaagggaccacaggtctgaaatctactatgtgcctggtggggctcaggcccgacactctgcctataggactgtgtgttaaaaggcacagcacactctcttgtcatctcatctcttatacataaatgaccatttttcaaggaattagaataaaatgcactcagcactaaaaaaaactgcttaaacttaatttcagttaagttccttattaatatcaatgattactattctgaagggaggattgccatcttacatcagaggaaacagccccaggggaaggcaattaatcctcaagtcacacagctaatgaagctggggatgtgctaaatcgctaattcagtcaactgtaccctaccaggctcctctgtccatgggattttccaggcaatagtactggagtgagttgccatttccttctccaggggatcctcccaacccagggctcgaacccaggtctcccgcattgtagacagacactttaccgtctgagccaccagggaagtaagaaggataagatggctgggtggcatcactgacttgatggacatgagtctgagtgaactccgggagttggtgatggacagggaggcctggcgtgctgtgattcatgaggtcgcaaagagttggacacgactgagcgactgatctgatcttctgtcactccccacccttcaagactcagagacttcacacacaaatattaaagtctctagacatgaacattgctgcaaatcacaggtgttaggattattaggaactgtaattctctttccacttgatttttcaaatttctcaagattaaaaaaaaaaagtcagcctgcaatcttgcagctaagggcttccccagggc

SEQ ID NO: 28185 - DNA, 2030 bp, Bovine  19866880468243
  misc_feature (1)..(1): n is a, c, g, or t
nacatgagtttgagcaagctctgggagttggtgatggacaaggaagcctggcgtgctacagtccatggggttgcaaagagtcagacatgactgagtgaatgaactgaactgaactgaagatgctacaatgtgggtgcatttttgtgagcatgaagaatgttaaggtttccagtcaccaaaggttgggggtatagtaagagatggcacacattttttagattcacgggcactattttggaatcataaaatgtttacctcatctatttactcatgtatgcatggaagaactaatgtttactgagcgcctactgtgtgtcaagccttgtgctaagcactggtgaagatcttatagagtttacagtctgtgatggaatctgtattttattttgaccatttcacatggcttgcaggatctcagttcccccatcagggattgaaccttggccatggcagtgaaagcattgaatcctaatcattggaccactggagagcttcctgaagtctaaattttaaaacaaaacaaataaacagccattggaaaatggcatgcaagcttcaaaggaagaaaccagaatccagtgatggggactagcagggtgaggaggaaggcaacctactggagaagggtgatcagggtcagatacttcaaagaagtggcatttaaggcctgaattatgcaaaggggactgacacagaaaaatctgccggaagaccatccctaaaggatgtgcaaacatcccaagaggaatagcttatgcaagaacactggtgcaggaaaagcttgctcaagcagctgaccaaagatcagcgaggtcggaatcaagaaaaaggaatggcaaagaggtagtaaagagctagtttttacaccggacaaaatagttgatgccaattgcaatggggagccgtttgaagggtttcgagaatgagagtagtgttatcggatttaggtttttagaatagacctgtggatgctgaatggagaatggattattagaaggaggcaagaggatcaggaaggaagatgtagctgtcacccaaatgggacatagagcaaagaaagataaagatgtggaattaagtgacatatatgtttattatatactggatgtagatccaagaggacttggtgatggactgggggaatctggaatagattgctggggaggaaaaaagcaagagatagagggtaacttccaggcttctggctggatgagggtattgctcagtagggtataagaaacctctctggggtctatagtggtctgtaacggccagtccttttgactcgattgccaaattgttggcccagagatcgttgagaggagcaacatttatatatttgtaatagctgaatctttaagaacacaagccaataatggtacaccgagctcttgggaacagcaagaaggctgacaaccatcagggtccacagtcgtccccatagacaaagcaacttaacacacacacatatgcctaaaacagcagggctttgtcaattactgatggtaaaccacacgctggatcttgaccaatcccaggctcccacaaaagccaacaattaaaaggtgtatcctcagcggatgaccagccactccagagacccctgtctccctgggggttgtctaacagctttcaaaagtacgccccagctctaagctcccgaaaacctggcccaggctctaggaagtgcttcaataatggatgatcgccaatgaacagccagtgatttgctggaaattatgagcgatgaataattgagagggagggagtctgaccaatggtacccttgcctcttgctgattctccttaatgcatttccttgaggcaactccctgcagtatagggtgcagacagcaacatgcccttccgaagatgctgacccatagctcggcgagttataaatatatgggcctctccacttttacaacggagtaacaacaggcagcagttcagcacagatgtgggggctgtccctgttcaacccacatggaccccacttgctgtggggtgatgcacagtcatccccaaaa

SEQ ID NO: 28186 - DNA, 4048 bp, Bovine  19866880493348
  misc_feature (1)..(1): n is a, c, g, or t
ntgacactgattcaacttctgagaagagaggatgagacagataggggaaagaagagagacaagacacagagacatagagggataaagtaaataatattaactgaactctacacacccattttactcagtgaacatcttacgacccaggaaggcttcaggtgtaaaatgagcttctgttgttccccaaactggtctagttccccatgtgtctttcaaaatgtggtaatttaatcgattcgtcaaagataattttagataagagtttgggattaacatatacatgctactatatgtaaaatagataagcacagggaaccgcactcaatatcttgtgataacctataagggaaaagaatctgaaaaagaatatatatacatatttacatacgtatatgtataactatatatatgtataactgaatcactttgtgatacacctaaaactaatacaacattgtaaataaactatattcttatttttatacaaaaataatttcatctttaagagatatttctcactgacttcagactaaccccaccatctgtatgtttgttgggggcatgtaactgtattgtgtttatgtgggcatatgtgcaggcatgctcagtcacttcagtcgtgtccggctctttgcaaccttatggacagtagccctccaggctcctctgtccacaggattctccaggcaagaatactggagtgggttgccatgccctcctccagggcatcttcctgacccaaggactgaacccatatctcccgcatctcctccattgcaggcggattctttacccactgagccacctgggaagccctgaatgggcatatacatgctatgaatatctacaaacacatgtgtggatattgtaggtacttgttagtgtagtgtgtgaataaatcatgtctgtaagtaggtgtgtgttccatatatgttgctgcattttgtaccatgtatacagatattctttttttttaactttgtattttgtattgaggtttagccaattaaaaatgttgtgatagtttcaggtgaacagtaaagagactcagtcatacatatacatgtatccattctcccctaaactcccctcccatccaggctgccacataacattgagcagagttccctgtgctattcagtaggaccttatgggttatccatgttaaacacagcagtgttgtatacagatattttgtttggtgactgggtatatctacgctgagggcagaagtggatggatttaacacggatagtgggacactgcaaaggacagaacttcctgtgaagctctcaaatgtatgttgtcccttcttctgaacactcaagtgggttcttatagctgaatttattctttactgctgcctagaactgcccattgcgagtgcaggtgtgcatatgtatgtgcatctgtggatccgggtccataaacttggacttccttagttgtattagaagctgacaccacacgccgtgacatacgccctagatccccctcataaaggaaggattctactgtcactgttgcttgagagtgacgctggaagacggtcctctggactcagccctctttggatatttccaagatggaagaggggctagagcccacactaggtaactaacatcagggtgtaagagaccagactcctcaccccaacctgggacatctgtgaaggacccatctgagcgccagatgccccacgggctggctgaggcccatcctgggctcatgtcaaagctcagtttcttcctccacctaatcttggtttcccaccctccctttacagttattggccccaagtcatctccttaataaacttcctgcatgctaaatctccatctcggagtcagctcatctggagaagctcatccgccatggcacagcagaaaccaaagtctggaatcacggagtcatagtatggaatggatgtgaagggtcatccaattgagcctccctccccttcatttcaaatggttcattatcatggttctgagctcagactccaaagtcacgcacgggcgttcaaatcctaccactcaaaacagccatgtgacaatggacaagtccaactcttctgaatctcattttctataaactaagataatagtagtgccgacagtccagggttatgatgagaattaaatgagataaggcaggcaaagccttcagtcaagggtccagcacacagttaacacccaataaatattagcatctttcactaccttgttctgtgcttgctggtgggaaaatgtgtaggctagagtttcttgggaggcttaactatatttgataaattaatcacacaataaatgccataccaatgttccactttgtcagatttgaaattctcttaaaacaggatttgggcaccaaaatcctggcagctgaacaggaaaggatgtctgtgcttgccggccctgtctattcctgctacttctccagctacaagttttaaaagctcttgggtaacccagactcccatttagcatagtggaggcaggaagagagctgacagagagattaagccttcaaataacatgaagatgcatcagaaagtagggagaggaagtgaccagggagcagtaaatcattacattgcagaggaagggaggaaacaaggtccctcagtggtagccaacctccaagatgggcccccaagactcggccttcgccattcacatacttgtatgctccccttctctgttgaatagggctggctttcgtaaccaataggatattgtggaagcatcagagggtgacttccaaggctagacaaggcaacactgcttcctcatcacaccctctctcggatcattcatttggaaggaagccagctgccatgttatgaagacagtcaagcagccccatgaggggtccacctgtggcaagaaaactcctgccaacagccatgtgaatgaaccatctgggaagtggctcctctgaccaccatcaagccttcacatgaaactgcagccccagctgacatcttgacaacacccccaagagacaccttgacccagactcacccagctaagcagcccaaagtcctgacagaagctctcagatgataaatgtttgcctctaatttgggggtaataggtaactgctatatcatcacttctttttttagggaatatccattttatccaatttcactcattagcttgaaagtgaaaatccctcagttgtgtctgactctttgtgatcccatggaagtccacggaattctccaggccagaatactggagtgggtagcctttcccttctccaggggatcttcccaacccaggaatcgaacccaggtctcctgcattgcaggtggattctttaccagctgggccacaagagaagcccaagaatactggagtgggtcacctttcccttctccaggagatcttcctgacccaggaatcgaaccagtgtctccttcattgcaggtgaattctttaccaattgagctatcaaggaagccccctcattagcttaaatgctatgaaattgccaatgtttgaccatcttaaccacaaacaaaatggcagttccatgtggtacaatctctacaatgaccaagggaagggctcaagggtctggataaacaccagcctgtttatggcgtgatgcacactgttccgataaagaccgcagagtggctgtgtttctggaagccagtgccctgcgagaggaacatccttccagatcacctgcctgcacccatcccctcttcccacccggacccttgggcaagcaggaggacttcagaggtcctcccaacaactctgtctctttctcggtctcacggtgctgttctttacaagcccccaagttcagcaaagctccaagcccttaaaaagaagtagaaaggcatcttgcaacacaattagagagattggttcaggggcctcgcacacagcactccatccggcaaagcctcaaagggtcccgggtggaccatttgctggctttcatttctcaagggctgcttcagcaggtggccactagcaggtagtcaatagggaccttctggctgaggaccgggggctctttggaa

SEQ ID NO: 28187 - DNA, 765 bp, Bovine  19866880495178
  misc_feature (1)..(1): n is a, c, g, or t
nttttaattaaaaaaaaaaaaaaaaaatgaaaaactaagcccttagcaagatctaaataaagatgaaatctgccaactccccacgatgtacatggaggtggctctaagggggtgtagatgcagggggacccctaacctggaccccagtgttctctccccaaaggagactcctctgcggctccccttgccctggattttaaggtgggaggagggtgtgcagtaaaaagcaattttgttttatgaaaagtggtttccttttattacctgtgatagtcgaatggggggtgaccttagcaacaggaaattaacacagaattcattgggagtgataatgactgttcataatcattgggttgataagttaatatcattaattagtcagctaattagacgctgcctgaagccttccgggtctggaggctcagcttcaaaataagccaggatacagtgtccttgccgaaggggagcaagatgaatacacagagagatggagctggtccccaaagctacattccacatgaccaaaaccaaactctccgaacaaaaccagagtctctaaactctggaggttttcctccccaaacccaccccctatttctttttgtccctcaagcaccgagtgcaccttaatttgcttgggttcatatacctctgagaagctgaggaaactgtagggtttcctcccttaaatctgtatatatatatacaaagtacgaaatttttgtatatgatttctgggggatctgctgaagtcaggagtccagg

SEQ ID NO: 28188 - DNA, 1340 bp, Bovine  19866880526544
  misc_feature (1)..(1): n is a, c, g, or t
ntcaagtatcatatctgcctactcattacctctctgtatattccgtctttttccttgtagggctgtgtcttcgggtttctgtttctctttgcaggtacaaccgggtatttctgaccctctcctggctcctttcccctgtattatctgtgtgggggtaattctctctgtctctctctcctttttttccctctcctttcctctctgtccttctttctcctgtgtttctttctctctgtgtctgggtgtgtctctctcatctccttctgtctttgcactctttccacctctgcctctccttctccccctgtgatctatctgcccccttcgatgtctcccaggaaagcccagttactccacaaaaccatttagcagaggaaacagcagcagtcaaggaaacaaggctcaggcagggaagattcaccctaactcagagccacagtggatgggtgaacctgtccaaagcctcagtccccttctgtccatcactaaggacgagactggcatcacagaggacccaggtcacttcaagtatctgaacgtggtattaggagagaaaaatactgctgatggggagattcccgggaggtttgctatgtggggggtgaagagcctccactctccctgagaaccttccagacacgctaatcaatttccagttcactcttccaacattactgggggctgccaagcccacactcacagattgatctccattgccaggtttcccaccagttatcacagccaaaactgtccccttggtgaaatcttggagcgtgtctacattttgaaactctgtgaaccaaacgaatgcacacacacgatgcaccagggtcttccggccacagccccgtccctgccttcaacacacaccatttaacctatcaagcctctgcatttattgagctatttcattaaccttctttcatctaaacttctcaacagatcagtgactaggattcatcctctttctataaactgagatgtcagaaaactgggattcggacaaacacagtgatttgtccaaggtgacacagccttgtgtcaccaaggtaggcatctcttttcacatgtaggaaagacaactggaaattcacctgagctttgtttttgcttttttttttcccctgacccctccactcacggaccaatcacctcagagctggattttgcttccaggccaagcatactgggttatttagctttcagaacctataccagtgcaaaaacataatttctcttctctagaaaactacttctcttttattttggcttgggaaatgctgttttctccttcatttaggggcaggagacattccggatatttaactttggaaggcaaa

SEQ ID NO: 28189 - DNA, 1687 bp, Bovine  19866880548068
  misc_feature (1)..(1): n is a, c, g, or t
nccgagctcccctgtactgcagcaagttcctgctagctgtcaattttacacatggtagtgtgtgtatatatgccaatcctgtcctcccggttcaccccccgctccctgcccctcccgatgtccacacttcagttctctatgtctgcatctctatttctgccctacaaataggttcatctgcaccatttttctagattctctacatataggaagagaatatagttaatataggaaccacacaattcaggtgccacaatctacctccaagaattccctatgcatttttatcgtatctcagggacattgccacctccctccgcactgaggttctagagctcttgaaatgccatttttaagggaaggactaaagacaaagaaaaaggaaacattctttgggctcctttcttttaatgttccatcaacgaactatgcctttggtctaggctggttgacttacggacggcatgggatgctaagacagccagaagagaaggtgtgctgttgcattagcacttcccaactagtaaggcacctacgacagaacaaacaacaggtagtgaatggagttgtccttgtggaaatctttagggatattcatcacaaatggtaactatcacagccaaagttgggagggaaagagactttgatcacacttaaaaaaatatatatttattttatttatttcttttatttggggtggcattgggtcttagttgtggcatgtgggcttagttgctccatggtatgtgggctcttaggtccctgaccagggatggaaccctcatcctctgcattggaagatggattcttaactcctggaccaccaaggaagtcccgatcacactttctgtttctatcccttcttcctatttttttccttaccccttccttgatcagtgatacaagaagacagcttctttggtctttttgtccatggctgtttataagtatggttaagtggttactaatggaaccaccaggtatctccatggggctgagggagtcttgaaagaaggtagatgagttggcctgagagttatgggctgtaggaatgcagaagggggatgtatatctgagaggtacattgctaacaaaaacggactgggctatacatacaggtcgggcagaggatggagaggaaatcttggaactttccagactgacaataccctctaactggactcaaacatccagtcacctccccccattccagacccccagagcttattttatcatttgctaaatgtacagaatcgccactcaatattcaaggacaaaggtctttctgggctttcctccctcctcatctctcactcaaggaattttgcagataaatcagcacgttaatcccctggtctgagagttatgggctgtgggaatgcagaagggggatgctgaaatgggacttgggaacagaaggaaactttggatgagaaatgaagggtgaactcacagatggggagcccaccatcaggagaagagagaagtgggttgatttcggacaggtggcaataggaatggtcatttcaaaacaatgtaaggtgaacaggcagagagagagagagggttcaaggcagtgggaaagggaaagagggagttgattgcttaaggagaagaacagaaaaagaaagctctgttcccactgtgggtgatggtgagaggtaaccttacaagatctgatggggcc

SEQ ID NO: 28190 - DNA, 705 bp, Bovine  19866880568355
  misc_feature (1)..(1): n is a, c, g, or t
nacacacacacaaacagtgtgtgctggtataaattagacattcaaaatcatcaagaatcttgtgacacatatcaataattcctatttataattttataaatgtctcaacagagacatacagaaacaattttgattacatgacataattataaatgcagattttggaaggctgaaattgatcaacattatctggattgacaataagcccataatgtagcataatggatttttaaaatgcggcataaatctgcttaaaaaaactagctaggcagcccaacatcaagacacattaaaaagtgccaccagttcctcctgggctgtgactttcatgccagcagcttgcagactcagcaatgcaggaaattacacagtgcgtgccttgctgtggtacagaaggtgggttcatgggatcttgctaaagtacatctctattcaagttgtctgagtgagatgattttctattctttaaacaagaatgaaggtggaaatattcaaccagaatttatctcccaataggttgaaccatttcatggaaaaggtacaaaaagcctgagttgaaggaagcacttttttaagcaaaggcagacagatggagctgctgatggacagacagaccttggttacatcaattagtcagagctattcattcttgtgattctaaagcttcgtccctaggaaagtgggctgcttttgaggctaaagcaa

SEQ ID NO: 28191 - DNA, 1708 bp, Bovine  19866880586254
  misc_feature (1)..(1): n is a, c, g, or t
nagggcaagaaagtacccaaaatgggaaggtgcacctcttctcacatcctttatgagtcctgaaatgaaggctcagagaagtcaatcatctgccttatgtcccacagcaagtgactctcaaatcaagttttattattactattatttattttttgtttcattttgcttttctttgctgcactttacttggtttgatttaactatattttagctccaaagtgtagctccaaagaacaaaaaaaggctgttggagatctcctggcccatccccatcactcacatgtggagggggggccacccagagaaggtgagcccttaaagaaatccagagagattgtccagattcagctgagcatcctttctgctacaccgtgatagattcacaaaaaggattacccgtcacagatgctggtctgtctagagcagctccatcagcaacaggccacccaaagagcggggggccccattacggcccctgctttccaatttggtcatctcacccccactagccatcatggccacacaggggttcttgcaggggtggtgaagacatcccccccaaaggcagaggctcctgaaagggagtcacctctcttctcccctcttccaaggtttggctgtgtttactctgttcacaaagtggcttcctgtttcgaagaggaatgagctttttaaagggttataaatgtgactcaaaaggctttttggacatcaaatggctcataaaaaaagggaactttgagacaatttcagcataaatgaatgaaaaacatacggtgtgtgtctctaacccttctgttgcaccagagtgtcctggcaagagaggaaagtagaagtggccagtggtttgggtttcactgtatctggaacttgagtttctgaagtccaaaaatgtactttgtaatcccagaccagaacatatttgaggagagagttcacctcgtattaaactcgttaaaaataaaattgaaatgagggaaagtatttccacagacatttttaaaagtctgttctaactgtctcagtgatttaatttctatcataggtttccttttctttttttttttttttttctggtgtttggccatgcctgtgggcttatggatctttagttccccaaccagggatagaacccatgccccctgcagtgaaagtgtggagtcttaaccactggactgctttggaattccctatcatacatttcaactcattctcctaaacctggttgctcagtgtcagcatcattgacatttaggcagatgattcttggcagtagaggccaaggcatcgtagcatcctgagcagcaactctggtctccactcattagaggcccggagtgccctcccccaagctgtgatgatcaaaaatgccaaatgtcccctggcaggcaacttgttccccgttcattgaaaagccattgtctaaagacataattcacttatctagtgtgttccagaggcaataatgtcgaagggtggaaatcagtgactagatgaccttcagggaaagaaaacaaaattaaattataatgggacaagtaaaataaaatcgtttggtttctgtatttccacgaaaggcatgtgcaaattatcattggccatataatatcttttgcagtagggttaatcctgaagggccacttagccaagccgcacaaatgtcttccctccttccctcccttcctcctttctttctctttcttttctt

SEQ ID NO: 28192 - DNA, 1111 bp, Bovine  19866880599121
  misc_feature (1)..(1): n is a, c, g, or t
ncagaccaaaaaatgaaggcaaagtgatggagtcctgtaggtgagctccttgccttccatcagactctcaaaggaatatgggccccccccccgccaagtttttgagaaactgttacatcttcgaagttggatgagaacagatattaaaagtgatgagtcataagacaaaccaaggaaatatgcacttccccttgctggtctagctcaccaatgtgcctgtcattgaatgaattaatgaattgaataaatgaactgctgccatagaggaaacatggcacaatgattacccacaagaatggggacatgccaggaactgagagtccatgttaaatctcaattacacataaaaccaccttcactgaacacccagtttcccgaacataccacgtaatattgtaatgcctgacattttctgcagagacagaagttccaaggaggaacaacccatcccacgccagaagcaaggaaggatcaacaggttggaattgtagagtcaatatttaaacatgggaagttcaatagctgttaagtaggttctgtaacaggctcatttttaaaaatcaatactcttactaatagcaagatgctagccttcagtggaggggaggcaactcagttgaaatcattttttgaatcagaagtcaataggagccagtgtctcagacaagtctcaattggtcaaagaaaaacacggtcatgcagctgtctcctaggtatttccatgaagctgggtctgggctgctgaagctgatggggaccacagatgtgacttgagcaaggtggagggtagaagctggataggagcaacaggtaagacaaggagagagggaatccatcacttttctctgggattatttcagccatcaagcacttggatttttaacctggttgaggataatagctgcaggaccttgaggaagaaaggtaactaccttaactgtgacagaagcctgagcgcgttccctacctctccttggtctgaaccatttcaatgcagtcaggcttccagctgccagcacctggtctcagcctgagggctctgcctggactcagacactgaatgaaggcccccacaaagtggccggcaaccactgacggatgggagctggct

SEQ ID NO: 28193 - DNA, 890 bp, Bovine  19866880616030
  misc_feature (1)..(1): n is a, c, g, or t
ntgcccaggttcagagcacttccagccgcctgaaatgtctccccacagctgcccggagtccctacacagctgtctcagccttacacaggctgctaggcctgccatagccccagtctgtcctctgacatttcccacgtgtgcacaaactattaaccctttgggaagcagcttggcctgcttgcagtgagggatgggagggggcagggaagtagcttcatattggagggtacagactcaactcatctgcagggagtcagttcccatccccaagccatgatctctccctagtcttgggggagggctggctgtaaaacatttaagagacatttcaactctgaagctaaaatcacagcccctggaaaaggcccccagagtctgaatgcctagggctagagactcatgtctaccacctacctaccagctgtgtgatcttggttaagttactcaacatttctgagctctgctctttcatttagaaggtggaggtgatcataggatcaccgaaaaacagaatagatcaagcactgagaagagcgtgcctggcacaaaggaaatgctgtggagagttattatctattataccacctagttactctgctagacacagcccttaacttagggggaaaattgttttcttaagttttgagggggtgggtgtgaggttatgatgaatcagtgaaataagccttgcccctagtaataataataagttattattaggcagggagacttggtgagggtctggttctaaaaggcaggcaaaggagagtgcatggaaggaggggctacagaggcagctgataaatacctgagaggccagaacgtgctgctgaacatggaagggcagggggccgacgcccccgacagtccctgcgccgcggcagccgagg

SEQ ID NO: 28194 - DNA, 422 bp, Bovine  19866880626840
  misc_feature (1)..(1): n is a, c, g, or t
nagcggtgcagctgtgctggggattaaatgaggaggacagatctgtcttcgaaagaagggagaatttcctgtgctggtctgttgagatacttgctttcccaccatttgtctgggtcagatcccacacgccccctcaccctggcctcctccttctcaatagccagagatcgaattaagcatccacacacggaactgagaagagatacggacacacattaatgtcaagatctccagggtgcgttgaagataaatactgttcctctcttcccattcctcacaatgtactccggggatgccccgtgtttgtttctcagctgtgccagcaggtctgggagagggtaccccgggagagaatggatcagggtcatgtaacatatcgctgggcggggggaggggggagggtaatggcccatcactcagca

SEQ ID NO: 28195 - DNA, 2739 bp, Bovine  19866880642784
  misc_feature (1)..(1): n is a, c, g, or t
naaaatttattgaaatttcatgagatttttaaaggggtggggggagatacagaaaaccaaagaactcatcaacaattataacacaaaatataccttcatgaatttttgtctttaaaccatctctcagcacctgactttttaactgtgaatatatgtctctagaggcaccaattcaaaacatcaacactgaggacagtaagtagtcaattccactttgttttgaagaaatcagagactagcaaatacaaataggaaagaaaaattagaaagtcaaaccacagcctctgcactctccatccccccacccgccccaagcaatctcaaaaacactcttaggaatttcaggtggggctaggaagtggcaccacctccccagttttcggtaaaatggcaaatagcactttcccccagttttggacattagaaaagaaattttctttgcagatgactcttttgaaaactatgttggtgtcggtgcagaaagtgtgttttctacttttaaaagcgatcctgtgaccttgaaataaaactgactataggaaaacaaaaccacaaaacctgacagctgcaatcctatttacatagagctatatacaatgtcaataaattaaagtttaattttctgagcattcatattccacctatttacaagagttatcaaataattacataaatactttgtctaatagtctcgcttcttctttatttttttttttaaaaaccttgttattgcatatacaggaaacagaaaagaactgccagagggacaacatgaatcctgctacagaacttagataaaataaattcatttttggtatcttccccatcgcttccttttaagccatcccccttaaggttgtcaatgttctaggaaaagataaggggtcatattttctctctaaaagcaagcattcaaaaataaaacccacaaatacattactgtggaacatgcaagagacctagagctcttaaaacatcacaagaattattaaaaagacacagatttccttaatagagactaaacaagaatggcagagacttccctccccaaacaatgctgcccagtaatttatttagaactgatatgcacgtcactagaaagtttttaatcttcacgaacagaatcatgttaatgtatccatttgtccccagtatttttttttttttcaattttgtgtttccacttgggacggtgaaggaaaaaaaaaaaaaaatatatatatatatatatatatcttcactgggggagaaacttttcaacacctcccctcctggggcctggctacctcagatcttcccacagcttccagaacagcccccaaggagttgctctggccgccaaggctttaactcctacccccaacagctcaatgcaactgggacgtttctgagccagatcccggatgtataaaccacagccaagaagacagggcctgtttctagcacattctctccagggagtccagcacccctttcccagacaaggctgcacaaaaaagggctgacctcactgcacgcccggggtttatgtgacatcccacaaagtgcactgcagactggattggactggaatgaagagacttttctggggaggggtttacggggaggcgctgcgggacctgtcgggcttggcttccaggccgctgaccaaccgctggatgttctgcagttcgctggtggccgcctccttctccgggcagagtttgggcgacaaggacacggagctggaggagagcgtggaggagcggctgttgagttccgagcccgagtccacggccaccgaggccgggcttggcggccagggcggcggccttgccgtcgagggggcccgctgcggcggcggcggcggccatggacggcagggcggtggtgagcaggccgctgctgtccggcaccggcagggggatggagtacgggctgtagcgcagccgcgggcgcatggtgttcaggttcaggaaagggtggcggtgcacggagctggaggctgccgccgaggaggcggccgccgctgcggccatgtacgtgtagggataaggaaacaggcttccgaaaggcgacatggccaggccctgggcaaggaggagaacaacaggacagagtgagcaagcggggcctgcgcggtggggaggagccgacctcatccaccacccctcctccaccccctaccatcccctcggatgagtccttaacctcactccctgggatggggcggggtgggatggggagcaggacgctccaacttctgcgtctagacccaaatctgagctgtgttactctaagccaaagtactccctaggcctcagctttcttgtatggcaaaaacggaaaagttcaacaactcgtattctttcgggggactctgtgggtatgaaatgaactgctgccgcctgcaatatgcttcacataaggtgcttggccatcaagactgctggaaattctcccatcagtcagttgttccacctgttaaatggggctacagtctaccccacaaaagtagctggctgaaaaccagagggcataaactattggacatatatttccaccccccccccaccccgccaattcttgttgccccacctcacagcccttccactccattctagaagtttctaaaaaaataaataaatctggggaagatccttaagcaaaaggcaaaggggtgagggcaagttggaaggggagagagtaaagggtatttgctatgaacagagatggagaaatcatctagccccagatatg

SEQ ID NO: 28196 - DNA, 1416 bp, Bovine  19866880681131
  misc_feature (1)..(1): n is a, c, g, or t
nccccacctggctccttccctgcccgcccagcctacgacaccccctaggtcccctgtctccccggaggaagttaggcctgtagcccggcttcctgctattatgccatttttacagcctggacttgatttatgtgttacccttatggctaagaatatgccctgacacttgaaaggaacttttattattgtcctaatttgtgaagaattagttgttgctttttttttttctctttcccttctccccttttttctctgcagggtcaggctggagccctgttattgttgttaaatttagatctggaactatattgggtccggcctggtgtctctgtgctttcacttcttaaaacaggaaggaaggccccagctgggggctttcggagcgccaaggagctgttctgaaggccttgggggaaatgtgtgtcagtggaaatcactagaaatgcgtaggagggaccggattcagagagtgtctttgcgtggttgagttgaaaaaaaatttcccctggaccttgtgaatatcccagtgagccagaccgcctgttttggtgggtgggagccttactgagggggttcacaaaatcccagctctgccactttctagctgtataatttgggaccgataacatctgctcagcttccgccttgcctcagtttcctcatctgtaaaacgggtatagtgatgttaccaactggttggcttgaacagcagaaatgtattctctcatagttctggggactacaagctgaagattagggcatcttcagggctttgctccctctgaaagcaccaaagaagggcatgtttcaggcctctctcttagcatttagtagtttcttagcttgtggcagcatgacttccatcttcacgtcgtattgtccctgtgcgcatgccccgtgtccaaatttccccttttgataaggacaccagtcatactagattagaggcccagctactgcagcatgatttcatcttaacttatgatatcaacagcacccctatttccaaataggctcacagtctgaggttctgtggactcagaggttctgaggacttcagctatgaaatttggggtcagggtcattattcaacccataacgagaggcaccttgtcataaggtgttttgtccaacaagctgaacacagctagtaagtggtagggccaggatttgagccctggaccgtcagatgccatagctcatagccacaaccatgacactgaaggcagcagtggacgtgggcactcagagctgggtcccagtgctgtgtgcttggtttcgagttggcctagaaggagaggatggttaaagatattgaaagaggagattagaggcaggtgatgaacatcagaagggctggctcttccttaacacacaaatgaaaggagaaagtgcatcccctgagaagacagcaag

SEQ ID NO: 28197 - DNA, 1387 bp, Bovine  19866880705734
  misc_feature (1)..(1): n is a, c, g, or t
naactgggctgcaggcgaggctgccccatgcttcgaagctgttcgacttaatacacccctggagtgggttcaagctctcttcctgcttccttcccttaaaagaagaagaagaagaaaaaaatgccgttttgaattcctcatctttggagagagatgggagcacacagttgtgcatagaaaccctctccctgcacacacatctgttatacacattgccacggtgtactctgcttgttcaacaatgaacaaaatgatttcctctcattacttcccgtgttgcttcaaaaccgcactcggaaaactaaaaccaccgaggggagctcagccaatcaaacctccttgctggccccagtttaggggcttgggggtggcgggcaagggggaggcaagggggtgcagggagctgaggtaacctgtggacgagggaacagagccgtagttgtgacggatcgctgttgcttcctgtgtgtctttttgtgtgtctgtgtgtgtgggtccgtgtatatgtctatacaaatgtctgtggggctgtctgggtgtctgtctgtctgattatctatttgttgtgtcaatttatgtgtcacgtgtcaatttattttattttattactgttttccaactttattgagatattattgacatgtgctccgtgttagtttaaggtgtaccatgtgacgatttgatgcctgggtgtattgggaaatgattaccaccccaaggttagttggcacctccatctcctcatataattgccttttttttttttttaaatgtgtgatgattaacacttaagatccactctcctaacaactttcaagtatgtaatacagcagtgtcttgttttgttctgtttttggccatgccactcggcatgcaggatcttagttccccgcccagggattgaacctgtgccccctgcattgagaggaagtctcagtataatagagtattgttaagtatagtcactgtgctgtacattagatcttcaggatagacccactcgttcctctgcacgtgctgtatccctctgaggaataaggtcgttttgtggtggttcagacggtaaagaatccacgtgcaatgtgggagacctgtgtttgatccctgggttggggagatcccctggaggaggtcacagtaacccactccagtattcttgcctggagaatccccagggccagagaagcgaccccagtccatggggtcgcaaagagctggacacgactgagtgacttagcacagcaccacagcagtgaatgaagaaatggaggctcagaatggctaagatgttcgtctaaggtcacatggctagtaagccataaacatgggatgctaacatggggtccctctggcttcagggacaatacttattaccactacagttttg

SEQ ID NO: 28198 - DNA, 1265 bp, Bovine  19866880707940
  misc_feature (1)..(1): n is a, c, g, or t
nggatgggggtgggcgccttcctctagaagccttctcctaagcttgagcccagcaataaatcacccctcaagtatcacacactaccgtaaaccacagatgtgggaggcggggagggaaagaaaattgagcttctgccgctggagagaaaacaagattgaccaagaacttggaaacggggtttgtttgaggaactcaacttgacctccccccacttccgacagcctttagctgggcatttcagggctgataccttttgagcaggaagcaagtttctcccgaaggattttttttttttacagtcacctcccccccctccatctttccatcccctgcaaaatcgcatagcatttgttcttaatctttcagggggtgaaggttccctttgaaaatctgatgaaagtgatggactcttcccttcattatataaatgattattgacttgtgctaaagcctccaaaaatggttaagactggtttatggggggttttctaggaaaataaagggctctttcccctcccatattaaaaaaaaaactttaaaaaatatattgatttttttttaacgttgaacctttttttatattgaacctttactgatatctacatactgaagagcgcacagattattaagtatttggcttaaggtattttcacagactgaacaaaccagtgtaacctgtgccccagtcccataagagagcattaggtatctggaggtttccttatgtttcccaccagcaactaccctccacctagacttgccactagcttggcttagaagagccagattcgcagcctggacgagacagaagtctgggggagagtgggtgcgtgtgtaggtatagctgggtcgctttgcagtgcacctaaagctatcacaacattgcttaatgggctgtgtgtgctcagttgctaagtcatgtccgactctttgtgaccccttggactgtagcccgccagcctcctctgtccatgggattttccaggcaagaataatggagtgggttgccatcttcccttccagaggatcttcccaacccaggatttgaacctgtgtctcctgcagctcctgctttggaaactctgagtcttaactacctgattgccagggaagtcccagcaggtactatttttgagtctcatttttcagctggacaaatttgaggatcagatgaagtcacttgcccagaattacatttatgtgagttactgggagattacgccgtggagcaagcttgacatgggcttttgacatgacaagacta

SEQ ID NO: 28199 - DNA, 1403 bp, Bovine  19866880814693
  misc_feature (1)..(1): n is a, c, g, or t
ncaaagaacctcgtactaaagaacacaagataacattactaatatatcattatgaacccctaatgaatgaaaatattattcacattttcctgtgattttatgcttggttatgaagcatttcaaggggagagaatgagagagacaaacactgtggccagcattgttactttgacgttacaaataactgtatttatgatggtattatacagttcatatatttccctctaatagtgccaataaaaagatggcattttcccagcgtctgctctctgctcatgttttatgtcttactttcctcaagggtctgtgggctcttaagcaaaagagctaatttttcacagtattagaggggaaggaaagttggctttctctctttctacactaaactgctcttttcctattagtcttcacaaggcaaaatgttgttccttaaaaagaaaagtcacacacacatgtacataagagcttgcattgttacagagttcttcctacctacccagcacctgggttttatacatatcacttcagttgaccttcaggacaagcttctgagccaagcactctaagggtaccccttttagggatgaagagatggagattcttaaagagtaagttcccccaaagacactcagaatgatccaggactcaggttcctcaaagtcaatgccctgaagaggatgggatgttatggagagagcagcatggaaacatactgattaccagatgtaaaagacagccaatgggaatttcctgtatgactcagggaactcagactggtgctctgtaacaacctggaggggtgtgatggggagggaggttcaagacagaggggacatgtgtatgcctatggctgatttatgttgatgtttgaagaaaccaacacattattgtagggcaattatcctccaattaaaaataagtaaatttaatattttttgaaaagtcagtgctctgggtgacactcttgcttttctgtccttttgttttctctcactgttaagattttcatttattatgatggataagtattctaactggcagcagaaaactcagtctcacaaagcctttaacaagacacttactctttttgttttctctctttttggttatttattcattgactttatatttttattgtttttttattttgtaactaatttttgttggagtatgatagctttacaatgtagtgttggtttctactgtacagcaaagtgaatcagctagatgcttacatctagcccctcttttttggattttcttcccatttaggtcaccacagagcactgagtaggctcagtgctgatacagtaggctctctgtatctctgttattttatgcctagtactgatggtgtatatatgtaaatcccaatctcccagtccattccacctctcctcgcc

SEQ ID NO: 28200 - DNA, 1261 bp, Bovine  19866880816350
  misc_feature (1)..(1): n is a, c, g, or t
ntccattggcaaaatgaagaaatacaaatgagcagcaaacaccaagggaaaaaattatcctcatcattcaaataacctgcaactgccctgtggtggcaaaccagccgctgccacaagcattgggcatccaccaacttgtttcagtccttctgacaactctcagaggcagtttctccacgtcacagcacagtccaggaaaccaaggctcacaagggttaagttcctggtccaagatccttgctgctaagtggcagacagaggaagaaaggggatggtgccaactgacgaattgataacaggccgagtttgcagctgacaaaactggccttgcaggggtgatttcacctctctgagcctgtttccctgctctagaaaatgaggattgcgacttccctggtagtctggtggttaagactccatgctcctattgcaggggcacaggttcaatcgctggtggaggaactaagatcccgcgccaaaaaaaaaaaaaaaaaacacccacgggggtggggggaagtgaatgcactcaaagagttgagctaataatcattaaaaaagaaaatgggaatggaataggacgcacgtcacagtcgcaggacgtttttagcaagaaaatacatgattaggacagtgcattcgtgtttatttaagtaaagtgcaataacagtaaactttttactattgatttcgagatcccaaggacccaccatactgagtctccctgcctgcacccatcaggagttaggaagggtccgctcctgacaacagaggtcagaggccccacagaaccaggctgagaggcatttccccccacaaccccatcctcctttgctggcctccgaggggacctcccactcactcacatcccagcctctggggaagcttctggaccacaggggctgatcaatgatggcgtatttgctcaactccacgcccacggtccagctggagagacaccctcgggttcaaggctaaaggcttccaggaaacgcagccggggcttgaagtcatcagtcattcagtaactgcccccttcgtctctggggacggtctggagctccggcttgggacgttcccccttctcgttcctggggagcctgtctgcttcctctcgctctcttctcaagcagtggctgcccgttgtggctattactattatctttgtcactattgattgagtgttcagggctccatgcattttctttgagtgtccagtgctttacatgcattttctcatttaattctccctagaactccgagt

SEQ ID NO: 28201 - DNA, 1019 bp, Bovine  19866880893922
  misc_feature (1)..(1): n is a, c, g, or t
naaaaatacctctgtttatgctgctacaccttacatgatgtccaaggcagacatcgctaatcaatcaggaccctcctgcccatagagcctgaagaggttccagtgctcattgctttccccgcaaagctccaggcagccactacaatcaatcaggaatggaatatacaatgaaacccatttatttttactatctttgcatctactcaaatgccttaaaggctgagatgtatatttgattcttctttacttatcccctgtccctcaaggcaggtctaaggctgagactttcctcgtgcagtaggggaattaactgttctgtgggaggccaagtctgagcccatctgtctgcccacagggctctacttattgggctttggaaaaggggccaagactcctgaatcgaggagaagagaaagaagaaaacagctccagttaagtgtccctttctccttttcttctctctcctcttgcaaaaagaaaagaacaataccagccagctgaaagctcattaatgcacttgaccttccgaaagaaaattaattccaacttcacacctaccggctgtgttgctcagctttgtcaaaacgttggcatcattagagaggagatgacatggctggagggctccgagagtctgccacctccctacgctgggctgagtgagtaggagctggcaggaagcacgcggaggcgccggccctgtcagcttttcactgtggattaagctctctgctgttggctctggaaattgttatcactgtcgagctgccccagtgattcttaccaggctccctgacagcacaggcccacagagcagcagccttgagggccttctgttggagggaaggcagactgtgtgtgtgtggggtggggggggccgggtttgtaggagaatgtgtgtctgcatgtatcagtgtcagcgtgtatgaacatgggtgcgtgtgtgtgcacatgaggatatgggcatctgtgtgtgtgaatgtgcatgcatgtgcatgtatgtgtacagctacactcaa

SEQ ID NO: 28202 - DNA, 1079 bp, Bovine  19866880901321
  misc_feature (1)..(1): n is a, c, g, or t
nacatatgtgcttttctctatgtattttcacacctgaatcaaaaagtatatgtgttgatggggaaacatattaagtgaacacatttggagaatcagacaagactgtcttaggggaaaaaaaaatccaaatgggacaggtttcatctccttcccaaaccctgcagtggacggtttatgagcagctttatttaaaggattcttacagaatcccccatctgtttctaaagctgcagaaacaacaactctgcaaggcaatgatcagattgaggacaacacactgttctcagcttctgtacaaacacacacacacacacacacaccccaaacagagatgtcaccaggcctgtgttgaatttcctgcctttgtgttctccggggcagccctgcggaggggaacacgctgcagactgatatgtgaaatgaaccaataggcccagttgagacttctaaaaacaaatagcccttttaatcttctggaggggggaaaaaatcatttacatgggcaatgatcaagctcccttctttgcacccatttcatggcttggtctcgaacctctttcctaaatccttgtcacccataccaaccctgtttccatccagaggactccagattacgatccttctgccatttccaggtctttttttttttttactactttaaaataatttaaacatttatttattttcattttggctgtgctgggtctttgttactgtgtgagcatttctctggttgcggtgcgagggctcctcattgcggtgacccctcttgttgctgagcacggtctctaggccatgtgggcttcactagttgtgccatgtggactgagtagttgcgactcctgggctctacggagcacagactcaatagttatgcatttagttgcgggctgttcttaaaccagggattgaacctgtgtctcccgcattggccagcgggttccttaccaccgagtcaccaggaaaggctccatttccaggtcttagggaacagccgcacagccacggggatgccacaaacagaggtggtaggtgttctactaggttccttgaatgttcgcttcagggaaccccaagga

SEQ ID NO: 28203 - DNA, 2439 bp, Bovine  19866880965934
  misc_feature (1)..(1): n is a, c, g, or t
natgatggctgtctatactgtgaatatgaagttactgtctaaaaataaaaatgaaatatacatactgacatggaaagatgcccatgatgttaacaggaaaacaatgcaaatatcagaacaatgagtgtagcgtgtgcctattttgaaaaataatagtcattcaaggactgctgtgggtgtgtatatgtgtgaatgtaccctcaaaaaagaccatcaagatttaccccaaatgttgatagaagttatctacaaaaatgggagtgaggcttgtagagagaagacagaagtttcctttactacttcattctcatctcaatcatttggattaaaaaaaaaattatagtgaacatagagtcattctagaatacaaaaaaaaaaaaaaaaagagcaaaaacatgaaacctgctgtcaaaggtgtgttttatcattgctgagcatctggaaatgacctcggagacagacgaagctggtccccgtctccccaaaggggtcaaggatccacgcagacgagtcggcaggaccgaactctcacagaccaataactatccatcttgatctccgagtcaggaagtcacttccaccacctctctcaataactcattccagggtttaataacctttccttgcaggaagttcttcctctcatcacagctgagtccttcctgctgccccgtcagtcctaatggatgtgtctcctttcccctcccccactctctggagtcagggacagggacaggatcccgtggagcttctgctgtggcccctctgcatcatgccccaacgatgctcttaggactttggcacggcagtgaccataactgtctatgatgatggccgagacggccaaagcctctctctgcagcccaaagggtccccagggcccttcagtctgcccattccccgccactggatgctgcgttctgcataaactctgcctccctggcctctttcctgccatatttcatgcatctcgatggtcactcaggccaagatttacggaattcatatcctttcgagctggaggaaaatgggaaatgcaagatttactatgcccctaggaaaagctaggaagacatggacccaggagcctgggggtggggcgggggagtgggtgcagggatacagaggtgagctagagacacagccatttgtttggtcacagcctcatccagatggggcctggggatctgccattgctgacagcaagcatgtttctgctcgagtcttctctcctctcactggcttctctagagtgagaggcacaggactaagcaactgtaggtggcaaaacaccaataagacagggctcctgcgttccccaaacttgagattcctgaaaaggggatacacagttacatccaaaattccaatccaaagcaaagatgttttaaacttctcttggggtagtaatgaaacatacgtatttggaaattggtagagtcctcactttgtggcttattagcaggaatgtttaagcaagttacttgaacctggctgattcctactttccttatctgtaaaacggggttggcaactgcactggactaactgtgtgggcaggtaaagaaatgaagcccatgacggctttaaaggaaatgaagcccacaacgggctttagaaccagactggccaggtgtcattcacagcactgtgactccccagctgtgtacccttaggtaggacagttgacctctctgtgcctcggtgttcacacgtggacagtgggaatgataccaacttcacaggacgaatgtgagttggtataggaaagaggcttagaacagtatctggatcataataaatatcctatggcttgcagtcaggatgaacacagtgaagataaaacgggtggaagataaatctgaaagtgagactttcctggtggcccagtggttaagaacctacctgccaatgcaggggacacgagtccgacccctggtccgggaagattccacgtgccacagggcaattaagcctgtgcaccaccactactgagcttgtgctctagagcctgcgagccacgactactgagcccatgtgccaagagcccatgctttgcaacaagagaagccaccgcaatgagaagcccacaccccgcaaggaagactagcacctgctcatggcaactaagactcagcacagccaaaaattaaaaagaaaaatctgaaagtgtgaaacagcatcagatcactccaacaacatcaaactgggagttagctcgacatgggtgagtgggttaatagctcgagctcgtctacaggtggtggtgcatatacaaatggcataaatatccacttcagttcattagcacgtgtgcacattgctgtgcatcatacattatgtctccatgaaaaacaaaaacctctttaataagatatttttaataaaaataagaatgtggttatcagggggtaagcaggggggggtataaatgggaga

SEQ ID NO: 28204 - DNA, 1000 bp, Bovine  19866880982750
  misc_feature (1)..(1): n is a, c, g, or t
naaaatcaagcagctgactgagtccaggtccaagcaccgtggaagtgagtgcacagagcaaagcatgcattcacattccacgatggttacgtccagtgatgaatggaccagtttcttgacagagaggaagttcctataggttggggtgaccttcctagcgatgtgtttatttgacagcccaaggcaatgaattcacagagaggaagagaggagaggaggaaaggaagggaaagaaagaaagattatttaagcccaagagcatcttctccggtctgaaaaaaaacaaaagtgtaacaacaaatcatataagcagcttgagaaaaaagaagatcatcagagactcaaaggtcctgaggagatattgaagccaggaaatgcgtgcttttgtctatcttagtacttagggccactcattgttactgttcaatagctaagttgtgtccaattctttgcaaccccatggactgcagcaggccaggcttccctgtccttcaccatctcctggagtttgttcaaactcatgtccattgagtcactgatgccatccaaccacctcatcctctgtcacccccttctcctcttgcccccagtcttacccagcatcagggtcttttccaatgagtcagctcttcatatcaggtggccagagtactggagcttcagcttcagcatcagtccttccagtgaatattcagggctgatttcctgtagaatggactggtttgatctccttgcagtccaagagactctcaagagtcttctccagcaccacagttcgaaagcatcagtttttcggtgctgaacccacctggccccataaatactccagaattatttgtgaaatgaatgaataccaggatgacattattgccgactggagctcccagcgaaggtgttgcaggttaaatgggttgtgggagatggggaggatttggatggccagaggagggaaataactcaggaagagcatcagctttaacaaagatcctcacaagagaat

SEQ ID NO: 28205 - DNA, 1133 bp, Bovine  19866880991340
  misc_feature (1)..(1): n is a, c, g, or t
ntgttgatttagttgcttcttttatcaaatgttgaactctaagaaaatgaagggctatatcccagaattttggaaaaggcatctccccagctccaagtaaacatggggctctggacctagcatcatcatattgccaccctcagccacagtgattggtccaggcaggagcatgtgactcagactcggccaatcaaatggcttccctaggatttttacaagggaactggtaggaaagactatgtttgttttgtttactcaggtgtggctataattccagcttcgtggtgggagctggctttgaaaaagagtggagacagaggactgcagggtctgagtccttgattctgggcatccctagagcctatttcctgcctgcctttttctgtagttcaacaggagaattattatctctctacttccctactttgatgaatgtcaattggagttgattttctgtcacttacacccagagtcctcatgagtgtatcctgagtaattatcatgacaaataggtggaaaataactagatactgtgctaaggccatttatatcagcaagtgtgggactcagctcagacttaggtgggcaggggtagtggcactgctagggggattgaatatcacagtaggtgaaagtctgggcttttagagactaaaggtcttaggtttaaatacaggctgcagttccagactagctggataacactgggcaagttactgaacctttctgagctcatgattgtgaatctggtcagcaatggaaagggccctgcaagatgatatatgtctgagtcaaaatacctggagctggaaagtatctaaaagacccctgcactctcctttgtgctggaaacttgcccccatcatcttttacttcacattcatcagcaaggctggttgaaagtcccctctgtttgtaaggcactggggaatagcatcaaataaaatagacaacaccccggctcttttgaagcttacacttataccttatgagtaacactgccttgaggcaggaggcattctgggtgctgtgggtgcatttcggagggacctgagagttccagaaaggctaccaagggaaagtgatatgtaagcggagatgtggacaaaacgtgtagaaataggctaggtaag

SEQ ID NO: 28206 - DNA, 702 bp, Bovine  19866881043310
  misc_feature (1)..(1): n is a, c, g, or t
ntatggttggcctgtgcctttatggaatccccactcagaggtgtttttgccaacactaattcagggctgtgagaagaacttatttgtggaagggtatttgtttttccactgaggcagccaaaaccgccagcctcccttgcaaaggaagagaagagagaagaagcatttgtttctcgcgatcgcaagcggtagcccgacaaaacaaaacgcttcccgggagattccaagcaggttctgagaatcacgtactgagactcaagtgtgggtgcgttttgtcctaatccccaggacccagaacctcacaaaggaaactcctgatgcactgaaggctgaggtcaggcccttctgctcctctagcagctccaacagccaatataaataccacagtcctgccctggacacccttcagtcctctggagctaccagaagccaagataaagcaaccgaaacccatgctaaatgctggggagacaaacctcagcactgaacagaaaccaaatcaaacaagcccccaccaacccattgaaaatgatgaagacagaggtgtttcattttttttctttcttctgtgttttttttttttttctcatcattaagtcccaacgaatgaagaagaaagggactgggaacaagaggggagaaagcctgtctgtctttacacaaagaccttgaagtctgaagcctctcatctcagggcatgtg

SEQ ID NO: 28207 - DNA, 1673 bp, Bovine  19866881046014
  misc_feature (1)..(1): n is a, c, g, or t
ntcgtgtccactctctgcgaccccatggactgcagcatggcaggcttccctgtccttcattatctccctgagtttgctcaaactcatgtccattgagtcagtgatgccatccaaccatctcatcctctgttgccctcttctcctcctgccctcaatcttttccagcgtcagggtcttttccaatgagttgactcttcacatcaggtggccaaagtattggtgcttcagctttagcatcattccttccaattgtcacaattttttgggagaaggtgctacttactgactggtgtctcctgagtgggggccagggatgctcttcaactttctgggatgcacaggacagctcccatggcacaaagttagccagttcaaaatgtcagtagtgttaaggttgaaaaaatagtaaaaaaaaaaaaatctcacctcctccagacagccttccttgattccttaaatggcagagatatgttctttggctctcatgcacttctgatcttagctgtcacagcctctcccactctgtggtccctgaactccagggaaagagcctgggtatcattgaacctacatctttggcttcctttctctctagcttgtgaatctctggaagtcagggactattgtcatccacacaggtgtctcagatatatcatagaatctgactcatggtgggtactaagtaaatacttgttgaaagagcaaatggatggatggatggatggatgaatggatacagttgtaggctgagactcaagaaaactaagttgtcttctttttatgtgtgttagttgctcaggtgtgttctgactcttcacgaccctacagactgtagcctgccaggctcctttatctatggaattctccaagcaagaatactggagtgagtcgccatttcattcttcagggaatcttcctgacctaggggtccaaccctggtctcctgcactgtaggcagattatttgccatctgagccaccagggaagccccataatgctcccacaggcatgctgttaaacttgctttcaattctagtccctccttccgtattggcttaatacatcgtctcccagtaggctggaccctttgaaagtgtgtggacggaagtgtactgagctctttgcaaaagagaagacccaccctttcgagctgagataccattattttcatgtgttaccctgataatatctgttatccctccgtgcttaggaaagccctggataaaggctttgtgctgcaaacagtacagccacagtctcagggatcttaatctcttatctatgactttattttggaaaattgggcttgcttctagctccaccctttcccccctagttcatgctaatgctttcaacaaagatccccggaaggggaaataggattgagttcatcccagccagcaatcatcccccactaaccagcccaaccccggagtgggtggaggggctagtgggtcccaccccccattcaatcatgtactatcagctccccacacaccctggagaatcaccaaatggagtttagaacaataagaatttgaagaggaaaaaaacaacaatagatttggggctgttcccctaagccaaagtttctcaaccttagtactttggatatccgtgggcatgttcaatcccttcagtagtgtctgactctttgccacctcgtagactgt

SEQ ID NO: 28208 - DNA, 1827 bp, Bovine  19866881090197
  misc_feature (1)..(1): n is a, c, g, or t
nttgaattgcaatgttgtgttccaatgttctttgagtaaaatcaaacaatgacccgatctccagtgaatatcagtgatggagtgctctccctccgctttcctttcgggactgagcttgtgttacgtccccgccagcgacatccagtggggagggtcctccccaggaccccagacccagcttgggttcgagatcggaccactctccccatctcctctcgtttccagcgggccaagctcatggaaggagaggggaccagagaactctgacctccccagttggaggagatggaggctgggccaatttatcccctcccagaccccaggtccggacagccggaggggccttggccttgcctgggggccttggctcaccccctcccccgcagcccccgtaccccatccctgccaggctttgaaaagcgccttttatgaacttttccattttccttctggaggcgtgtttgttttcagtcacctcgctctgttttatgagcttcagagctgatctgcacgttcttccctccgtgtaatttcaatttgaactctccccggagcggccttttccctcttgcaggctgccaagtcgtttgaaggctgcacaaacattcttcctctctcgcgtccccgggaatcagggtctacacccgcgagggcaggcggaggcggttaccccgagagttccgcttcagcagacgccttccgattgatggttggtaaggatggactgggagaagggaaatattcgaaaaactggccccggggcccctcttttttttgatgtggcgtgtgtgtgtaaacaccccccaatccatattcgaagtcttgggagtgaagatagaggaggtgcacagggattagggatgcggtgatggaaactggcaccttctctctgttaacagactagtttcaattttcatctggtttcctggcaaggcgggattatccccactttacagatgaggaaaactgaggctgaggttggtttcccatcccaccctgttgggattcaagttttagtttgaatgaaccctttgcataacaatacttctctggacttacggcttacatcagtaactgcccttacgacaaccgcccttcctttgttaagtacctattttgtgcagggcaccattctaagccactgctttttcatttctcccaaatgtttctcacagtgactatatgaactatgttcttaacacatgacagtaaagtgtcatggcacagagacgttgtcaccagccccaagtcacataccaagggagaccggagtcaggagttgaactcagaggcaggcactcctaaccatcagtatcctgcctctgggagagcctttcccagctctcttctgagtcacatgaaagaaatcccaggattactgtccctgggctgcattttcctccccagggtcacgcggaggcaaacaggaggatgggggtggaacaagggttacgtaaagcagtaacttcaaaggtggtcaccactagggtgcacagccgtggctctgggcacttagccagcggcacaagtctacactgcgggctctccacccacggtctctcacctacctctctgtagtccaaggactgagctggtggtggaggcagctgagggctggaggtctagacgttgaaagtaagggaagcagagatcaggtgtcgataatcagagtaaaaataatgataccagacgttgtttattgagcacttactatgctgtgcataatatatggttctagtccctttaaaaggcacagagaagttaagtcattttttcagagtcacacagccagtaaattcccggctttagacaccctccagtagggag

SEQ ID NO: 28209 - DNA, 709 bp, Bovine  19866881093200
  misc_feature (1)..(1): n is a, c, g, or t
ncagagttaggttttgggctcgataattattgacatgttttcacctatgaaaatgtctagtggtggatttgaaagtcctgtgagacacagagtaatcttttatagggttctgtttattgcagaacatctcaaatccctgacccttgcccattaaatgccagtagtgtaccccgcaatcactgagacagttaaagaatacccccacaaacttctggcactcttcttaattggtaacattactatcattggaaaccacggttgtagacctttctcagctccattctggactacttggttggatctatacagctgaaggggcttcccaggtggcacagcagtaaagaacccacctgtcaacgcaggagactcaggttcgatccctgggtcaggaagatgccctggagaagggaaatggcaaccccctccactattcttgcctgggaaatcccatagacagaggagcctggcaggctacagtccatggggtcgcaaaagaatcagacatgacttggcgactaaaccaccaccaccatacagctgcagagacgccccaaaggatcatgagatattttggatcactggaagctatgcctaatgaccccagttcctggggatttgcccaatctgttcaaataaggagcatcctacagagattacttgggaatggattcagaggaaattctgggacgacctgggaataatatttcaa

SEQ ID NO: 28210 - DNA, 1967 bp, Bovine  19866881106703
  misc_feature (1)..(1): n is a, c, g, or t
natgtgagttatgcttaatgctgtaacaaatgaacatattgaacaccattccggtgcaacaaaacaatgtcattggactattcatgaatagcccaattgaaagatttatttaaaaaataaataataaaaggatgttcatatatcaacaagagatatgttccaagcataggacataagttcagagtcatgcgacaaatgtcacctcctttcaatgttctcaggacacttctatgtgcagatatacaaccactggggataatctcaaacattaaaatttgcaacctttgatgaacttgaggctgagatgaaatcaccccttccagcatctactttaaaccaagccttgctggacaaggaggaagtgggaaatagggccagcttctgggctccctgagcacccagtttattgaggaggctcgtgggtaccacgaggcagagacaatcaggatgctctgatgggagaactctgtacagaacctgcatgctcagttgctaagtcatgtccgactctgcaaccccagggactgtagcccaccacgctcctctgtccatgggattctccaggcaagaataccggagtgggttgccatttcctccttcaggggatcttcccaacccagggatcaaacccacatctcttatgtctcctgcacgggcatactcccatcctctgaagccatggcgagtttcatgacccagtagggcagaccgttggggaggctaaccctgatcgttttgcagccccatgactccgagaccatcttgccatgacacaggcttcctccctaagagactcccgtggacctcgacacaccccaacgtccacggagtcagaacacattagagcgaagttttgttccccagagcctctagtcccagcaaagccagctaattcagatttaaactccctcttaataggctgagttgctgagccttctaattaatgccacatgtttccctcagctgtcatcccgaataaatgtttacaaagctattaacgtactgtatttgtaaaccgggacagctcggctttggggagtcatgtggtatgcattttctcctcaaagatggaaaaggcttagcaataataaatacattgttttgcagggatgggagcaaggcgttgcctgaaaaaaaaaaaatttattgcgagcttcctgagacagcatggctgtgtgtacgtgaggaatggaagatttcttgagttcagaagagctatgagggggccggatttggcccaggttcgcgcttggaggggaggaactccaggggcagaagaaagcactggtttgagatccagagacctggactctggttccagcccctctgctcaccagcctcttgggaactcagtttgtccatctggaaaatgggaggctagactcttcaaaatttttccatcttttttttttttaatttatttctctgtgttgggtcgtagttgcagcacagagacttggggctcaggggctgtagttgtggcattcgggctcagcagttgcaggcacgggctcatgtggggtcttagtcccccaacccaggcatcgaacccacactgcaaggcagattcttaatcactgggccaccagggaagtcctaaagaattttccatcttggatccaggattctagtcctaatttgccctctgctctgacctccagaggacacctggaaggttcttgcataagctcttctaagggtccccaaggccctaaagataaagtcctaacatcttaacataagaccccaaactcagtattatcttccctacgttcttctccagccccatttccaaccccgcctgcttcatactccagccatgctcaatgcaccatcgctttcctgaaagaagccccactgaggctcacttctaagcctttgcctgtgccggcttctccaccagcagcatgcttttcccctcagttccctgcttacctagcctatttctacacgtttgtccacatctc

SEQ ID NO: 28211 - DNA, 1860 bp, Bovine  19866881154237
  misc_feature (1)..(1): n is a, c, g, or t
ntttggagacagctgctcaatgtcacacctcaggtcttcccttaaggcaggtaccagagaggtttagagataacagatgccagggagatgaagggaagatgatcagtcttcatgaagcccctactgtgtgccagtcctgtggagagcttagcaaccatttaacatcattcactctggtgaattttttaaagctctgcctgcacatgagaatgggcttcccaggtgcctcagtgataaataatccatctaccaatgcaggagacgcaagagacatgggtttgatccctgggtcaggaagatcccctggagaaggaaatggcaactcactccagtattcttgcctggagagtcccatggacagaggagcctggcgggctatgatccatggggctgcaaagagttggacatgactgagagctcacgcacgcacataagaaccatccaaggaagttttgtaaaggatacaggacatcacagagcaccgagctgagtcctgtgatgacctagatggatgggatggggtggggtgtgagggaggctcacgaggaagggggtataagtaaacttatagctgactcacaatgttgtccagtagaaactaacacaacactgtaaagcaactatattccaagaaaaaaaaaaaaagattcaggatgcccaagacccagcggcagagatgctggatcctctggccttgaccatgcctcgacaaaggtctatttcagaagcacgtcaaatgattaatatgagactggagttaagaatcaactggttgattcttcgcaacaactctccaaggatcacactatttatacctgcattttagagacgatgaaccgaggttctgaatggctgagaatcaaagccggggccgcacagctagcatgtaacagaactgggatccgtgcttgctggggggtgtccaactccaaagctggtgctctttctactgccgaggtggcagggtgagctgaccctccagacaccttctatttcactcccagtcacgtagacctggaaggatcaatgccgtcagagtccaggtggactctatccaaacactcctgcccagaggaacgagcttcaggggactctgccttgcacaacccaggttggactcctaaaccctgaagtaatgatggaggtgggctggatcaaaagcaggagatgaactcagggtctgcagttcatccttgtcttttttttgatcccaacaatactcttttccaagatcttcaactgttgttgttgtggtttagtcactaagtcgtgtccaactattttgcaacccccatggactgccaccaggctcctctgtccatgggattccccaggcaaggatactggagcaacttgtcatttcctcctccaggggatcttcccaaaccagggacaaaagctgtgtctcctgcactggcaggtggattctttgccaccgcgccaccaggaaagccttcttcaacttactccgagagaaagaggaagcatgcaggttcccacaaggagtctcaggctcttcatggggaaagaggctgcttcattttcctgtctctttactgccttaattagccatttggtgacccgacggtctctttaatacgcatccagcattggtcctgaaatatggggggtgtctgttgaacaagagtcggtcagactgccaataccgctgtccagcaggctgatccaggctgggtgctgacctgcaatgagatcattgagtcatctgtcctcttcccccagccaaagtgttggtggtgtgtggagcacagctgaggtgacagtgtcgaggccgttgcccggctgacttcaaaccagaggcccagcacaacaaacaacagggagaaaacagagaaggca

SEQ ID NO: 28212 - DNA, 1111 bp, Bovine  19866881167130
  misc_feature (1)..(1): n is a, c, g, or t
ngtccatgctgcaacacggatgaagcttgaaaacatgatgatgagtgaaagaagccaagcacaaaatgtcacatattatacaatcccatttatatgaactattcaaaacaggcaaatcagggacttccctgcaggccaggggataggactctgcacttccactgcagggggtggcatgagttccatccctggtcggggaactaagatcccactagctatacaaagaaaaaaaaaaaaaagttgtgaatgtactaaatgccactaaattctacacttacaaatcatttaaacggtaaatttgtgctatgtacatttcaccacaatttctgaaagtgaaaaacagaacccgtattaccacggtcctctgaaggtctgaaaccaaatgcattcatgccagccccatgccaacagattgcccagtgggcagagaggagcaaaagaggcaaacaaggttccctcctccagttggccgaaaagatccatgtctcccagagcactctgggttcagccaagccccagacatgttttgcctgcagcacttcattccggctgtaatgaaattacgtgtgtgtgcttacagggaaagggagcgggtatggttttaatttatttacgctcagtgtctcagaacgcagtagggtagttgctgtttgatgttggaggcattctgcaaggcctctgcataagccttggttctcttcggtaacaagaaaccaaggttagctcagactaaattgtcttgaaagtctgagtggaacaggggttccaaacatcgagcttgccaaggaaacacattccctcattcaaagtaggcatgaaataaggatctggttcctgggacccaggggtttcccacagaattcagaaactcagacgtttcccaaaatctcacgagcattgtggttcagagtcatttaggaagagagaatagaggaaaaaaaaaaaaacctttatcaagaacctactgtgatggcaggtatttgacagatgttctttctatcaaactccattttcatgatgagaaaactaggccccaagaagtaaatcgaatggattaagatgtcaaggggagcctgaacttggataggactgctccagtgtctggttattt

SEQ ID NO: 28213 - DNA, 1383 bp, Bovine  19866881254113
  misc_feature (1)..(1): n is a, c, g, or t
ncttgccccgacttcctccccagtcctccagccccccccccccaaccctccagcccatcctcagggttgtcgccatgggaggtctcttcttacaacagggcaaagcaattaaggccagacggggcgaattaaaccagaaagaatgagtttcctccagcaccagagaaatatttggggccttgctttggaggagaagccaggaggagagatggactgtgattgagtggtgaggatggaggctgatgggataggaccaggcaacaacaggaaggagagaaggggtgagtctctggtgtgtcctcagtcatgtctgactctttgtgaccccctggactacagcctgccaggctcctctggccatggaattttccaggcaagaatactagagtgggctgccatttcctactccagggtatctctggatagaaggttaaagtggaaagacaagttgaagggagaatggcagagtcattcattcatccatccacccattcattcattcattcattcactcattcatccatccatccatccatacactcatccattcttccattcaggtatcaagcattgaccttagatgttttaaatccaaggacaaattgtagatcataatgaattgattaggagctagggctttggaatgaacagatatggtggattccatcatttgttactggggtaacccttggcaagagacccaagctccaatgccacagtttcgataaaatgtgtttgtcctgccagggctttgggggagaattaaataatataattgatgcagaatgaacattgctttgcccttaagtagatgttcaagaaaattaatacatcatgtatacggtcctctatgtgtgtctgttgaatgattaattaagtttgtgcttatgtttctaactgttttatatacattcatttatatagttctcaaaaatacacgaggaagtcgttactaccatcttcctttctttctaaatagaaaccgaggcaccaaaaggttgtattatcttccaaaatctcacaggtgttaagtagcagaggtagcatttgagcccagggagcttaactccagaaattgtgcatctgaaggtcaatgacattgcctacaagtgatgctggaggaaaaaaaaaaaaattatgttataccttgtgtgtttaagcagtggacattggatcagaggatccttggagatctctttaaagaattctattcagtgaccccccctgcccgtggccgggcatctcacacacacacacaagggcacaaacacaggcctgctttggcctctgctgacctccggctgctcctctccccgtgcccgcagcggtggctgcttcctgagaagggtggctggggttgctgtgtggatgcctaaagcaaag

SEQ ID NO: 28214 - DNA, 1088 bp, Bovine  19866881308061
  misc_feature (1)..(1): n is a, c, g, or t
ncagcagtaaagaatctgtctgccaatgcaggagatacaggttcaatcctcaggtcaggaagatcccctggagaaagaaatgacaacccactccagtactcttgcctggagaattccacagaggaccctggtgggctacagtccttgggagtcatgaaagagttagacatgacttagcgactaaacaacaacaaaacttcaagggcgagatggagctgcagggtggcccttcagagaaggccagcatggtggccttcaaactgggagaccagcagaaagaccctgcagcagggcaaggcggaggtcagagaactgagagttcccataagaaagttaaatgaggtcctctttgggaccacccagaaacacaccagcctcgtcgcaaagatgcagggccttggaagagaagatctatcttcctcccgccactgaagagacctgaactccccaggggcctcttgctgggctgacttcctgcctgggacccttccaaactttgtcgcctccgaccctggctgcccggctccccctttccaatatccgttccctccttgccccgctgccctcagccctgccccggatcctggcaacatcctgttcttcccctgaactgaactccccctccagcttcccggtgtgataggaatcttaaataaatgcttcctgtctctcgtccaccttatctcccgttcctccccaatggctgaggttcaagaaccacaggcagccttgcgctcccttctaattttaaacctgccctccgagccactctccccttcctccttaaggtttctggaaaggccagggggtgtcagaggtccctgttgacccgctgagtcagcagaggctgaaggcatccttctaaagttcccagggagggagtctggagctggggagcctgggtgaggccattttgcagagcctgctcccacgagaactgagtactgtgtggagtagatgtgtgtgtgctgtgctcagtctctcagtcgtgtcagactctttgggaccccatggaatgtagccctccaggctcctctgtctatggggttctccaggcaagaatactgggggaaggttgccatttcctc

SEQ ID NO: 28215 - DNA, 1682 bp, Bovine  19866881340880
  misc_feature (1)..(1): n is a, c, g, or t
ntagttccctgaccatgtgggatcttagttccctgaccagggatcaaacctgtgccccctgcattggaagcctggagtcttaaccaggaccaccgggaaagtccaggagaaagtggacttaaggaaggaactgagggaaaaagaaggaaacgaatacgtattttcttccttatatcagaccctttacataatttatttccttaaatctttgaaacaacccagtgatgctgggattatcacctgcctgtatgttacagacaggaacagtggaactttaagaaatgacagagtttcttgcctaatgtagagcaatcagaaagtgtcagagagtggatgtcatgctgcttgtgccaactcaagagttcgatcttcccaggagggaacatgaagaaacagccgagagaggtggctcaatccaatccagtaaaaacggtggcgcatgaaagtccaggatgaatttgtcaggtgtggctctgtgagtgtcttggtaaagagaatgcactggctgcccaaagtggtttcctttgctttccttgtcttttttttcaagattttatttttttttgatgtgaaccattttaaaagtctttattgaatttgttacaatattgctttttctttcttttctttctttttaaaatgttttggtttagtggctgcgaggcacgtggaatcttagctcccagaacagggattgaaacagcaccccctgccctgggaggtgaagccttaatccctggaccgccaggcaagtcccttccttgtctttacagaccaacagagcacccagcagagataaaactcactatgtaccaacacttaatttacccagctaaggagcatccaaagaccggtaaatttcctgtctcccaatttggctgggaatgtttttcttggataatcaccccgtttttttttcacttctttttctctccttgtagcccttggcatacttccatgccacccagcgactacaatagaagcgatataagattttcccctgaagccaaattccttgggtgttaaagttgcattgttttaaaaaggttgatgatggcttagcctcagaagaatgaacatcacactattctttgctccttgctggggaggcgcctgtggggtggtgtcacctgtcactgggagacaaagaaagtcatgtttgttactctgaatggcatctctgtaagagtcactgaccttgtttttttgaggtcctgcctcttgtctagcaggttgcaacctttttttttttttaaggctctgttccagatttcctttgtgaatgccaccttctgagatttggggatgtaagagacctgtttctagtggcttccatgatttcatctttctgccagttgctcctaagacaatgagcttcacatagtaaaatgatttctgattctgcctagctgctttcatagaaataggtggcagagtgaatgaggacacatcttttctcttttcacctggaccagaaatctggggctaaggaaagcatgagcttttttgtttatctgctatcttccgtgaactcacagtaaatgagaactagctttatacaaaccaagaaaacgatgttaattgtgaagaatctgataaaaaaaaattttttttaagtactactactcaacgaaaggctagtattaaaattgtggaggagaaaattctataatcctccttgg

SEQ ID NO: 28216 - DNA, 608 bp, Bovine  19866881393209
  misc_feature (1)..(1): n is a, c, g, or t
ntacaagttttggccttgcaaaattgactgtgttgccatttaagaaaaaaaacctaaaggttcctgatgttggatacgtatgtggtggtggagagggcaagtgtgcctccgcacgtcccccgtaaactactttcgggtggttttggagctgcatttgtccagtgcaaaccaaccaccgatgcctatgaacagccagcgactatattcttcagacctcctcaggctcctcagagtctttgagtaggccaaggccaaagagacctgctgatccacaaacagcttgagacctgtttgattcagaaccagcaaaagatgaagaagtctttcctgaaagtcatgcttaccctcagcagattttaaatgtatcaggttctggggacaattggatcaggccctgtcactcagaagactaaacatcagaagctggagctcacctgtcgtgtggcaagttgtgagtgtgcttcctggctccaccacttaggtggccttgggtgtgttacttaacctctctgaacctcagtatcttctatttcaaagggtcgatagcctgtcggccctggcaggatgttgtataagtatagagaaaccatggaagctagagagttctg

SEQ ID NO: 28217 - DNA, 2019 bp, Bovine  19866881421709
  misc_feature (1)..(1): n is a, c, g, or t
ncaaaatgcaggcaggagccacttagaaacagaagaatctgcaaagcaaatgatagatgtttaggtatcgcactaaacccacatgagtgctttcagcttgcgtgtgcgtgtgctaagtcgcttcagtcgtgtccaactctttgtgaacccctggactgtagcccaccaggctcctctatccttagtattctccaggcaagaatactggagtgggttgccctgtccacctccaggggatcttcctgacccagggattgaacccacgtttcttatatctcctgtattggcaggcaggttctttaccactagcgccaccagagaagtacctttcaacttagaatctggtaaaaggattagccctttgccatccacaaggctgcatgaaaaccagtctattaaaagactcttgtaggcgctccccagctcaaacatcaagctctctctgcactttgataaaagcagacctgcttgtatagacgcatggcaagagaataatggacacctgcttagagaataagagaaatttatgtggggagggggagacaggctagatacaagcactttgcatcatcctctcaaatggtagagaatgaattatttcttcccaatttggcgccatcatccatcacagtcaatttgcagcccatctggaaggtttcaaaaacgccagaatgggatcagagtcaccaaacagtcgcagcagcaaggcttcctaagtggattacagtaaatagaaacataaaaaagagttccctgtttagaggaatttactctgtgctatgtcttgcactcgagttccctcactgaatcctcgcaacgaacttaggaggtgcgaactctaaccatttccgttttgcaggtgagaaaatcaaagctcagagaggtcagcggacttcctgaggtcacacaggcagaaagtggtggatttaagacatagaggtagatgacattgacttcagatggcgcatctcagtcatgatgcgagtgctgtgagctcagtaaatcctacactcctctcccttcactccacccaaagttcaccttgcttcttcatggaggagtaaaagtgcatcagaaaaagaaaccctccttttagattctcatttttcttggatacattctcatagctgaacacggaagtggcttagaagacacataacacagacttaaagacaaagaggaatgtgttttgtgtgcactgaattttactttctccagctgggttggttctcctgatagctgcagcatttgtaggcaaaaggaatgcaaatagtggcccagaagttaagagtccacctgccaatgcaggggacacaggttagacccctggtccaggaggatgccatatgttatagggcatctaagcccatgcaccacaaccactgagcttgcatgcccgaaagcccatgctccacaagagaagtcactgcagtgagaagcctgcgcaactagagagaagcccctgtttgctgcaactagagaaagtccatgcacagcaatgaagacccagggcagccaaaaataataaactaattaaaaaaaaaatttttaaggaatccacccagagagagaaaatatgagtgtggcaggctgaaaggaaaaaataggcagctcttcccctgcattaactgactgggacctgctgcagggactccgagcaagaaatatttgctcattctataaataatcatcagtgcctcctctagcctagccctctgccacatggtaagaagtagcaacaaataggaaagaccacagtccctgctttcatggaactgcatactttgggaagcgtagattaaataagtgaaagtgaaagtcactcagttgtgtccagttctttgtgaccccgtggactatacagttcatgaaattctccaggccagaatactagagtgggtagcctttcccttctccaggggatcttcccgacccaggtatcaaacccaggtctcccgcattgcaggcagattctttaccagctgagccacaagagaagcccaatagattaaataataa

SEQ ID NO: 28218 - DNA, 1937 bp, Bovine  19866881456345
  misc_feature (1)..(1): n is a, c, g, or t
nacgtaatgtattagtaacttgtttatggagaaggcaatggcaccccactccagtactcttgcctggaaaatcccatggacagaggagcctggtaggctgcagtccatggggtcgctaagagtcagacatgactgaacgacttcgatttcatttttcactttcaggcgttggagaaggaaatggcaagccactccagtgttcttgcctggagaatcccagggacgggggagcctggtgggctgccgtctatggggtcgcacagagttgggcacgactgcagagcagcagcagtaactcatttaagaggtatgttatcgggagaattgagtgaatgtaagaaatgatcttggaactgggattggcacatataaaccactcaacaatgataacatcattttcatttcatcctcataacaagtttatgaggtaggctcagagaggttaggtaagttttcctgagtcacacatctggtcaggaatggagcccaagaaataagtgagttaaccatttctgaactcctggatcttccatctgccccacctcccaccttggggcaggattacttacatacagtacagggacccaagcctttgatgtgctaattccatttgtttgcctggagatcagaaagggatacttggatttatttatggggtttctgactccaaaaggcctcttgcgattagagagatgagctatttagttgtattgctaggttggatgattaccccccatggtcaagactttcctgctcaccttgctggttttatggcctcgggcaatacatttcaattttcgatttaaatatctgtttgtttgttttttcacctttaaaactctcttcacagaggggctgcactggcaccagcaggatgcagtctcccagactttggagggctgctccctctcactccacctatccagatcccactcctgtttctctcctcccccaactccctcctttgctgaggaacccacagtggcttctcagaatctccaggagcaaatccatttttcctcatctctaaataaagagaataagactgttcaggtcagaagtctttttatgaggattcagataaaatacatttatttatttttttaaattggagtatagttgatttacaatgctgtgttaatttctgctgtaaacagcaaaatgactcagttatacatatatattcttttccacattctcttccattatcacagaatatcggatatagttctctgtgctatacagtgctgtgcttaatcgctcagtcgtgttcaactctttgagaccccatggactgtaacccgccaggctcctctgtccatggggatttctaggcaagaatactggagtgggtggttatgccctcctccagggaatcttcccaacccagggattgaacccaggtctcctgcgtggcaggcagatcctttaccaactgagccacgagggaagcagtaggacctcgttgtttatctgtcttatatatactagtggcaagcatgcatgctcaagtcactttagtcatgtctgactctttgccaccccatggactgtagcccaccaggctcctctgtccatgggattctccaggcaagaatactggagtgggttgccaggccctcctccaagggatcttcccgacccaggggttgaacctgggtctcctgctttggtaggtgggttctttaccactagtaccacctgggaagcccatatactagctagcatctgctaatcccaaactcccaatttatccctccccactgcttccccttgggtaagatgtttgtttcctgtgtctgtgggctgcctcagtttccaatgcgccatccatagcgactcctccttattaccatcccttatttttgttgtcatgacagtaagtgacttactcagctagttagagtactagtactcactgcattggtctgtgccaa

SEQ ID NO: 28219 - DNA, 812 bp, Bovine  19866881471016
  misc_feature (1)..(1): n is a, c, g, or t
ntggccggctgcctgggagcagagattctcccgacccgcagttcccagagactccctcaggtgaggctggaggcttcttcctgcccacctacccccatgcctccttccagtgcggtaacttcagcacgggagtaagaaatctgaaatcccgaaagcttttgggtggaacccagcacgcagccactggagcggtttctgagaggtcgtccatggaggactgcatcgattgtattgacctcacggtgggtcagcttgtctcctccatcgatcaccccaacgaagtctaggacgaaaatatagactgaaggaaatcacaaccgtctttgtaaagctggtggaaagtgaccttaccgctgccagggctcaccggtgacccaaggctgtcccaccgccaggcagccagtcaggggaatgagcttctcaatccactcccttttattcgatcactgatccatttttttggtttgtgcaatttttaaaacaaaggaaccaaataagaactaagtttattcaatcaaccaacacttgatgaacccaccgcaggtgccccgaccgcacagggcatttggggtactaatgaggagaggggtttggacagactcctaaaaccctggcagggaggggtcgtcgtaaagtcttctttactgtcattctttagccaggcgaccttggacgagactccctagctttctgtcccacaaattctggtctgtaaaaagcagcagagctgctccgtcctaggctaggtgaacgcgctaaacggggaaacgatggatggggaggttccggagggttagatccctcatcatagt

SEQ ID NO: 28220 - DNA, 1040 bp, Bovine  19866881921516
  misc_feature (1)..(1): n is a, c, g, or t
ntcctgcgttagcaagtggattctttaccactgagccaccagagaagccctattctctaatataaaataaagttttcaaaaatgaaaaaagaaattaattttattcagaatatgaagacaaacttactgagcttttttccagtgatgattatagtcatgtgataatttattatatttttattattaataacctaatggtacatttttagaagttttctttggagatttcttactttaggagtaaaagacaaaaaaagccataaacttttctttttcctattttggcaaaactggttgaaatggtacatagacaaatgaacagttttagtttggtgacaaactgaaaatccatcctttgttagcaattactgtcagaatgaatattcttctaggcattgctgaggattggaatcaataaatattattaatataccaaattgaaaaaataaagaaaaataaaacagccagcctggtctggcatccatttcctagtctctcaactcaagttttcccagctccccaggcccagcgtctcacttccccaaacccaatttgcccaaacaggagtcaaattggtggaattatctattcaaattagaccaaccagttactggtcacggttgtcggtcaccctgtgaatcagggtgtctgagacaataccctgataacaagcacaaaatatggcttcccagggcatcgaagagtctaggcaagacacactcccttcaagggcaggcaggccgtgacccgcaccaccaagccaccacctccccagacacgaccctaagtctaaagcaatttgcctctgtgctcccatgagctgtggcccagccagggcctggcttccagagggcagagctctgtacaaagggataatgtgcttcatttggagaccgagccctcagccacaggcacaaatggaagcagttagttgctataatgaatttgtaatgctccttcacttgtttcctctctgtgcctgttggcccttcaaaacagtgtaatccaccaaagaacagtaacgggcttcttctagccag

SEQ ID NO: 28221 - DNA, 969 bp, Bovine  19866881931715
  misc_feature (1)..(1): n is a, c, g, or t
ncttgtaggggcctttgatgaacagatgagataatggacacgctttgaaaaagatgaaacaccaaacgaaaggttgtgctggccacggcagtgagtgcaacagattggttaaaccttggacttccttcctgtctggggcaaacactgctcccaatttctgcatctctaggacagccggcttgcacagtgagccctcctcccccgatccacccaccacccttagagagagatgcaactcactagccattagagcacattacatccatcaactgggagaatcatctcaacagtcgtgagcaagcctatgaattcacccactttacagacaaggagactgaggcacagagaattcaaacatgcccaagatcatatggctacttgggactgacccaggatttcaacctagatctattcattccaatgaagacttacaaaacgtaaggggtttatgtacaatgtcttcagttagaatgaaatataacacatcaataggagcaggaaacatggggttttgcaaaaagatgtccctcccagctcctccaaatctgcagaaaagatgactttttcccctcactgcagctggggctcttggcatgagatgtattgggcggtggtccctctgcagggagatgagagattataggatcgtgaagttggaagggaacttgatggtcatttagggacagcatcccctccactatagccgtgccaagaggctatctggccaatactcagacacttgcagagatagggaacttcttcctaaaaagtggcctatttctgttctcatgcagctcacagtcacctaagcaaattaaccgactctgttgaaatacccaatatgttctttctactacccagagatgaacgaggaagtaggtacacatgtatccacagttacgttgtgatagcaaaatatttgaaccaacctataaggcccccagtaggggagtggatgcataaaatgta

SEQ ID NO: 28222 - DNA, 1405 bp, Bovine  19866882077472
  misc_feature (1)..(1): n is a, c, g, or t
ntctcaaggaggagagattttattcattgaagaaatagctttctgttaaaactgtaaggtgctctagatctctttcagatagaaataagatttctttcataaggatattcaatgagatcacatgacgagtaggaagtaaaatgcaaagtttttataaacgagctggcgagccttgagggaactcaggaagtaaaagaatacctgctgtctagcagccatcagactgcagccactcctcagagtgagccatgaagaaattctgaatgtgaaaacacagattactggccccagatgactaaggtgcataccaaaagaatgatttcagttagcctagactcttgcactttcccatacatagaaaaacagaaaagcactaaatttcttaactttggatatctgttattttttatttttttaatatttttttaagatctcaaatcagttgtttttttttttaattaacaacaatcttttggtgatcagactacctttgtttcaaaacttctgtatctcctggcccccctcccctgcttgcctccttggatcagttctattagggttacttgagatactgcctactggcttgaagtcctaaaaattcctgccaaataaaacataactctgaacttttaagttgtgaatatattctaagtcaacagaacaaatgtatggatacaaagggggaagagggagtgggataaattgggagactgggattgacatatatgcactattgatattatgcataaaatagataactaacgagaacctactgcatagcataaagaactctgttcaatgctctgtggtgacctaaacaggagggcaatccaaaaaagaggggatatagataaacatagctgattcactttgctgtacagtggaaactgacacaacactgtaaagcgattatactccaataaaagttaataagaattacagtcatgcatctgaacctttgcattgtagaagataaatgatacaaagaattaaagaaaaatgagctgatatgaacattttgccttttagctcatcaaaagctagtagcactttttgttggtcaatatgtatctcctgaattgacaaatgggagtcgatacttacttcctattgttagtacatctattttctgtacactacacgtaagcggcttatacacacaggcaccaatacattaatagctatatcaatagaaaatcaacaataatcatttatttttaatgggcatcaccactgaaacaccaacagtgcaatatgctcaagacaaagaggaacacttagcatgatagatgtctgtggataattgatttaggttaacaacttcctctcctaatggtgctaattgcgttaatcaacagccgatttcatcagaggctttcaaaggctcatccggacttgccaattc

SEQ ID NO: 28223 - DNA, 1193 bp, Bovine  19866880473969
  misc_feature (1)..(1): n is a, c, g, or t
ngatgggtttgtgttccggatccgtgtggcctaccagcgggagccgcagatcctgaaagagacgcggagccccgaggggatgatctcgctgagggacacccccgcctccctccgcctcgagagggacacgaggcagttgcccctgctcaccagcgccttgcatgggtaggcccacctgtacaggctctcctagaccctctcccagtcccatcctgctctcctggccatctgtctggagagttaggccaattagggatatgagtgccaggctggagtcaggcaagcactagaagtgctaggattctggccctgccacttacctggctttgtcccttgagcccaaatcccccccacacacacacctgatttttctcatctgtaaaatggtaatcatgctaggaacaacctcttggggtattagttaggaagacatgagatcatacgtgtatcattatttagcacattaacacagaggccagtgttgggtgaaagttgagtgaacagttgcagtcaggctgaaagtctgtccttgggcccaggtgcctgcgcctcactgcctctaccctcttcttcccacaggctccagcagcagcacccagccttttcaggtgtggctcggctggccaagcgctgggtgcgtgcccagctcctgggtggggagctcactgatgagagcctggacctggtggctgctgcccttttcctgcaccctgagcccttcagccctcccaggtgatggcctccacgtttcccctagccaggaagttcccctggggtcagctgtattccttcctgcttcagtccacatgggagaggtggccgaaactaggggcagaaggggttctaagacacccccatccccccgcagtccagactaagggctctaggctccccagactgtggggggctgggcacatgtggctgggcccctgacactttgctcactcctccctctcagctccccccaggtgggcttccttcggttccttttcctgatatcaaccttcgattggaagaacaaccccctaattgtcaatctcaacaatgagctcactggtaagtggtacgatgaaagtcagactaccgaaagaactaccccttgtgggttgcagaggcgggcaggcaagggtttctctctgcttacccaacctggaatgtctactcctgattctggctgcctaggggtgggggaa

SEQ ID NO: 28224 - DNA, 1312 bp, Bovine  19866880586370
  misc_feature (1)..(1): n is a, c, g, or t
nccccatttaaaagcctgacgctgcagcaaagagcatactgaggtcaaggcccacatcctggcacaggggtggggacagagcctcagccctgggcacacagtctcttctctggacttctaggagcaacctgagaaggaacaaaaggcccaggccaagctgacaagtagctggatttcctgggttcattcggtgtcccctctgagctgacccccagttctcctctggtcaggtccaggggactgcacgggccaccatggcccctgtcccagtgctggggcatcagataggaaatcaggacggggatttgttggggacagtcagcatgctcgggccagcaagccctctttggagggtctatccacagtgagggtggtcatgccactgacatcttgctccaaaggtctgtccatctagcttgctcctaggctggaggtcacacggtccacctctcacttcgggcctccacagcctggaccaggccttcgcccaggatggcaaagtcctccaggatggcttcgacattgggcaccatcactggctccccgccttgagacaccactatgcgtccctttgtgttggagacctgggagagccagagacatatggattaaagtgtcatgagagacatacgcagagacaccaagacagacacacttcacacctgacacagggtcacttgtggagccacacgcaggcacacacgcccacacggaacacacgtgcacactcacgaacagacaactgtcaccagccagctcaccttgaagggctggggctggaagctggtgggcttccagaggacaccgatcacctctccgccatgctggtcatagaagaaaagagccaggtgtccgaaggcctcctaggaaagggcaggacaggaaaaagactacaggtgggaacctgatagccaacgccacggccccaactcacctggaagcctcctcccaagggccagccagccctcaaggacctaccctgagctgtgccaggtagagctgaggcggatcatagcccagcacgggcataaagggaggagggccctggctcactgagcaggccccggcagaaggaggcagctggtgagtccacggcctggcggtgccgggggatgtggcggggagccaggcggatcagcacgtcgtacatgtccaatggtggccggaacacggtctgaagaagggcagggagggctcagcagtgcccactggggagctggaaactggaccacaaacccctccacaggcccactctgcttccttctttccccttaggtctgaccccccattagggcccaaatgctcatttcaa

SEQ ID NO: 28225 - DNA, 1305 bp, Bovine  19866880587794
  misc_feature (1)..(1): n is a, c, g, or t
nctttcttcttagtgtgagacattccaagagaccccaggacatctgcaatttacgcaaaagaatttctgaattgatataaaagttctaaccaggaaccatatggatgctagtacttgggattacaatgatgatgctataaagtcttggaaagttagattcttgatagagttaagctatgaaatcaacacagagtgggagaggttaaccagtacagaaagtaggagttgaaaacaataaagtataaattataggtggaaggttttaaagtaaattgcagtgtatagtttacagatacattagcatgtttatactttgatgaatagaacagaacttctctattggtgtgccaattataggtgtgactctacgaatttaaaaatattatcattataaacaatcagaaattacatcgctatttcaccatgaaacctaatgtcaggtaatatgtcagaaacacggtcaagtttctcataaaagtaaaaacaaattttatttggatatttagccaaaatcaatactattttctcaagtagtctatttaaaattattactgcatgtaattacaaagaaaatattttttttccaccaagttcctcgtagaacttaagatgaccccaatatgctctgcatacataattttatctttatgccacgacatcaataaattggaaagcagtggagttattaacttacctaaaaagagaatacaaaatatcattagaagtattcattacttatttctaataaaatatcattagaaaatattcaggaagtgtttaggttggattccctcagaggcagacactgaggcaaggattttcgtgcagtttgttttggagatgatcccaggaagcgccagtaggggagtggagccctgagacagggctgggagggcagcaggacaggttaaggtgcagctcacccctctagacaactagggcgggagagcctcctggagtcaagtagtatatgcttcagagttgtttcaccccacaggtgtggaaacaagttacgcttccacctctttacatcattcttactactattcccaggggtgtaaattccctcccttccagcctgtgtgcagttcagagaaggctctcaggccagaggaagccagcaggcagtcgcaggtatgcacagtgacaaaattttagatatgttaaagatgcaactacatttatggctcactaggttttgatgcttagagaagaatatgtcttgtccagttgatgctgcttccaaaataactcttaaatcatcccacttctatattcttgtccaggctgccatcctcctttgtg

SEQ ID NO: 28226 - DNA, 3576 bp, Bovine  19866880593337
  misc_feature (1)..(1): n is a, c, g, or t
ntgtcttgcattcaaattggattgaattactctaattgatcattcaacatatattgtgcaaaaatgtccagcctattaggtctagccctttctctatagcatattactggcccaggaaatgcacggcttaagggtattttcaaggactccagaaccaaagatttatcacaaacacatatatagaaaaataatagcaaataagcccgtggtattatctaatgtgtgtgctgcgtgtgtgctgggcttcccaggtggcgctagtgataaagaacccgcctgccaaggcaggagacggttggatccctgggtagggaagatcccctggagaagggcatggcaacccactccagattatctaatacagtagccctaaaagtgtaataattggatcaatagcagtagcctcaaaacacttaggaacttattagaaatgcaaattcagttctcacactagggttactgacttagaaaactgctggcagggcccagcaatatgtttaacaaatccagcaggttttcctaataggtgcttaaatttgaaattcactgatggatggcgaaagcatcaaaccatcagttcagtggctcagttgtgtccaactctttgagaccccgtggactgcagcatgccataacccacaataaatgttttgttagtatgctcagggctttggggttttttcttttataaaaattttttcgatttttacttgtggcaaaatacaaataacataaaactcaccattaaccacttttaagtagtgtacagttcagtagtgttaagaatattcttaatctgaccctcgtggtccagtgaataagactctgagcttgcaatgcagggaactcaagttgggaaactaagattccacgagttgcatggtgcagccaaaaaaaaaattttttaaagaacattcacattgtaatgaaatctatttctagaactttttaatcttgcaaaaccggaattcaaacaactccctagttactcctactcccacccctggaagccaccattctgctttcagtttccatgagtctgactactccacatacctcatataagtgaaatcatacagtatttgtctttttgtgactggcttacttcttagcacaatgttctcaaagttaattcacttgtgtcaaaacttcatttcaaggctaaaaaccattccgttgcatgcatacactacactattcctctgcttccaccttttggctattaggaataatgctgctatgaatatcgttatacaaatatctctttgagatcttgcctttagatcttttggctatatacccaaaagtgggattgcagactcacaattctgtttttaatattttaaggaaccacctgttttccatagtggctgcaccattttacattcccaccaacagagcacaaggtttccaatttctccacattcttgccaatgcttgtattttctgatttgggttttttggatgtgaggggaggtaataactcactgtggctttcattttgcatttctctaatgatcagtgatgttgagcaactttccatatgtttcttggccatttgtatatcttctttggagaaatgtctgttgaagtcttttgcccaatttttaatcatgttattttgttgttgttgcactgtagaagttcttttaatcttctggatgttaaccccttatcagatatatgacttagagagatattttcccatttcataggttgccttttcactcttatcaactgtgccctgcacagaagtttttcattttgatgtagtccaatgtatctatttttactcttgccatctgtgcttttggaattatagcaaagaaattattggaaactttccccctgtgtattacagttttaggtcttacatttaggtctttgatccgctttgagttcattttttaaattaatttatttttaattgggggataattgctttacaatgttgggttggtttctgccatacatcaaaatgcatcaactctgggtatacatatgtcccccctcttctgaacctctctcccacctcccatcccatcccacccttctaggttgtcacagggcacaaggttgagccccctgtgtcatacagcaaattcccactggctatccattttacacatggtcctggatgtatgtttcaatgctactctctcaattcgccccaccctctccgtccacaaatcttgtggacgtgtgtccacaagtctgttctctatgtctgcatctctctttctgccctgcaaacaggttcatcagtaccatttttatagattccatgtatattcagtaatatataatatttgtttttctgacttacttcactgtataacaagctctaggttcatccacctcactagaactgactcaactttgttccttttatgattaatattccattgcatacgtgtgccacttcttctttatccattcatctgtggttggagatctaggttgtttccatgtcctggctattgtaaatagtgctacaatgaacactggagtacatgtgtcttttagaatgattttctcagggtatacactcagcagtggggttgcattcattttttatatggtgtaaagtaagcatctaatgtcacccttttgcatttggatatccagttttcccagcaccatttattgaaaacactgtcttttctccactaaatggttttggaatatctgttaaaaatcgtttgaccatgcatgtaatggtttatttctgggttttctattgtattccattgatccagtaccaccctgtcttgattactgtagctttgtaataactttttaaatcagggggtgtaagactttcaactttctttcccccaatcccaaggttgttttagctatttcgcttggcggaggtaacttttttaaattccaacagttagacattagaagaccttgaatgaaaatcaggattcttggtctcttaggaaaaaaaaatcaagaaatgcagcaaatttgggcaacaaataactggaattgtgagtagctgcaaagtgctctcaagttaccattgtctccacccactcatttctgtaacctgtctgaccccctgaaggcccctctttctttcagactttgagactcctggcctaagggaaaggcagttgtagccagaggacttaactgcggaggctgcagtgatctaattcagagattttctcaaaaggaaaaatacagagttcttagaggaaatatagctatgaaagtatgtttgttcgatgcaggagagaaggtatggtaggagggactatagaggagtgtcaggaatgtaatcttgcctgaaaaattccatggacataagagcctggcgggctgttacaatccaaagggtcacaaaaagttggacacaactgagtgactgaactcacacacaggaaagacctatctaaggaaaggacaattaaatcgagtccagaaggatgaaaatgaaacagacaagagaagacgtggtagaagaatactataagctagaatcccagggacgggggagcctggtgggcctgccgtctctgggggttgcacagagccggacacgactgaagcgacttagcagca

SEQ ID NO: 28227 - DNA, 770 bp, Bovine  19866881112852
  misc_feature (1)..(1): n is a, c, g, or t
nagcacaggctggagtagagccagaattctgagtcattgatactatttgttaaatacagcccacggtctggatagcagctgacctgcaaattgattctgaggatattggccataaattaggagctagcttaataggtaagcttcagaattaaaggaaagaatgtcagagtaattagtgtagtttatatgagactaaagttgtgtgaagatgcatggggttttcttctgaatgaaatcatataatacataggatagtaaagatatgttgaatgtcaggtacaggaccactttatgctttgtagataccagcttgaaggctgtgagatactttgatttaggaatcataaatttagtaatgccttggagatgctctttgtgaccaagacttacaaacaggatggggatacacgaactagacatgactcctgtcagtttgcttttctcccagcaatctctttctctctgtgctttttagcttctcattcactctgtgacctcactccctcgaatagtggaccccatggcagtgagtgtacttttgaaagttttgtgtaaattaaatttttgcaaataaaagtcttattctaaaattgctggaggagctcatctgttaaacagtttatttaacaaagtgaaagatctcttgaataatcacctcattgttcagccagatttttcctgaaatgtcttttttttttttttaaactttacataattgtattagttttgccaaatatcaaaatgaatctgccacaggtatacatgtgttc

SEQ ID NO: 28228 - DNA, 714 bp, Bovine  19866881163628
  misc_feature (1)..(1): n is a, c, g, or t
ngtactttctgaactaaaagaccatctcaagcttggcagacagaagtccacctttctctttgttaacctgaagttccttgtaaccaacgacccccaactaggatgtgtgccaagatgccactgcagacagttctagacggattagcagcaccaggaccacagccaacaccccacccggagccaggactacgtaccttggccttgcaggtggtcactgggcagggcaagctgaggtggcagggtgccatacacgggtggccacagttggctctggaggtggtgcagggctgcttgcagatctcgtcccccagacattctcctttgtgacagagcctctgacacttgtgcatcccacatggtagcgtggcaccacagggtaatccacaagagatatcaaccaggtgacagggaatgttgcttcgtaactaggagagaagtagccgggttctcatctccattcaggatctggggtgggttttaacttcctacttaaacatttctgaacgttcacaatcagtatatttaaaaaaaaattttttttttaaaaatcaggctgattttcgaagtctgaaaggttagtttgaaaagaaaacaaacctgagctttatttaacaatgcttgttacagtttgaaaggatttgttttagtagccgagtgtgacttgcaacaaacaaaggtgagtaacaggcatggaaaccagataactagggagta

SEQ ID NO: 28229 - DNA, 1372 bp, Bovine  19866880116733
  misc_feature (1)..(1): n is a, c, g, or t
ntcttgggctggatggccagagaagacttgacatttacatgatgcagcttcctaaagtcatgagaaaggttttggacctctactgagatgaaaactgagaaggatagaaggtccccaaaagcaaacaaacaaaaaagtagactatcatctaagggataggcaacagcctgggaaagtaatataccacctgcaactacagaaaagggaggatagaagatggatagacattcaaaagggatgttacataagagattctaactttgggtgagtggctggatcaaatgacatctctttcaattcttagatattatggtactacatttccaatatttccctaaatctctactacaatgatgattgttatgaatatgactgatcttgggaaagttacatgtgggtttagttgctaagtcatgtccaacccttgcaacctcatggactgtagcctgcgaggctcctctgtccatgagattttccaggcaagaatagtggagtgggttgccatttccttctccaggggatcctcccatcccaagttgaaccctggtctcctgcattgcaggcagattctttactgactgaagtactagggaagaaagttatatatgtcaaagcattttctaagtaaatgcattgttcattttgaccagtataaagttttgttttaggcactcccaatagcagtaccttgccttgcatttagtaaatattatatttcctctttattttgaaaaatgaaacacctgtaattattcaagaaatttaattattcaacaattagagagtgggtaatcacaatgttaacaaactcccccacaatttgctaacagtaataatgactgacattattgagtgcttactgccttccagatactattgcgtatacctaataagactgttttctataatactcatgaagatgtataagtggatagtattttatttctactttacaaaggaagaaattgaagtccagaaatgttgatataacttgctcatatcacacatttttagtgatagaatctggattctaattcaaccaatttgactgctagcccatgctctaaattatgtgcccccctattgctatgacatatctatacccgtcctaaacttatttgtatggatttcaatacatatacaccactttacagattcttaagaaaggaagttaatgttaaatatggaatctcttattgattttctcttaaaatgttatgatggtagcaatgatctttattttacctttccagcacgcagaagttcttgcttatccttgttggcaaatccagtcattgctgctgtttcaatcattcctgtgagagcaagtactggagcaatactcaaaatcagcagtgtcatctcccatccg

SEQ ID NO: 28230 - DNA, 2222 bp, Bovine  19866880140920
  misc_feature (1)..(1): n is a, c, g, or t
nggaacacaatgtatacctgtggcagattcattttggtatttggcaaaactaatacaattatgtaaagtttaaaaataaaataaaatttaaaaaaataaatgaatcaaaaatctttgatttttttcctttttgcattattagagtaaccctcaaaactatacaattaataattccagtcaaataggcaacgtgtccttttcttactggctttttaatctgtcattttaccaaacaccaaaacttagaatatggaccagtaagaatatggtccttctttggttgcatgtatagatttggacaaatcatcaaatgttttatttttcagatttaaagtgaccatattagtattaaaaaataaaggttattttctaagtctctcttattagtcctttctcccttgtgaaaagtgaacccaagattttgtgttcatttctctttattttcctcaagatttcagcattcttatccattatcttatccacaaaatattacaaatggaggtttctttgagtcctgaccatggtccagatatccagttctctcccataacccaagtccccttcaaataaccttgagtgtctacctaggtcttcatctgttccacagtccactctgccagtctggaaacagactgtgaaagcaggaaatttctctttcagatcaacatgtgttctcatgtccaaattattctaagccaaaagtctcctccattttcgatacctcttctttttgaaaactatgtaactatgaagaagcattaatataattaaactaaatatcatttttaagggatatctctggcaatccagtagttaaaaacccatgcttcactgcagggagcacagcttcgatccctagttggagaaccaagatcctatgtgttgtgtggtgcagcaaataattgaataaataaatatccttttaaggttaaagaaatcaaaatttaaaatagccataaaatatcttatacagaattgaaaagccacactctatgttactttatggcagtgttcctaagttgcaaacaggttgctgtttgcatttctgtgctagaatgaaataattatttatttgattctctctgctgtctttttcttgaattagctcataattcataagacagctcctttgcatagttacatatggatataatgttgactaacatttgatccctctgcttatggaactagtttaaatagaaattcaatgaagacttgaaggctaaatttagatcagtggactaaatcttttccaaaggaattttccttgagtgtattatcctgatatattactttcttatcttattttgtccatgggattgcaaaaagagtcagacacaacttagcaactaaacaacaacaatcttattttggggaaaggaaaaaagaagctaagaaaactcatcagaaaaacttattgacttgatgtacttaacatgtcttcgatgtgactgtaattcacaatcagaagtttaaccactactaattttatttctcttttattatcttgttttataagatagcaactgaagctgtggagaatatacgtactataatgtcattaacaagagaaaaagcctttgagcaaatgtatgaggagacgcttcagactcagcacaggtgattgtagattcatactgactgtattaactatagtttattcctataaaggcagtactcccgggtgactgcagtggtttgcctgccaattcatttgctctggaatcattcctaataatggcatatcagactttctcacataagtccaccaagaggagactagaaagaggagttgagagtaagcacatttagaacatatgttttaggtcctctcacattgccatgaactataactgggtgagcattttattatttccatgaaacaaggttgaggaaataataatatctaagaaagaaaataatattgcttagccctttatattgaatctctaaaatagttcacattttaaaacaaatatatacgcatcaaatgcgatcacttcttttaattttaaactagccctccttactttatcagaaagacagctttgtattctttcacactcatgcttctttggttagtaatgccctttaatttccaccatttgttctcttagtgcaagattaggatagaaaatatttttaagccaaatctctttaactctttcattaagtctgctttaacagaccttgcccattcatttaaaaatacatgggagtca

SEQ ID NO: 28231 - DNA, 4046 bp, Bovine  19866880372343
  misc_feature (1)..(1): n is a, c, g, or t
ngtttgccttggaaacgaaagagatcttctgtcgtttttgagattgcatccaagtactgcatttcagactcttttgttgaccctgatggccactccatttcttctaagggattcctgcccacagtagtagatataatggtcatctgagttaaattcacccattccagtccattttagtttgctgattcctagaatgtcaacattcactcttgccatctcttgtttgaccacttccaatttgccttgattcatggacctgacattccaggttcctatgcaatattgctgtttacagcatcggatcttgcttctgtcaccagtcacatccacagctgggtattgttttttctttggctccatcccttcattctttctggagttatttctccactgatctccagtagcatattgggcccctactgacctggggagttcctctttcagtagcctatcattttgccttttcatactgttcatggggttctcaaggcaagaatactgaagtggtttgccattcccttctccagtggatcacattctgtcaggaaacttttcaggttgatgcaaatgttcattatcttgattatggcaatggcttcacaagtatgtacataggtcaaatcttattaaattgtttgcttgaaataattactgtatatttttaaattatgtattaataaaattattttagactttaaatccccaaaaggtaaagcaaatgttagaacaattaagaatgttgcccagtggtggcagttggctctagtttggtctagatataattgccttcctcatttcatttttgtttagtacctctggaattgggagactggaaataagaagaaaattcaagattgccttataagagagatttggaaaattacagcaaaaatgaaaagcaaacaaacaaaaacaacaaccaaaaaccctctctttccttgcttttcagaaaaaataaaatgtataagaattccaagagtttagagagatgaggaacaatctatccgataatttgcacatttgtgaatttgcttttttcatcatgtaaaagcagatgaaacaaacatttttagcttattagatggtgtgctgggggtaataataatagttcctgccttttaatgtttatcatcagcctaaagagtggcaagcataggcagaaggagttccatcttaaagaggactataaggaatattgaaaccagagagccacagggtttgacacactcaggaagcacagcaacagtggggatcaggctgattgctcccagttctggcagctgtgtcaccttggcatagattcctcgagtaatgtgggcaccgtatcaactgtctctacacctcattttttttcagccttgttgtttatttctgtgcttagtcgctcagtcatgtccgactctttgtgaccccatggactatagcccatgaggctcctcctcccatggggttctccaggcaagaatactggagtgggttgccatttctttctccagaggatcttcccaacccagggatcaaaacccaggtctcctgcatcacaggctcattctttaccagctgagctaccatttctcgttcattagtcacaggaatattgtacaaatcgagaagcttcagccttcttaaaaagatataaacaaatccaaaaataactgtgaggttctaagaagtccatactttccttttacatttgaaaaataatgaaaacaagctcattatttaagagcagatagcaaaacatatttgtggtttggtttcaggtcctcatagaaaatgcaagtaaggaacctgttatataaacaaataaaaatgagcaatagtttttcaccagttaaaccagagtttagaatacatctcttaattgttttaacctggaagaactatattttggggacaaactgcaagtttcaaaaagtgggaaaggtcttctaggaattatttctatttgagaagaagtaagttcagggtcaaatagcctctcaacatgcattgctgagtgctagagtgatgatagctgacatttgtgtgcatgtgtgctaagtcacgtcagtcatgtctgactctttgcaactctgtggacgggtagcccaccaggttcctctgtccgtggggttatccaggcaagaatactggagtgggttgctgtgtcctcctccagctgacatttactgcaggcctatgttgcaccaggtagtttgtttaatctaatttaatccttgtaactgcactacaagttagatactgttattatctctgttttagaaagcaggaatggaagtgtaggtagtttactgacctgctaagaccacagagctagtgaagacatagacagcatttaactccagatctgcctggttctggatcctctgctcttaaacatagaaggctcagctcctcaaccctatgactttcaactccaaaggtaaaacaattctgttttgctatgggccaagttccaagtgcctcacaaaatctctgtcaccttatcttctatttccctagctcttatctttcctctcaccaaataccattatttgcatgtgtattttgaatgtggtaaccagatacatttagaaaaaaatctttgtctggaagtggtgacaggacacagtgtaagtacagtgggcagcactctgttcccaactcaccacaaagaacatacgaactctttgtgcctgacactttacacaatatgctccttggctttaggaaaacattatttcatgttcttactctaatcagtcttgtctgccagtctggagaactgagaggttcattgttatatgcagctgtcatttgttccatctcccggctctctctgccttcaatatctttgtggtatttagtgaaagtaattttcagttggaaatcttctgccctttcagtaagtgcaagtatagcacttcatcaatggccaaagaattctgagctatctgggatgtatcaggacagttgataaaacctcacggagcaacctatgatagtacatcccatcataaattaaaaaaaaaaaaaaggcagaaagggcctttgtcagtgtttatctgaagcgcttttattctttgcccttgatttcctcttcagaaaattgatgcgcccttaaattgaagcaagaggcttgacaggtgatggttagtgtgataactgctcagatttcatcagccagtgtttttctggtggtgcaattgtcagaactttcagccagattacctgtcatccactacatcagataaaagaggcagagttgaaagatgtagttttgccactgtaccttataggaaatgaaaagtgcaggtgtggtagcagtagcgagaaagaagcacaattattttctaatcaggctgtttctttgagaaatttggtgcctaaatttgcaaccattgggcaaaaccattgctgcatttgcattgttaaatttacagagaagaaatgaaaagaactgtcatattgtaggtagtgctataagctatcttctctatccattttatttgttccacaaaatgaagtagtcatagtttatttttagatacaagaaaaatgttcctattttggatgcatctcagtatactgatgtggagcctgtattttgatctgctgttaagctgtttgaaactgtgaaaggagacattattctacacaaagttttacgggaaaactttgcaactagaaagattggaagaattgtgccatatagtcagaataattttgtgacaggtttttttttttttttttttccagattttaaaagccacataggttgataaatcaaaataggacagattctggataaatgtatttttgtgagattatattgtgtactgttttctgaacagttgattatacagaatgaactaatctcatccctttaaatctgtcacttcttaagaagaaaaacaggtatttgaatacagttgtctcatgacaaatggaaatctttttacctggaaagtaaaaggggcaccttgtttcctgataggatgagagagaggtatatactgtattcttaccccattaaatctccactgctaagtcacttcagtcag

SEQ ID NO: 28232 - DNA, 1600 bp, Bovine  19866880392753
  misc_feature (1)..(1): n is a, c, g, or t
ncgcaaagagtaagtaaagacaacattaacaggccatgtataccaatgagataaatcattaagaacaatacaggcagtcttttattcataaacaaggaatttatcaaaagcccagactttaaaggtagctgcttttatcagacagttaagctattactctaaaggtcgggaagtaatggctaagtgggaagtgtaggaaaatttatttaggaggctgccttgatggtagcactccctgaaaattaaattgtaggcaagttttcacaaagtgccctacttgcccctccactttactttgttttataaagctaattagatattcattttggttaatttttaaaaatataattacctctgtgacttttaagggaggcattcatatacaaatgcaaatttgtcaaaacatattacctccatcctaatccaaagactttccatttcaacaaagtttgaaacttcagtttttggagactattagagcctcacgaagagttgactcattggaagagacactgatgctgggagggattgggagcaggaggaaaaggggacgacagaagatgagatggctggatggcatcaccgactcgatggacgtgagtttgagtgaactccgggagttggttttggacagggaggcctggcgtgctgcagttcatggggtcgcaaagagtcggacacgactgagcgactgaactgaactgaactgaactgagagcctcactgaagatatcctagaaaatacaagaaattgtgaagaagcagagaaaacaaataccttaaacccacttctgagatacattatgtcttataatttttttctttgtgatttttatatgagtataatttactttttcctcattaatatcaaaattaattttcctcactattaaaagttatctgcaaatgcaattttcagtggttatggaccccatattatcaaaattttactacttccctaatactgggcatctggttgttcccaaatgattgaacatccttatgtatgactttttgttctaatttctgattatttccttaggatactaaaagaggagagaatttttgggataagaacattttaatgactctagataaggatgaccagattactgtccctgaagtatatagcagtttatacttcaggaaacagcagttgaaagaactggccttaagtgcactgaattctttgttcatttaataagaaagaaatgactctcattattgctttaagtcatatatttcagattcctaaacttttcttcaccatgtgtgtttgctggttttattctctcttttgtaaattgtccttccatggctatgccctttcctgaatgatcgtccacgtggttgcaaaatcaagcagatgatctgggccagagaagaacactggagaaacagtgttggctctggaagcagaaactccttttcagtctttgcaccatacagttcccttaaggtgaaacctgcagatcggtttccttttgttggtaccagcttaattgcggtaagtgggcagagtggaacataaatacatgctatcattttacaaaagaattttggggaaacaaccagttgtatttcccaactaagtgtgaac

SEQ ID NO: 28233 - DNA, 1290 bp, Bovine  19866880475838
  misc_feature (1)..(1): n is a, c, g, or t
nagaaatgtgcaaaggatttcaaaactactttaaaaaataaaatcttgtttcaaaataaagattttaggagaatgcctctgtaagagcaaactattgcattttaagtgtttttttgttagcaagccctaatatagcaactcagcggtaattgctattttataacctcctgaatattgaactatttattatgcaaattaatactctttggagtaagcacccgcctagccaaggagttcttttttgtttacatattttacttctgcagcttttgccagtcagtgtaaagaggcatcttgatatttactaattccaggcataaacagatttctgcccgacatgtggcagctacacttcatgtctttgtttttaattaaagaaacacatatggcagatttgcaaaatttgaggaaaacatttttttggtaacagctaggagttctctttggcagaattttattgtcatcatgtcatcgtgactacagaatcctgggaccagtctgagtccataatccccagcagactgtgggggagggggtggtaagaagaggtatcaggttgaatttcatataattgtcattttgggggtcaaaatggttgaatattgcaacttcatgtggttcaacaaaataattgctgcatataagctcttttctcaaaggaagctctacagcatagaccccctcaggaacatgctatagagatattccccaggaactatttcctgaatttgataaagcttcataatacaatacttactagtttcaatatatcctaccaagtcattttgtgcagcacagacttggtgggcatgtgttttgctattcagatggatatttgctcaatccaccacagcccttcttctcttgggagcaacaagccccattccagtcctagaagcatcaacaaggaaaaggggatgcccatgttgggctgaagtgtgaggcaggcaacaggagagaatggtctgaatacacaaaaatatgttgaccatcttgaaaactgcttcatgatcactggcccccaaacagttctaccttgcatttgcatgaatatacccataagagaagcagaatgtattattattcccattttatagattaggaaactaaagctccaatatatgaagcaactagctcagggtcaccagtgaggaaatgacatatctagatcagaactctgttctggttcatagtctattttcttgagagataatatttgaacattcaggatactgagcagaatgtccctgtaacttcttcctcttcttagtgccctacacacatgctaat

SEQ ID NO: 28234 - DNA, 2479 bp, Bovine  19866880539700
  misc_feature (1)..(1): n is a, c, g, or t
naaatataggtaagggcatacagaaatggtagagatctgtcctgggtccattgaaagaacagaggaatctcatccatcttaatctggaagacaccaagaaataatgatttgaccatttaaagacatatcctctttctctgttatcacactttttactatatttttcaagtatcagattatgtcctagagaccactacaattaaaagcatacatctttttcaaagcaatttaaatagtgaaggttgggtaaaatttagatccactttatgttatttaaactccagtgacaacatctacattttatagcctagtaagctttcacaagctgtgcctagatatatataaagataaataaataacagaattaatagtatttcaaagatctccattatttggccataaattaatactagtcattaatacttgtctacaaactgtgaatatatattttaattatatctcattatggcaaacacctataaaatatagcttcctgatcttttccttcagggtaaagaatctccatattacaaagaggttcatttcctacatatttgcatatgtttttgtgcactgaatgtggaaactttcattcaattttaaatgtttcccttggacaatgatcaatttttttgtgagtggcattttatcttttaatttattttaactgtctgaaacagaccagctgcagagtggaaagtgtgttgacatttatctgaagtcttatctttattaaatcacttgtattattatactacataaacaacttaataaacacaacaaatacttatctaactggactcagtaattctattgaaccagccaatttacttttaattttctgaaaaagataaaacctcctgtatcagttgagtcaccagggaaattaagtcttcagttatcaaatctgttaccaaatctgaagtaccaccccaagagtacctagagggctttgattctttctttcctattgacacccaatggaacttctagtgacctttctcctcattccagtttacaaatgtaaacagttaaggaagttttctttttctaccttcccctaataccccagtaacattcagttgccctttgccatactagccattaacaagagattattgagttttcttcaaatattcacattcaaatttgtattaaaagaataatgagacagggtctgcacaaaaagaagtcaaatggaaggatttaaatctgtgctgtcaaatatggtagctattggctgcaataaaatttaagttaatttaagatttagattaattaaaattacacacatttaaaattctgcttgtatgtaaccctagccacatctcaaattctcagtagccatatgtggctagtgggtccctgattagacatcatagagacagaacattttcatcattgcaggacgttctataagacaatactaacctaaataacacagaaaattactacttagtctagtctaaacagctccatttttttaattgtaagggtattatttccaattgtattttaaagtaactttattgtatttttttaagtaaaaaagtatgctgaagcatcctttgtttctttcctcaacacaattcccttcatctccaaagggaaccacaatccttaagttaatgagcatattttccacatgctttttaaatatgtttttcctaaattagaatatagcagcattttataattttatattaataacaacaaatatttcattcaaaattttaattaaaaatacgtttgcatgttaatagcttgtttggtattccttggcagttaagtctcagataactttttatgccattgaatgaatatgccctattattcagtcatatttcaccttttatgtattttaaaaatatttctcttctcagaaataaccaccaattaggtgatcagtatagaaaaaaataatggaataaaaattaccatttcatttgacacgtatattctactctcttattcctcagagtcaaataaatcccctctaccaaataaaggactgggttgctgctgctgctaagtcacttcagtcgtgtctgactctgtgtgaccccatagacggcagcccaccaggctcccccgttcctgggattctccaggcaagaacactggagtgggttgccatttccttctccagtgcataaaagtgaaaagtgaaactgaagttgctcagttgtgtccgattcagtgaccccatggactgtggcccaccaggctcctccatccatgggattttccaggcaagagtaaaggcctgggtagtcaggggctattaaacataaaagcttctgtgcttctcttacctaaatactgtttatttaaaagaaagaaaacaactgcagagattaaagtataagataattaaatgaaaagcaagaactgacaatattatcttttcattgttttaaatactttttacacttatttttgacctgttagaggacaggaatataggcttaaggaaaaa

SEQ ID NO: 28235 - DNA, 859 bp, Bovine  19866880562834
  misc_feature (1)..(1): n is a, c, g, or t
nacagcatacctctagctgatactcccttacacaactgagggtttgccttcacctaataatgatctagtctctcttgataatccttcatattcatttccactgataggacaaagcaaagccaggacatcaccccaggagtcttattaccactctttatgggtttctttgttttatatccaggttatcatctctgttggacaaattgttcttcaataacctgctcagtcagaaggctgaagtaacttaatttgttaataacaaaaatcttcctctttctcttcctctgaatttgtaggggtccccattcttatgacataaacctactcaccatcacaaatgccttttaacattttgagctatagcatttgccttcaaataagcttttttaatcaggtcagaagacattatgcatcacacatatagctgaaaaataacattcaccagcttcacgaaggcttggctatcacattataaattcctgcagtagaggaggatggtaatagtaatgtcaagtcccacccattctttaccatctagagaacacttcatgtttcttgcttgcttataatgatatttttaattgttgtgtcactcaaatatagcagttattgatttggtataaaaatacttcattattctggaataccttttctatttcagaagcatccacaaagattgctaatttttctcttgagaaatagaatgaaatttcaatagagatattatttgacacaggtatgttattcctcctttatagttttccataaaaaaacaacagagaatcatgccctttttcatccaacacagttctgataggtagaaggaaagtattgctcatcattaagaattcatctatca

SEQ ID NO: 28236 - DNA, 1161 bp, Bovine  19866880581171
  misc_feature (1)..(1): n is a, c, g, or t
naagtcgtgatccttcttcagtatctgccctagtacccaaaaagttcatcttcctacagtgaaatattcctcacgtcactctgctcaaaaacttttagaggtatattcagaaagaagaataaattcctcctctttgttatttgtcatttctggttctatacaattgtctcctccactgccagctcccactcttccccaaattaatctttcgcttcacccgaactcagtatttgtcaccacctcctcgcttgtgctcagtaggcatgagcttgctctcttcctgccttggccagctcttactaatcattagaacatcaccctagtcccacatctgtggaaacttatattttacatttatttctcttagagcttatatctcccgttacctataccctttatatttgctaagtcgcttcagtcgtgtccgactctgtgcaacctcatagacggcagcccaccaggctccccggtccctgggattctccaggcaagagtactggagttgggtgccattgccttctccgctttctatttgcaactactcacaaatgaatgcacactcttgtgttattctgtaactgttcacataggtctgtcttgtctcttccaagaaaaacacaagttccttgtcagaaaccttgcctttaatctcttgaacattaacctgctctggcaattccatttcttaagcaacaatgccatctagtggttggaagtttgcatggcttcggctgactttaatagttacatttataagaaggatatagattaagtaatgaactcaaatgattcccatcaattacgcttgctcatgaaggaacttaaaatgcagatttatgtgctctcctttcccagtactttccccatcctcctgtggtccagtggcccacaaactgctggtaaggggtctctgcgtgtgctccctgcaaaccacaacatccctttcccgtaggaagatcactagacgcttttatggtgattatgcgatttttaattctgtgcttcctgttgatatagaggtttatgtgcataaatatttattttggaaataaaatatgtacttgaggaagaaacttgagatgataaatatgatagccagagtagaaactcatttcaaagccaaatgggagaggcagtgtggtgtagaggaaagcttgtgta

SEQ ID NO: 28237 - DNA, 1706 bp, Bovine  19866880586677
  misc_feature (1)..(1): n is a, c, g, or t
natttgtgaattttctaattttgcttccgcagttgatttctagcttcatcctgttgtggtctgagaagatgttttgtaaagtgtgtatcttttaaaatctattgagacttaattgtggcctaagatatggtctgtcatgagaagtgtgtcacattctcctgagaagaacatacatgctgtttaatagagtattctgtatatgtatgttgggtagagttggtttattgtgttaaattttctaattcttctgtttcatctagttgttatacactttattgagagtggtgattgaagtgttcatctattattgtaaaactgtctatttctctttttaattccatcaaattttgcttcatatattttgatagtgtcattaggtgcataaatgtttataatttaacagtcataacctatggtactgaacattttattaacataaatatgttttctttcttataaacttttttggtttaaagtctattttgtctgatattactgacagctcctttttggttactatttgcatggaatatcattttccatcctttcactttcaatgtatttttgtctttggatctaaaatgagtctctggtagacagtatatagtcagatcatatgtttttcggtattctgccaattttgtcttttcattggagagtttaacacctatttacgtttaaagcaattagtgacagggaagcacttacccctgtcattgtgctgtttgttctctgtatactttatagcttttttttttttctttttgtccctcatttcctgcattactgtcttcttttgtgtttggttgattttttttattgtgaaatatttaaattcctttcttatttccttttgcgtatattctgtagctattttctttgtggttaccatgggaatacatttaacattctaagtttataacactctaatttgaatttataccagcttgacttcaacaacatacaaaattctgctcttttacagctttgtcaccacccctttttgttgctgatgtcacaaaattatatcttatatgctctgtgtgccccaaaacatgaactaataattcttttaaatgcattagtcttttgaattatgcagaaagcacatttacagttacaaactacattcttttaaaaatgtattagtcacttatatcatgttaaaagcataaaattacaaaccactgctacaataatactagctttaataagtgcctctttacctttattgagatgcttatttctccatacagcttcaagctactgtgtagtgttcttgcatttcaccctgcaacacttctttgttcatttcttacagagcatctagtggtaatgaacttccttagcttttgtttatctagaatatcataacttctccttcatttcaaaggacagtttcaccaggtatagaattcttgaagtgaaagttgctcagttgtgtccaactcttttcaacctcatggactatacagttcatggaattctccagaccagaatactggagtgggtagcctttcccttctccaggggatcttcccaacccaaggattgaacctaggcctcccacattgcaggtggattctttaccagctgagctaccactcagttgacaaattaaaaaaaaaatcacttcagctatatgggccccctgactcctgagctccaaagtttctgataagaaatatgagaatttactgagggat

SEQ ID NO: 28238 - DNA, 2303 bp, Bovine  19866880669522
  misc_feature (1)..(1): n is a, c, g, or t
ntggaagagcagttgacataatggctcactatggtcaaagaactgagcgtgtgataaatcccctatttcaagcctttagcaattttgtaaagactctctctacatcaagcttagtagcaatgattatgtgtagtggttaattataagcttttggggccacaagagtcatcatactaattgaaaactaaagagtagggtagagatgagggaaaaatgctttaaaggaaatatatacctgctaaatatgaacttaaagaaatgctgattagattccagacactagggagaaaaataaaaacatagattatctgagacaagcagttctcaatcaggggttatgttgcaccccagaagacatgcagcaaattctggaggtatttttggttgtcacaaccacaggagtagagtgtgtattatagcatctcacaggtaggggtcaaggatactgctaaacatcatacacatgacaactgctcacaacaaaggactatttaacctaaagtctatcaatagtgccaaagactgagaaatcttaatctagagcagaacattctgaaacaaggtggctaatatttaacttatgtgttcaaaggagagctacacatgaatgcagcttgcagagtataagcaatactgggccaatatcaagtttgtttctgctgtttcaattttccttgatatcctaaatctacttattaagtataaattctttgtgatatctttatttatctttgggtcaaaatctcactcaataaaaattattttaaaaaatcagtcccaatacaaaatggcttagcattccatgaatgattttcttctagaaatggaaatatgttcatatgcaacaaaatgcaaaaggccacaaagaatgaatccctagatgtggattctaggcatgtgtgaacatagtgtaaaaggtttgggtttgagggcaaagcatttgtgcatgtgagggtttcactagtggctcagtgttaaagagtctgcctgaaatgcaggagatgtgggttcaattcctgggttgggaaaataccctggagaaggaaatggcaacccactgcagtattcttgcctgggaaattccattctcagaggagcctggcaggctacacagtccatggggtcacaaaagagttggactcaactgagcgactgagaacacacatacgcagttatgcatgaaaaccaagtaacaggtagctggacaattggtaatctagacatctcagacatgttaatggaaaacaaaccaatttcataatttcaagtgaaatccatgaaggtctaggtaatttcaggattgtgcaggccaagtttcaggtttacacaggctcaagactctgacgtacaagtcttcccaaaaggagaaaaggaccatcaccaaaaagtaaaattaggttgtaaaaatctatttaaaccaaaactaatgagttatccacagttctagataggaatatttcatttcttttccttttaatgttcatgagcatcacaaagttggaagtcaaagtatcctgaaaatgtacttcttggaaaataatgttgattgaaatttattactaacatatattataggactataattgtctaaagcagtaatctatggttcatataacagaaacatggtttaaaactttatgttaaaaaagcatggagactagcaataaataaataaataaaacagaagagaaaggatagtctcaatttgtattagaaatccactcttcttagcatccagcaatttgggatttctgtagcatgctctggaatgtgtaacccttacactcactttggctgttgctctccacctcttttctagcctttgcctatgttttactcatttctggcttctttccccaccctcttctttttatattttcccttccatctcttgcttgagctaactcccattttgtatttctgctcattcaaattccatcatatattagaaacacacacacacacacacacacacacactctctctctctctctctctctctctgtctccagagtttctcccgtgctcaagatcattcagtctcagtgcaaattttagtatttcttctcagcattaataagctgatttcattgtgaaagtcagacaaggattttagtctatgaataaaatatacaaaagggacatgtgcccaaatagactgaaaaagaaaagcaatacaacacgtttttaaactaggcaaagaggacatatataggaagtatatttttctccttatgaaaataatatatattcttttgaaaacttagaaaatgtgaagaaaatcatctctaatactatcacaa

SEQ ID NO: 28239 - DNA, 1194 bp, Bovine  19866880684650
  misc_feature (1)..(1): n is a, c, g, or t
ntcttctctgaatttattaagttataattctttagaaaaggatcatggtccatttaaaagtgtgatttcccatgaactcttgacatttattttattttgcaaaaaacagtcttccctctgttttgcagaactctgtacctgtcaccagcagtcattagacttgttttctacaagaccatttccctctggacaaactcaccttcctccaaggaaggttgaggcacgtgccatgcttcagaggagtcagtgctctccaaacggagctgaagcaggtagactacatgtctcactactatagaaggtgattctggagtacatgatttggcttgtgccaaagctataccttccagggctgctcttagaagattcctgaagccagtattctactttgtctatgcttatagccaatggcaggcttcccttgtggctcagctggtaaaaaatctgcctgcaatgcgggagatctggattcaatccctgattgggaagatcccatggagaagggaaaggctatgcatcccagtatgctggcctggagaattccatggcctatagtccatgtggtcgcatagagtcagacacaattgagcggctttcacttgtcacttgtcatagccaatggcagggatgccacaaaagtctacttcactgccaaagacattatgttttcaatctattttcacttgatatagttttatgaaagagacacaacctaattaaaggaaatccttgttactatgatgtctactaggaatattatgattagaagtaaatcatcgcaacatctataataaacatattctccaacattgtgtgttttgattataaaattttttttcttagctgaccataacacctcccagcttgggaagacttttattttttaaataaaaattgaatccacttggcagtttctaatgaacgtaaataagtgaaaatgatttacccctgtgttgttctctcccatttaactgctgtctttggtgacaaaagtaccaatcatcaatgccttggaatctaataattaagagtaacttactttctgtagcccaccagactcctctgtccatggaattcaccagacaagaatactggcgtgggtagcctttcccttctccaggggatcttcccaactcagggactgaaccttggtctcctgcattggcaggcagattctttaccatgtagccacca

SEQ ID NO: 28240 - DNA, 1738 bp, Bovine  19866880712402
  misc_feature (1)..(1): n is a, c, g, or t
ncaaggatctattggcacctactaagtcctaggtgctagagataaagcagtgaaaaaacagaccaaatttatcctcacggaacttacattctaactaaagggttaataaaatccagtgttttaagatcttactgtgggccgggtattcttttacccactttactagtattagctcagttctatcactctataaggtaaatatttttattattcccattttgcaggtgtggaaactgagactcggtgagttaaataactcagccagacaccctggctctagatcagccatctctaccactctctcatctttcagataagaggatggacttaatagccggaggcatgaggatgacaaggctgagttgttcggtatgagtttggagactttggtgctgatgttctaatgcctaaatgcatttaatggagcagtaaagatggctgtcttctcacacatgctgtgctcgtgtcaatgaggctgggatacagaataagctcccttgttctttctccctccgggtcagactgtgcctgctccacttatgtaagtcagttcctgtgaaactcttaaccagggaatctgatctgctcatttagtgtgattggctcattcagggagccaagctcttgttcctgaagcccaatctcagtcaaggctccctccactacagaacctgtttatcaggaagaagtagcatggcagcacataaagttttatgtcaagaaactcacagtggaaggagtccaggggtggacaatccacagctatacaacgaacagttgcaatgacaggatgataaagacagatacatgtgtggaaaaacgaagccactcaaacatacacacatgtttagccatttcacacccaatcataacaacaacaaaaaaacgaaaatggccacacgcagccagatgtacaactttgcagtgagaacaaaggcagctataaatattccaaggagccaataaaaagaagatgaagaagaaggagaaaaaaaaacaggagtggttagctctccaatgtaatgggctccataaaagcttttattgttaacagagttactttactaagagctatatgaagaaagctgaatgaatgtgaaaaattgcatgcaataacccaagctgaaagatgattatcaacctctgagtcctgtattttggagccagtcagtgctgctattagaagattgccactgtagttaaagaaaagcttgttttgtacttttctcccccttctgggtaaacagaaagtcaatacaggcttctcctgtgttttggtccatttatttgaacaattattttaaagatgtaatccaatcttcctgactttccagaagtataactcctgtgaacttttccagcagagttctatacacacaacttgctaaatcaagaattgagttatttccagtaggccttccctccttctccatctgccctccaccccaccccattctctagccatctgtttgttttgttgttggctgttaacaggatagtgggtgacatttaagggagatgacccatctgcacttcaaccattcaaaggctagccaacgagaagtgtaaaagttggaaaactttaaaaaaaaaaaaaaaaagggacattattctcttgggctgttagtgtggtttttctgtattctcagtctgaaaacccctgttccctgctctgtacttttctgggtggatggagtcagtacaactttccaaaatgctagtgccagaggagaaaaaa

SEQ ID NO: 28241 - DNA, 1787 bp, Bovine  19866880753323
  misc_feature (1)..(1): n is a, c, g, or t
ncaggccagcgtttctcatgatttactctgcatataagttaaatatatgccaaattgcccttggtggacaaaaatgccctctggttgagaatcacagctctagctcctcaaggtcaaagtttttggtgatcaaagagctattgatagaaatcagaacaaccaagactgtatcttgacaggattagagaaaaccattattgtgtgtatgatgtaagacacaacatcattatttaaagcagtttacagtgactgaaaacacaaatttttccattattttataaaaataaatctgagatgcctggcactcaccactacccctgtttttctgtactagattattccataattatagatatcaaaaatatttagatttacatttcaatacttcaccaaagttttattaaacttccttcattttgactcaattaaaactgagctcagtgtagtgagtctcaactgacctttcaggcttacatagaaagaagacaccacaaagcttgcaggaggcctggactcataacagaagagagatgtatttaaggcgcattttcatacctttgcttctctagctcttgaaatggataaaggctggaggcggggatctgtcatgtaggtttaacaaatgtccagtgagtcacagtgactgcccttaaagggatagggctgttcaagtgagactttacccaacaacactcaggcaaagtccacgttgttcatgttttcaggacagtgttcgtagtggctccagccaagatcttctgacttgccacctctcccttttgtcaagcccaatctctttgtacttcgggtttcctgacccaaagaagacctcacattctgaatctctgtttcttccttttaaaacatgtccctatccgtttttaagagaatgtgcttaagttttcaaaaatccgttctcaactgtatgtcacacgaatacaagaaattgtattttttcaatccttccaaagctaaatttgagctcagcagcataaacactccctaactgctacctgagaacataggcacagagaaggtaaggacagaagcagtcagaggttgctgatgtttcctttgcattggaaaagccttgcatacccatgggccactgggaatataccctagtgactcaactgctcctttgcagcaactacagaagagaaaagttcttccctgtatatgccctgagctgggctgaagcattctgtgataatcctggtaatccccaggattaccaggcagtagttaatattccagtaaattcttgatttctgcaataatgctcacattcttctgagtgatgagtagcctattccatagtgttgaatacagatgacccactgcatctgactgctcaacatataccccagggagttcctgaaagaatcaggtaaaagagcaagccttgaggtgggcaaaggcaacaccagggcacctctgccccactcattcatcattaaagccacttgtggttccttcatggactccatattgaagactgtctgcatgaaagaatttaagggaccaagtttgtcttcaagtcatctagctatctaaaggtgccatgaaggtgagtatgggtccatagggaaattaagctatagattaataagattacacatatgcttgccacctattgctttgtgctttcagggcctcagctaaaaccttattcagaaagagtcccacattaacactatgctacagttaaataataaagaacaaaattggtctaaaattgccttggcaaactccagccttcaaagtcaagagatctgtgataccca

SEQ ID NO: 28242 - DNA, 814 bp, Bovine  19866880786449
  misc_feature (1)..(1): n is a, c, g, or t
naaatcaattgaagttatttactcatagcagaaaatatgggtgattgccaaccctatggcttagtgaattgctttctcaccacccgctgccctgtaatgagaaggtacatattcacttcaggggttgactaaaacctgttcatgtatagcagcaatttgagatgcagaaagtgtttattattaaaggctaagagtgttgaatgccaaagggcatctttatcacttggcattgcattaacattgacaaaggagagaaacacgcccagaaagcccctcggcattggtcaaatggcactcaattatagaagtgaagccaggtagcagccagtgggtgctcttgccacatccttcctggtatacagtgttatgcagagaccctggttaaagacaatggaaatgtcaattaaactgaatggacagggcctatttgttgatgggttttctctctttagcatgtagtaggtgacctacagtgttttgatgtgagaataaataatggcttgtataacatgggttgcatttaatgtgcttgaatgcaaaacagtataagggaaaaagcaaacggagacagcgatggggatggctgtggaggcgggaagaggctgcactgggagccgcacgtgagtgaaatctcttgcaagctgagaaggtcatttgctcttgtattctctatgtgacatgagtaaaaagcaaacaatagaagaatcatttcatttttagaccagttctgtgcaaccagctgcacaggaccatgatgccaagtcctttagagttactcgatcttgtcatcatgtttgatgagaatagcgcaaaa

SEQ ID NO: 28243 - DNA, 1641 bp, Bovine  19866880792537
  misc_feature (1)..(1): n is a, c, g, or t
nactcttaatctcagtcagctgctaccactcacgctttctctgcaaagggcactaatcacatcagccagggcctttgtctttgcttcagagctcctccttgacaattttctgtcagtactacccatcttttgaaaacgggctcatcttcgggcttgcagaacaccacacgattctgtttttttccctcatactctaaacattctatatttatttcttttcttggtctttcctgcttctcctgcccacttaacaatacgcatcatagtccaaaattcaatttgaggcttttctgtttttcatctctctagcaatttatgtggtcatcattttattgtagaagactctgtagttcttcatcaatcttttcatctaaatgcagtcctatattttcatctatcctaagagcatttcagtattggtatattgcaatcagcttaaatacaagattttcagaactaaacaagctcttcttttcaacatatataccctatcaaaaggtttcttttttcaaggttcaaaatgctcaaatcacttttatgattctattcactatttagtctccaaatcccatcaaatttttctttgaaatgtctttcttcatgtgtcttcacccctcacattcttgctgccttcatctgagccacggccatatcagctcattcctggatcacagaagcagctacctatctgccctccccgaccccaagctttctcctctccaaactcacgttcatgccactgccagactaatcttctttaaatgccactttcatcttgtcactgtctgctgagaagctttcaatagccctttaatcacaagtgaaggtgaccttggagtttatctcatttaacccctcactttatagacgaggaaactgaggttcagcgagagtaaggggttactcaaggtctccactaataaaccccagaaggaggatttaaaatcaggctgttattaccttgagggccagtgctctttctacttcaacagtatattccaaaattccactcacataccaccttcaggatcacatctggatgctgcttgtacacgtgtgcgcagttgcttcagtcgtgtctgactctttgcaaccccatgggctgtagcccaacaggctcttctgtcaactgggattctccatgcaagaatactggagtgggttgccatgtcctcctccatggatgctgcttgtatcacttcttatttcacacatttttaactgttctgctttaaaaaaatcatatatatatatatatatgtatatatgaatatatatttatatatatctcacaactatagaaagaaagccattatcactgaatggaattagaagtacaaaataatcctaaaattaatacactggggacacaatcatattattaactcataggtggatgagtttctgttctgaaggtctattttcttcttctctacaaaggaaaattaaaatgtgatagctagggtgatgtaaaatgtatataaaatgtgatagaaagtcttactagtgtaactaaaggaactgaaaggggaataactttctcataaaatgattcagcatttccaagtgcttagtgtctacttacacctaaatttgtcttctgtgccacagttataagcttctcatgtttagagacacaga

SEQ ID NO: 28244 - DNA, 914 bp, Bovine  19866880835904
  misc_feature (1)..(1): n is a, c, g, or t
ntcaaccttagtggatagattcttgacctctctgttaacagacatgcttcatctcagttgtgcatatctgatgatatttcttacactatcaaaatgtttagcagtcttatgatggaaagggagaaaggatttaaggtatttaaaatacattcaaatactttttatatagcttcattcttttatgtgcccaattcaaaattcaaagactgtatatatatgtgagtatatgcattttgaggtaaaaaaattaccaatgaaagtatagaattaaaaataactgaaaatagtttatacactgctgcctgtttttataccaatttttaaaaacctttactagttttaatatttactttatgccctttaaaggactcaaattcataatatacaaagaagtttatgtgatatatagagcagagccataaaccatattttatgcataacagtgattaaatacacggttgatatatttcacaaagatggaaaccatgtcaaaaggtttacattttgataactttccttttggggggcatttctaaattatttaagttgaagaataaaatgacttgtttgtgaatttgcatgatctttttaatcatctttaggtaatgctgatatggcaaagacactaaattacaggcagcagtgggaatctgctggataaaaaagcacagactcgttttgtatatgagtccatgaggaatattctgttcaaggagtggagacataagaaaattacctaactcatgaaccacacattaagagcgtagtcagctgttgtaaatgcgtatccaacaacaaaccattatatatctttggcttaattatatgtgcttattatacacctgtactgcagagtagaggctgctatttgcattacttgggggggtttctctatcaaaacagcattagcatta

SEQ ID NO: 28245 - DNA, 1226 bp, Bovine  19866880870255
  misc_feature (1)..(1): n is a, c, g, or t
nttgcagattgtgctgtttggaaggagcttccatctcatgattatgactgaaagttgctatctggtactgatttcacccatttctgtccctgaacctgtagctgcatttaggaggattgataagaacacaaaggaagcagcgtctctgattctctgaaagtcgttttaatttacttgtttccactaattatttatttcagttgactgctcatcattgtcgtaactatagttctttctgcgtgaaactcaaaacagaattttgagggatggtcagcttcttatagcagctggaaactgatgggaaattaaaagagagataaagcagagtcacgggagacagaggggcttacctgaatatgagggatccttatgaaactatttttcaccaataaattattatttgtaatgattcttcaaacctaacattggtaaatcagctattttgttaatggcttttaggaaatatctagaaccagacaaaaatattaacaaagattgttcacaatatgtttgttggaagtgagttttcttttgttggaaggcacctgaatcatcattttggttttattgaactttaaataaagtctttttctagtttccagaggaagctccttgcccccaagatagaataagtgatagcagtatatatatgtgtacatttttaagattttatgtcattgctgctgctgctaagtcgcttcagtcgtgtccgactctgtgcgatcccagagacagcagcccaccaggctcccccatccctgggattctccaggcaagaacactggagtgggttgccatttccttctccaatgcatgaaagtgaaaagtgaaagtgaagtcgctcagttgtgtccgaatctcagcgaccccatggactgtagcccaccaggctcctccatccatgggattctccagacaagagtactggagtggggtgccattgccttctccaacaccaaatcaggaaagagacaagacaacactgattcccaagtacatttctaaagagaaatgtggggatttcaggtttcttttgattattaaggtttatatagcttatttctgaaaactttcacatggtaactacactgccctcccatcatttagttctgactcccagatgatttgagactgtgaaggttccattgtctgtgaaatgatttctaatggtgatactcagggggatttcttcttctgaatgctattagtgacctaacagaaaaggg

SEQ ID NO: 28246 - DNA, 1552 bp, Bovine  19866880890428
  misc_feature (1)..(1): n is a, c, g, or t
nttaaatgagcttttaagtttctattacttccaattttcccagtttcctcccttggctagttcttatgagtgaattttctagtcaacttatgattccacttcagtaatcctctggaaataagagctcaaattaaaacaaggaacacacaagtggacactaacagaaaatattttcatacaataagtcatatgcaaagcactctgtatatactatgaaaccgatacattgagtaggctaaaagccaggttattagctatgacctaagattactgaacataaaaacacaccaccgtttgttttaaggagtggtaagataaaaagtgagttggttgggttatattttaaaaccatttttaaaataatacagcaatttaaaatttttaaattgtgatgtttactaaaagcaactggtctctacttactttctgccttcatcagctgataaccccacagatccttgtatactatccaggaccccagttctcagcctggttacttgttccagtgaaggcagtagctttaagagaattctgcctgtggagtaccctttaaaatcttttgaaatacaaatacaatattagacggggctattaattagaaagtgtttcactgacatctgtaggtatgactgtggaactgctgtggctaagcccaaggagaatataggcttggcaggtatttctaatctaggaggcattacagaattgaagcctggactgctcctgctctgagaaattagcatatccaataccatactgctctctccctccttactcaggaaagagaaaccaccaagagctcgacatccacacatagcaaagcggccacaggctttcatgccaatgcctttaaacaataatcgggttctcaatcccccaatcctatttttattttgcattttctaaagtgtggcataaaacacaaatggttttaatttttttcacatttcagattactggcagagtgcactttagggaggctggttgtaagtatcactgtaaatagaaagaaatacaatgaagaatagacataaaatcactggatgaaattacatatttaagtaaatgtaaaacatgactcagttgatcaatactgttatttacgtggaattttaaaatcatacatgtattacatataaagtttaaacaaattagttgatttaataataataaaggcattaaaatttttttcaccatagtaaaagcagctcttattttaagtaaataagtgttcatatatggagtaagcttgtgacttactctgccaaacccaaagcttgaaatagtggaatcttcagaatggatcatgtaaaccatttcatttactgaagtggaagataacttcccaattctgccaaaaattttacattcttaattacattataattctctctatcctcttgacaaaaggatataatgaaagtttgggtaatagtggatattcactgagagaagcattgagagatactgtgagagaacatctgatggtttggagaaaaggaccagctcaaattactctaatatttgctagaaaatttgggatgttccaaat

SEQ ID NO: 28247 - DNA, 1082 bp, Bovine  19866880893153
  misc_feature (1)..(1): n is a, c, g, or t
ntgggcggatgctggtgatttggcgagcaaaaggagggaatccgcccatcccaggcccgccggcttcttttgagccgggaagtgagcgcaggagaagttcacccggcgattcccgcgatgggttcgcgcggggccagagaggctccgggaagcgcgggctggttgggccggtgtcggccgcggctggcgcgctgcaggacgcgcacggggcacagggtggcgctcgctgtccgtgcagcgggaggaggcggccgcggtgcctttgtgtgcgcgggcgccgcttgcggcggctcggctggcagcacaagggggaatgcgggcgggtacggtggtccgggatagacccgactgccgccctacccttcgctgcagctcttgggtggacaacgcagctcgtccgctcaaaagcttccggggaatcggagaggctttttgagagcagctggcaagtcgagaagggaaaggaaagaggaagtagcgtttagagaggctggaaaactctcttgggctcaacacatcgccttgaattcactgaaacagaataatggcaactttgggcagcccaaactcagcctcgagccccgcaagagaagcagcgggtgtctccaccttccctcccgcgcaagaaatggcttgtctgagaagtaaagttagggaatgggcttagaagaaattccccaaatggacaggaaagaacaacagtgaaaagcagcagttttgagcgggcgcttcattcccggttctcagtcatcctccagctcccttcgctgtctctggagctctagaagccccgactgtcgttaggaatcgaagcaaaatgtatttaaggctgcttcctcaccgccaggagactccgcaggaaattaaattaaattaacacgcgcccagggaccaaagaaaacagataccagccccaaaccccctccccccgctaagcaaatcaacacttcagcgtacagggaatgcggcgaacctagagatggccactgacgcgcatccccttaaaccttagcggctggagcaaggaattatcggctttcctttaatccggaagcagggaataaatagggcggaagcaaatt

SEQ ID NO: 28248 - DNA, 1664 bp, Bovine  19866880983453
  misc_feature (1)..(1): n is a, c, g, or t
ntgcacacacacacacacacacacacacacacacgaaaggaaaagttaaaatacaggcaaactatgaacactccagtgctgtgagagttctgtacacccactacacagatggtgattgcggaaccaagctttaaagaggtccccacctaaagagggtagggcatccaacaggtctcatttctgctcagacatctgtctataaattctagaaccctgtggcgtgatacagcctaacccacagtagttaaccgatttttatagctcaaaatgtcatgtgaaccactagccaacaaagagggaacaataaattgtattctttctcactggtgaatgcagcatctacctccttccatacccagccttcagatatcctcccaacccctcctctccattaccccatcgtcttccttttgtatgaagctatagaaccagcaaaactaatctatagtgataaaaagaaaaaaagtcaaatcaatagtttactgggggaagagggtggattttgactgaaaaggggcatgagggaaatatcactcttgtccttacttggattattgcaatagctatctcccatgggcttccttggtggctcagatggtaaagaatctgcctgcaatgcaggagacccaggttcaatccctgggttgggaagaccctctggaagaaggaaacggcaactcactcaagtactcttgcctggagaatcgtatgaacaaaagagcctgctaggctacagtcaatagggtcacagagagttgcccacgactgagtgacgaacacataacatatctctcatactgctcacttcagtctgttctcagcacagcacacagacaatattactaaaatgtaaatttgattgtgttgcccttctgcttcaaacccttcaatggctccttatcttacttctcactctaagtaaaaaccaaattccttacagaaggtataaggttctatggagtttggcaccaagctttctggaaccgaaccactctgtcccacattggctaccccttagacataccatagccctttatatcagctaatatattatacacatatttgtttattttctctcttcccctactaaaatatctactctcttctaaaacatctgctgtctattatcaaaggcattgattgcttaactgcagcatactcagcaatagaacaatacctggccctcattagtcaataaatatttgttgactagtgtttggatgagtgtgatacagaagagtttcaaggcctgaagtgctcttttctggacttttttagtgtaggcctgctaccatctagttttgcttcataaatcttgttcaagaggaggatttaagatcagtggataaagatctatatcgcagctatggagttttactctgctactggtttggacctggtgtgccaatgcaccaggcttccaagctgtcctactatgaggaggcatggcagtgaacacctgcaagcccctggggaagcagagaaagcccatgttgattttaggattaagcctgtgaaagctctttgaaatgttaaaagttgtatgcaaatctaaggaataattattaagggaggttcagctataccgcatcagtggagaacctttaaaaaggccctttgctgattatggaaagatgggtttccatcacagctttattctttga

SEQ ID NO: 28249 - DNA, 770 bp, Bovine  19866881026268
  misc_feature (1)..(1): n is a, c, g, or t
ntgggaatgtaaaagtcaacagcatgacagaaactgctcagacttagagaaaaagctttttagaatacagatgtgttctaaaaatcctcctgtaaaaaagtgtgttccgttatcacagaaggaaagaaactcaaggtttttcttatgtttagggtatatttatgtgatattaaggatgatgaagcaaatatttagcagctagggtactgcgcgcagctaacaataattcctttatcatttacccaacaagaagataagtgccgttttccttcttttgcaaatatatttgccagcagctgtttcaacatttataaagaccatttccactgattgccaaataaccataaattcatttacacatatttctgagttggaggcataaaaataattacatgtctgattaaatccacttatgccttcatgtcttactaaatctataatagacatgaattgttacgatgtattacatctaagtgcataaataatacaatgcagacgtagagtccagtttttctacaacagaacgtgtggagataatttacacaaatatagttgggatacagtataaaaaacaacttattttagaaattgttatgacacagaaaatgtctgacacagaaaagtgggacttcagctagaaaactaaagaaactatccttgtttatcactgcctcactgtcttgaaatacatattaaatagttatcttaataagcttgtcattagaggagaataattaagctgaaaactccttttcttaatatgcaaacta

SEQ ID NO: 28250 - DNA, 854 bp, Bovine  19866881128394
  misc_feature (1)..(1): n is a, c, g, or t
ntgagttcttgtagtattcaggttagactctgtcacctccctgtgattcacaacaattaggtgaacttgcttagtttcaagatggaagagctgtctccagttgtctctcagacagagctggagaatataccaagcccactttaagtccttgttcatctcctcatggcttctctcaccagtatttggtagtcatattgaaaacaggccatccatataatcagaggttgtctgttgaattcctgtgtcctcaattcacatgacaaaactgaggctcagaaaaattaagaaactggcaaaaattgtgcagcttggaagtaatagacattacattcaaatccagaaaaactagattctagttccagttttgaaaaaactagctatgtgaacctagcaacagctccttccaatattttattttaaaaaattttatcacccagagtctccactgtctcacctatacaataaaaggattaaattagatgatctctaaggcatcttccaaggctaaaattttgtgagtctaaatgacaaaatcattaacaaacattgattaagatacatcagttataagcaggcctccaccagggacagaaatagaaaaatccctattcttgaggatccaataatctaaaataaataccaatttcacaaatacagaagatgaaatagagacaagaaaaatatatatacaatatgcctttaaaacctagtgaatgctgaacatataaataaatattgagaaatatgaattatttactttcaataaacattaacaaattgcctttttaaaaaacatttttttttaattgaagggcaattgctttacagaatttaccttgtttgctgtcaaacct

SEQ ID NO: 28251 - DNA, 936 bp, Bovine  19866881170006
  misc_feature (1)..(1): n is a, c, g, or t
naagagagaaaagaaggtataaggggaaaaagtccagctacttgctttaaactcagtaaaggaaaagagtcttaacctcccaactcttaaagggccaatattttagagaatatataataatctggacattacaatgaactttatctcttatcacaaagatttttcttcatggaatattgttcagccataaaaaagaatgaaataatgccatttgccgttacatagatggacctagagactatcatcctaagtgaagtaagtcagaaaaagacaagtactgtatgatattgcttatctgtagaatctaaaatatgatacaaatgaactaatctacaaaacagaaacagacagagaacagacaatggagggatggactgggagtttgggattagcagatgcaaaccagaatacacaggatggattaaacaacaaggtcctactatatatagtacggggaactgtattcaatactctgtaataaaccataatagaaaatatatggaaaagaatgtatatattaatatatatgtgcatgtatatatatgtatacttgaatcacatttctgtacatcagaaattaacacatcataaatcaactatatttcaataaaatcgattttttaaaaatatattttcttcaatgactgcttgtggtccttacttggagaatcaaattaatgacaatcattatttttaaaaggcacctcagagatatacaaatgcccatgttaattaaccttgaatcaaactctgagatctaagcataaatgaagggagtatttgggtggaatcagttatgctcttcagattctgtgtctcttcatttatttgttcaagcacactgattcaatacatacttcttgaaatccaactacaggcaataccatgtgcaagggggaatgactcagaagaaatttcctatgccctctgaaaaaa

SEQ ID NO: 28252 - DNA, 1044 bp, Bovine  19866881275836
  misc_feature (1)..(1): n is a, c, g, or t
nagtcggacacgactgagtgacttcactttccttttcactttctgcattggaggaggaaatgacaacccactccagtgttcttgcctggagaattccagggatggtggggcctagtgggctgccatctatggggtcgcacagagtcggacacgactgaagcgacttagcagcagcagcagcaggagcagcagtcctaggtctcaaaatttttactatgttgtctttttctctaaaagttatatagttgtacatgttacatttaagtctatgacatattttgagtcaatttttttaagaagttatgagaattagatcaagttccatttttttttaatctatggatatccaattactacagaaagaaaatattttaaagggaatattacttatatataattatatataatcaataatataataataattatattttatatatattataacattttaaagatggttatctacaatcttctttttaaaaatggtgattaaaaggagctagaatgggttcactaaaatcaagttagtctaaaccaacttttcttctttaaaaacattagatttctagagagatttggagcatgatgggaaaataaaagaaacttaacacacataccccttagactgaaatacaggattcagggagggaaatataagagtcccactatatttaatacttgtcaaagcatttctcaagtagggttttgaccaagggtgacaaacgttaagactgcatcaaagcatatattgagaagaaaggacaaatgatgaggtctgcagttatgacatttgacgactgctggaggaccatgtattgcttatttcaccttcaatggacagtgaaatactggatagtgagcctggaaaacaataagcataaagaagacatgaagcaaatttgaaatgtttggcaggctatctcatggaagaagaagaagaggaagggttatgtacagctttgggaagaccaagcaaggacaaaaggctatgaataacgaaaagcttgatttcagctcagtgcaagggaaatctttctatta

SEQ ID NO: 28253 - DNA, 2280 bp, Bovine  19866881297443
  misc_feature (1)..(1): n is a, c, g, or t
nctcacttagtcatgtccagctctttgtgacctcccatgaactgcagcccatcagacttctctgtctgtgggattctccagggaagaatactggagtgagtaggcttccccttctcccaggggatccttccccacccagggatcgaacccagatctcccgcattgcaggcagattctttaccagctgagccataagagaagcccttaaacataataaacagtgagttatttataatcactgaagtcagcaacaatttgaacattcttttcaactggaaggatctcaagtgatcaaataaaatagcaattttatacctacaaaaagaccacacctgattccataaatacctcaacttcaactgaggtttcaaaatggttataaaaagcactgcaagtttcagcatgctttctaagacttaaaaaaaaatcgtatcttaggggaaaaaaacaagtaacaggagttagggcaaaactgtacattaggaatttcccttactaacagacaaaagtgaaatttctaagacatttatgaagaaaaggccaattacattactcttttttccaattttaaaaaagcatatatgcagaaagagtactgaagaatgaagagggaaaacaaatggtaagctgaaaggggctcagttgaatttatgggagaaatgaataatatctgctgaatagcacagtttctatttgtgtctttgtatgttctgaagaaggagagcttatagtttacaggtatgtgtattctcatgggcagacacattaatccaagaatgttactctcctcatggtcacatggctaatgctaggcagaggattaatgtccagtatcagccatcagatattgttggattaacaatatctactggttaaactggcttgcggccttaggatactccaccaaaagcatcctgtaaacctctagaaagaagttcaaagtaataattggaaaagttaaaatttatattcttctatttaagatattcagaaattcagggaacattttcaaaagttcctggaaattgaaaataaatgtccttgaatgtgggaaaacataaatacacaaagaatgaaaaatgagcagaaattttcaacaaatgtgaaatatagtattagccaattaaaatcacacctaatttcatcaaaaatctggggtaaaaaaataaactattcatagaaaaaaaaaagtacaagcttaatgagaattacacaagatgtgtagtctttagatcattttatgatccatcaagtagatttttgtttttctggattgagtgcttccaattgtctctaacaggacattttgagagaggatgttaggtaccaactgcttccagttgctatgggaaactcatttttttttttttttaatctgtaatcctctaacagcacacaaaggtggaggagttttgttactcagcagttctttgagcactactgctaaaagtcacaagatgtaaaaactggttttgatgactcgactggaggcatagtaactctacttttgaaaagaaatgaccctggcaggaagctatttactcctgcatggtgagctccggtgacagaaagtgtggcaaagggcttcaaatgattactggctttcagggtaacccaatatacctcagcctcctgaaagaattttagaggtgccaatctgagacattcctgccatttgccctcacgacttacttttcaagattattatttgattcaactatttttagttattgcataggtgtgaatgattgtgtgtcgcaagctagacatgttatctgagttcagtactcttctgatgtgggcagaaagaatgactgctttaagaagtcagcagtgaatgagcactatgagaaattaactcctttttaaacatgttccttgagatactgtagttcttaacactccttttcagttttaagttagccttccattctgattctagaacactatacattgaaagagatttgtcaagataaatgcaaggagcaaggagtgaactctacatcttgttttctgtaagttgcatttttgaacataacaattttcgacttgcttctgttaggaaagtacaccacaagaattctgatgtcagatgctgcttgggacacaaaaaggatgcttttaaatgatcaaaggaaaggttatgtcaagaaaatgtttatgaagaaaaaactaaaaactagaatatttaaaaacacattttaaataaaataagataaaaataactaaccaccaacctgatataacatggctttaaatgccaagtgtcttaatctcatg

SEQ ID NO: 28254 - DNA, 780 bp, Bovine  19866881418386
  misc_feature (1)..(1): n is a, c, g, or t
nctgttaaatttaaagaggtatttcaaaattagcataatagaaaaaagatctagatctaaatattataatatggtcaaataagttgatcaggtgatttctgggcggtctcccaaactgttccaaattattttattcttaagatgggtattttggtaactaactgggttcttccaggtagacctaaatatattgaactaaatattgctctacatgattcaaatcaatttaaatacacattgaaggtgttataaaatgtcatggatctagaacatgagattgctgagtcctggctgagaccccaagaaaaccgtagggtaattaaaaactgttaggcacacactgtgctattccatgcctccctccacatccatgtcagaaaaaccagcgacgatgctgctgcagaggacaggagactctacagagaggaaatgtcctaaaaaacaagatatagatagagtcaaagtggattacctctgaaagggaggagagatgattctcccacatcagtatggtttaaactggactttgacttaccagttgacaataagatgaaatatcaaggaccaagcttaagattgccaacagtacactgaatgtatgtcaaatgtataagaatatatcaaagtctattatcatgtggactaaaactaatggttataaaatggatggcacaataatatgatgagcatatactatctttcttggagaaggcaatggcaccccactccagtactcttgcctggaatatcccatggacggaggagccggtaggctgcagt

SEQ ID NO: 28255 - DNA, 944 bp, Bovine  19866881571317
  misc_feature (1)..(1): n is a, c, g, or t
naaaatatttttctaagccttcaattaaagtctcagaaagttagaaatctttcaaaactgatttctggttgaattatatttcatttggtatcacagccttgctgttcagtcagctagctatccacttttaagtatacaacattctgtgatagaaacaattatttgtcatttaaatcccaaagccattgtgttccattcaaagtaaattataaaactaacacttttagaaaaagactgttgcaaaacgtaaacttaaaaatcctttaaggttagggaatttgtcctctatgaatctttgacatactctgtggcatacagtagatggtttgtgaaagagaaaaaaaaggtacctaagagatcctgattccatgattctaaaatttaaggaattcctatttttaaaagcacagcactaaattatatgcttagactgtacattcatctgaatagtaaaaatgatacgacttccttttaaaaatacaaaacgttagtgaattgtcttctgattgtatgggataatatctaagctacaataatggattttatcataaacttcatttgtactactgagatagaaattttgcctagtacttagaggttattacttttaagttaataatgataatttttaattctaatatcatatttccaatgtataaaattcctcttcaaagagcaactagatatacagaaagtgatttcagtgggatttcagtagatacaaaatgaaagaataaatagatgaaacaatctgcagaaaaaactgagagatctggttttaacttctgttggtgcttttattttttcatttctgaactagtttcacatcagtaccccttacacacacacacatacacacacacacactaaattcatagaggatgagaaggcaattggtagtttaacaggaattactaattagttcatttttctgtgatactagt

SEQ ID NO: 28256 - DNA, 800 bp, Bovine  19866881640197
  misc_feature (1)..(1): n is a, c, g, or t
ncccccatacatatatacatatatataattttgcattttgcatgcctgataatttctgatagatacttagataagtatctgatagatacttatctgatagatacttgtgatttttaacttggaagtggtagatacttttgtatccctttaagtattcctgagtgttgtactggaacacatctaaattacttgggaacagtttcatccttttgagtcttgcttttaggctttgttaggcagtataatagcggccattaatctaggtccaagtgtgccataccatcaaggcaatgcccttcttggtattatacacaatgaattggaaggatttttatgctctggctattgaaaataaaaactattcttggtcacatatgagtgcgtggatttattaccttaaattctttcaaggttttcatacctgagccttagctagtttccttacatccattctctgatcagtgctcagaagaaaactcaagaagaatataccgatagataatcagagtttttttttctggggagctctgtcctcaaaagtaatcttgtcatcttgttttccctagagccacccccacaaaacctctcaactcagggagagcccatattctaactcctaaattggcaggaagccaggcttactcctctccaggaggaagtgaactgtgtcagtcttccagctcatctcctgtgttttccttccttcctcaggtatcatgggtcttacactctctgctgtccaatgtatgagaacaattccatctatactttagtctttttaattgggttcagttaggaag

SEQ ID NO: 28257 - DNA, 965 bp, Bovine  19866882046433
  misc_feature (1)..(1): n is a, c, g, or t
ncaacaactaactaactaactgttgtaacttagtagctagaattaattgaactttttaggtggaatgcttatttctcagcaatgatagatattggagaaattcctttgattgagttatatatattgggacatatttatctagaaataggctaggctcagtttgtctctgaatcatcttaaaacctcatgtaaccaatggtggaaattagctcatttgcttgtgaatctttggaattaattgggagtaatgaaataatttggtctttgctagtcagaaattattagcattcaactactccactgtaatgagtcaccctgggtatatttcctagatttgacaatacctgattttttttcagacgaatgtgaataaatttccaaatgccaggttctttttaaagaatgcaagctaaatattttaaagttaaacaaaatcaacccaatattaactttgtatcttaaacatagattgcctgctttgctactctttggagtcaaggctggtagaaaaatattccatgtaaaactgtaaaattatcaatttatatgaaaaggttaacacttcacttcataccattttggataatatttttccccccatctgaaatgtgtacaatttgggctgttttggcataaataatcacaaagctaaaatggttgccaagggattagggccaagcctctctgagccagtcatatttttgaaagatatttatagaactactgaggttactcagaagtgattggagtcaagtcatgcttacagaaggttttttctttgttcttcatgctgcctcttaacccagttcagagtggctattattccactataaataaatgccaaacattctttggaaataaaaaggaaggctgaattataaacttgtgtatttgttttagcatttagtatagtgtatgccattaaagaaatatataatcaaataggcattttaagaagtgagagg

SEQ ID NO: 28258 - DNA, 827 bp, Bovine  19866882107813
  misc_feature (1)..(1): n is a, c, g, or t
ncaaggataaggttctcttccttctatcctcatggatttttcttagataacatacaattgataacgattatcccctctacatatataatagcaataaagctcttaaagagaattggggtcaatttgtatattgtacttgtacttctgtatcattactcttagagagttctacatcatttactcttagagaactggtcagacaaaaacctaggatatgttatacagactcatgacagtcatttatttgtgagcaaatgacaaaaggaaagaaaagagcagtttgaattcagtgaaaaattacaattttccgtatctgtgattttcttaacaaatgaaaccttaaattcactggagaaaaaaaatccctgaacacttgctaatgctgtggtttattccaacagttgcttcacatcagatcatacaatccttcattcactttgtgaaaccagttactcatggtcactcaatttcattttctttcttattggactctaacagaggcattcaccaggccttttgttttcaaaggttaaaataccccatgaaccactacatcacttttaaagtatgtcccagtcataggaacaaactcagcaacataactccagggaagggaatggggaaaccttaattttaatctgatttctgctactaaatagatgaggaaaaactcagctgattttccacctcaagtctctgcctcagatataattttttaataaaaaaacagttgtctagtgcagaagttcataagatatattccaaagcactaaaatgcttcacaaaaagtttgggcaagactatatatagagagagagagagactat

SEQ ID NO: 28259 - DNA, 703 bp, Bovine  19866882243724
  misc_feature (1)..(1): n is a, c, g, or t
ntcgtgtctgactctgtgcgaccccatagacggcagcccaccaggcaaggacactcgagtgggttgccatttccttctccaatgcaggaaagtgaaaagtgtaggtgactagagcagagggcttatctgcctctccgattagaaggtcagcttcatgagggaataagttgtttttatttcccacagcagtatcttcaacacctagaaaaatgcctgctgtttctgagttgaagctgaaaaaataggtttcactactgatttaaataaattaacattgaacaaagaatcagggagataatcttccctacaaggaaaacaaggttgagaaaggttgtgaatatttgcataggatttttgttgttatacctattttcttattcctaagatttggaaattggtcacttattggtgtatcctgaagtcagaaatactgaaggcaaaacttagatttttaccattaggccttttaattcatttccttgaggaagtgtctgtgtttgaatattcttagaccatgattatagctaaaatttgcacattttataatgtggtaattgtatttagctagctgacgtcttttgttttggagggctggggtgtagatactttcgaatgtagaatttaacacctgaagtagtaattatgtgtacctagaaattatagggtagaaatggaaatggaaggaaaaggcaggttatagaaa

SEQ ID NO: 28260 - DNA, 1543 bp, Bovine  19866880412918
  misc_feature (1)..(1): n is a, c, g, or t
ntgatactgtttaaataggaggcatttaaagagacctaaggcaatggcaccccactccagtactcttgcctggaaaatcccatgggcggaggagcctggtgggctgcagtccatgggatcgctaagagtcagacatgactgagcgacttcactttcacttttcactttcatgcattggagaaggaaacggcaacccacaccagtgttcttgcctggagaatcccagggacagggaagcctagtgggctgccgtctatggggtctcacagagtcggacacaactgaagcgacttagcagcagcaaccaacgttgaaatgtttgttctgcaattctttgcagggaggattgacttagcctgttatactggaaactgcagtctggtttctgtttctactgttctgctgaaattgttcatcaaagtcagggatgacttcaactcatcgaatccaaaaggcacctctttacccgacattaacagacttcacagtgttcagtacacagcgttgtgcccaccttccaacactcccatctccacctcaaggacaagtcattcttatttcttttctttagttcctccttcacaaaacctctagatgtcagaggttgatccactctccaccttcttctctcatctattttctctcagtgattttatctattcctatgggtttaaatagcctctatgctgattacttgctaacttaaatttctagtccatacatttcctctgaattcaagattctcttgtataatcagaagcacttccatcagaagcaaccctgactccacatcctaccctttggtgtgagtcctccgccttcagcatcacacactcagatgctccaaccagaaccctggggatcatctttgcatcatcccttgccctcacctgtcatagccaatcactaaaacgtccattcttcctccaacttgggtctcaaaccagaccatttcccctcatttccactgctgttaaccaagccaactgagcatcatctctacaatgtgagttgattaagagtctaatggtctccagaccaatctcctcagagcctccccgccgcaccccaccaaacaaaacatatgtttaaacaggaagctggattgtgacttgtctttgcttcaatgatggtctcatgcactttgaagaaggtatcacaaagtatgggctcaggacccttcagtataacaaccctcacaccacctagtaccactgtccccttgcctggactaccctgatttgctctcagttgtgtaagtgcaagaaatccttttcagtcactaggactttgaaaaggtttttcctccagactctgccagtaactgattacttcctttactttatatcttggtttaaaagtcatttccttggagaatactcccataatcaccccatctgatgacaaccgttggcccctaatgattttctaccacagtcccttttatgggggctttatgacacaacttatcacaacttctaaggatgttcttccttaatttttgtctctctccttagcccgcctgcaggaatgtcagttccag

SEQ ID NO: 28261 - DNA, 721 bp, Bovine  19866880586960
  misc_feature (1)..(1): n is a, c, g, or t
ncttggctgtactgaggtgggagcttcccctgctccctctttttggcagtctgacattttgaacagatgcgatccatgagaagctataattatagtacaaaccactgccagggttttttctgccggggaatttctatgcccagctagagtacctctcggtgtgatctgtatatcctagattagactgtgccacactcagttcaggcctgcttggtttattgcctcttgatgaatacagagaaactataaagggaggcatgatctgcttacttcaggaacaccaatcaagaactgacagattatatttaaaaattgtttcctgagttagagtctccacatggggactcagtgggtggaggaggaacacaatatccttctatctgctttcagacaggtggcaaatcagaatagcttttctcagttttactctataacctttcagagttcatggaaagtcctcagcttctgcagtggtttttgagaaaatctgaggtttcatctttcagagggctcttcaccatgggaagttttgagtgtacatcaatgtggctggaatgataccattttcaattgggagccatactgtcctggttcctgaaaatacagaacatgtgagaaaattggacataaggtatgtaatcattttttcttggtttcattaagtctcagaagtttcctccttgtctagactgacttttccttgatgttgttgctgttttta

SEQ ID NO: 28262 - DNA, 1292 bp, Bovine  19866880600155
  misc_feature (1)..(1): n is a, c, g, or t
ntatgatacattatttagaaaatatgtgtttgtatttaaattacattagaaagctgaaatcggtctttcctctaacattttttaattcatctttttataagaaatgcttaatgagtagctttctggaattttgttaggtatctattatttctatattacattgttaccttaaaagtacaaaacctcagggctttctcagataaattgaattcagaggtcttaatatcatccaccccttttccctcattttattcacagggattttctagaatgtcttctgagataggaagggagaagagtcaggattggggctcagcttggactaggaggagtgtttaaggtggagtggatacggaaagaaagtcttccctttcagtttgcacaccatttactcaatccttggaatgacaacaagaaagtccagataagcagagatgggcaggtatacgatggcatttaatatttttcttccactgttttgtttggctgttattcagtgatttgtttgaggaacaaatgcaagaatacaaattgtatattccatgtgcacatgggaagataatggttcaaatttgtagaagagttaattaaaaacctacttgcaaagtgcctgacagagctctttttttttttttttatcattttgtaaacctgactttgctctgtcattgtatatataatctttcacgtcagttcttggaggttcctattgtctaactaacttaatatgatcaaaacctagtgtaattctgaagtaatttcactaaagtctaaggataagaacagtatctaagttctttatggatttaactaatggtataaatagcaattttatatttttgtggctttttttatttctgttatgctttgccttcatgatactgctgataggcattttaaactagttaaggtgatgggaattaacatatatattgatgactgtgctagcttctttatatgaggtagttcaattcttaagcctaaaataagttattgaccaagttttttgtaggagaaaatagattcagagaatctatttagagagttatctagtcttgctaaggctacatctaatacttcatctgaacaagtgtgactgttcaaagaaccacttgaaaactgttaaggttctttttaagtgcacatgatgtcacaagaggacaataaatgacattcttttcaatatgtaagaatattttaatttttatttgataataattttgaaataaatttcattccttaagagtattatatagtatctaagatggtttctgagggaaaaaacgcaaaca

SEQ ID NO: 28263 - DNA, 967 bp, Bovine  19866880632301
  misc_feature (1)..(1): n is a, c, g, or t
nctctgggtgttaaaagaaattctacattattctctgttacttccagatttgcaaatcttcacaaaggaaccgattcaggtgttgttttgcaatggttcttactgtattcagtaacatgaccccttgagaagtagatttattagactggtaggatgttagacctctttttaaagtatgtattgaacagcataatactcaaacagaaagatctccaccaaacggtagtctctgtggctgcccaattatacatctgcatcttaccctctatcttgactcctgtctgcactagcacacttggaaattgttacatgcactagcaaagaaacaataatcaaattggctctactcaaaatcttctgctgctaattatagcacagaattaatagctgcttgaaacaacatataactcacgaagttcaggctacttccctgcatgattcatctttaattatccaagaaatctgccactttgatgtctttcgtctactatagtacagaaggtccccacaagggtgcttccctatagcccacagcattatctgcctccacatttacctatgttctcctccagtaaaacaaagagaattagctatttaaatgaaacaatctgctttgttgcaacttgggaaattctcagctataaactgtgactgggcaggtctgtcatcccttgttgatttaccctttgttgcaaggcaagagctgtttctctctgccctttgaatccagaggaagctgagactttttcatacgggtttcctgctaggttgcagatgtatattgctctgaaagtccctagctttatcattccctttctatccccagagtgtcctaaatgccacattttttttcacaactcagtacccccatttgtcttctggagtcatcgacccaacccctgtcctgtatcctttctcagaataacaacattagagcactatagatgtgacaatttaattacaattt

SEQ ID NO: 28264 - DNA, 1542 bp, Bovine  19866880639400
  misc_feature (1)..(1): n is a, c, g, or t
ngtggcagtggtaaagaatctgactaccaatgcaggagacacgagagacctggtttcgatccctgggttcggaagatcccctggagtaggaaatggcaacccactgcagtattcttgcctggaaaatttcatggacaatggagcctggtgggctacagcccatggggccacagagagtcagacatgactgagcaagtgagcacacagcacacacacacataattaaatataagccaagaagccggccatacaattgttggtagctatcagcaaatatattaattaaatacatatattaaaaacttgtattcagcgcatttgtatcacaaccaggtgaagagcatccaaagagaggaattttaatacagaatcttacaaccctcttcccccttctcccaccaggctcctctgtccatagagtcttccaggtgagaatactggagtaggttgcctctttcccttaatatttactaatttaattctattttagagttctctacacataactgcttaagataaattaccggcctttgattgactttcttaaacaatgataaattgtggttaagacaagtatttcctgtgtacacacaatgtcaagcttacttagacctctgaggcaagagggttgccttgctggtactactgcattcaagaaggcataatgaggttggttcatagaatgtggaagtcaaatctggagacctgaaccaaatgcactgccaggataaagaggtattgctggcaggagcagggtgcagactggacagagtgtgtctcttctccttccagccttctgaggcactctccagtgcttcctacaggtatcctcactgaaacccagcaggcaaaagagaaacgtgttttgcacagtcccagtcccagcattacaaactgagtacagacaggtggatctgaaactgaaaaccagcagcacatccctgacctcagggatcccacctgacctcagggctcagtagtgtgttcacttcacccgcctcttggcaacaactcggggctgttcatttgaaaaatccaacttttctcctccagaaacagatacggtgtttttgttattaatgttgaaacagagcacacaagtcacccactaaatctccactaacagaagcaatgaaactgacgccagagatgaataaacgcaaccttgattgtgtgaagcatcttaactggtgaaatataaatacaaattggccccaaatctctcagaataacaaaatcaatcctcataagtcattttacccgaatacgcaggtctgcttctctctattctaaagtgaatgtggatttctcagtaagccaaggactgacaggcttgttgatagatttttgtgttttttcctttcttctcactggtacctttctcttcagcacttcctctagaaaggaaatgcagcagtgaacttccaatgaatccactcagtgaatttccagtgaactcattcagctgctctctccactgctttttcagagtttcaatgggaaagaacatagaaccatgcaacaaactctgaggccctgcag

SEQ ID NO: 28265 - DNA, 1467 bp, Bovine  19866880825870
  misc_feature (1)..(1): n is a, c, g, or t
nacctcatgtgaagagttgactcattggaaaagaccataaggctgggaaagattgagggcaggaggtgaaggggacaacagaggatgagctggttggatggcatcacagactcaatagacatgggtttgggtggactctgggatttggtgatggacagggaggtctggtgtgctgcagttcctgaggttgcaaagagtcagacatgactcagcgactgaactgagctgaactgaactgattaaagttcagtgttaaagttaagaaaaagtagacttaagtagacattactaactgagcaggaaaaaaattaggcctccaaagaatatgtaataaaatgctgttcctagactgggaagaagtttagataagtaagaaatctattttactcaatatatttaggaaatttatgaatatgagactcagcattttaccccaggcatgattttcagaaataaatttaatgacagaattgtaggattttcaatttacctatcaaactactaggaaattttattttatatgattcataaaatcttcacatcactttctcaaagtttatttacttttcacttgaatttcaatacaaacaagtgattttcatttgtggtcatttcttttatcactctaccactttagttttatactagtaccttttctgacagcaaagccacagattgttaagagatactactaaactaattttccatattagagctataacaaaagagaaagtactccagtaagttctgcctttaaaagcatgtatgccctcgaatacctgcaatagggcttacaaatgagaagtccttgttcaaattaagctgcatgcatcatgtgtcaaagttaaaataagcaatcgcaaattacaaagacagaataaagatattctgtcattttggtacaggtagtggggaaagtatgaaagcaaaagagatcatatatcaacagtctcactgttgtatagttattgaaccttcgtaagcaggaattcccaagtgattactcagtgctgaaggtccagacttattacataaagtatctatcaaagccaagatgatgattgataagcaacttctgtgtgattaatgggtacaggagtacaaagcaaaggagatttaaaaagccaatgggttttattgatagagtcaacctcaactctcaacaaggcaaaatactcatttaatcagcaacccagtaagctgcttagaaaaatacttctctgcccaggtgaaaaactagcatgagcttgtagatgatagcacatttaacaaattcattcatgacattcaataagaaaattatttctcgaaagcaactaaatcaaaattgtcctttaatggaagaacagggttttatctcatctagaaaacctcttgagttcagttgaaaaaatacactgaagctgctatagattaaattaagaatgcaaaaccaatacaatattgtaaagtaattagcctccaatt

SEQ ID NO: 28266 - DNA, 1273 bp, Bovine  19866880894161
  misc_feature (1)..(1): n is a, c, g, or t
ntaactagagaatccccgtggacagaggaacctggtggactacaggtccatggggtcacaaagagccagacacgattgagcacactccccacctcgcacaccacattaggtgtgcaatgacacaccacttgttcaattggtgattttaactcagatgatgagactgagagctgacttcattaatctccttacttatatgaagaagtattaaatgaaagattctaggcagctgctggtcattttgaataagaagaaatgccttaaagggaagcaagaaagaaatggactagacatgagaaagaacttcaaattgattagatattgagaatattccaagtaatggtcataaaatggtcctatcagataccttcaaagcagagaaaaacttttttaaacttttacaaaatcctccaaggagactatcttcaatgggtccataaggttcctgcctgttcactgagacttcattaagtcctgattccctctgcttccttaggagtgcattccctgtctcagaatttgaaatcaaaatatcaagcaatttagatgttgattaattaaattctgcctttcaaattttcaggtattaaagaaattatccaataagaggaattattttctctgcactaagaatggagtgaggtgccatcaccatgtacacactgcaaagcaatatgccctcactctgaggcacaaaactggtattactcatcttttcataaattattttaattcagttctggaaaaacttttaatatagatactttccctttctccatccacatactcatttgcattttcagtttctaggtttgtaatatatatattaaaaaatactatttaaatgtatagtcctttgagattaactgctttcttcagtttacatatttacagagaaatggtacaggcccaaagtcactgtaaataattggtgggaaaaaagatcaaattagatcaatgtgtttttgccaaagcccatgtggcccagaggctttttttagatgtacatggcattgtgttcatctattgctctgtatttctcattctatgctcatctctgggtgatatcattcatgcccaggaattgtcaagtgttatcaagaagacctacagcctttactctgaatgctggactcatctagcaactgcaacctgatatttccttttggacatttcaaatgcctctcaaaatctaccaatttaaactttaactcatgaacttttcctatgtcctcctctgctaaaacgcatggcctcctccaagggatgtctg

SEQ ID NO: 28267 - DNA, 1432 bp, Bovine  19866880964356
  misc_feature (1)..(1): n is a, c, g, or t
naaactctgcattcaaatgggtatgtatttccttttttcctttgtcttttgcttgtcttcttttcacagctatttgtaaggcctccccagacagccattttgcttttttgcatttctttttcttggggatggtcttgatcactgcctcctgtacaatgtcatgaacctccacccatagttcttcaggcactctgtctatcagatctagtcccctgaatctatttgtcacttccactgtttaattataagggattttatttaggtcatatctgaatgacctcttcactttcacccttcaccttcaccttgtcctgttctcttcattcacagttatgttgctctttagttagttcttcaaaaatgtcaaggtttctgtagcttgaaagccttccacaaagttttccttccacctgaactgctctcagcacaaggcaccactaccataacttgtatttatagtatctcttcttcagacttgtggttgccaaggggcaaaaggttgggagagggaagaagtaggagtctggggttagcaggtgtatgcttttatatagagaatggataaacaacaaggtcctactgtgtagtagaggatctgtacatacagaacctctatattcaataccctatcaaaaagcacagtggaaaagagcattaaaaaggaatgtatatgtatgtataactgaatcactttgctgtaacagaaattaacacaacattataaatcaactttgcttcaattacaaaataaaataaattctcttttcttcagtgaaaccttccaaacccactcacacaagccatacgaggttaggtttccctattatatgctctggctaatggaattcataaatctgtcaggatctgctgtgttttattatattaatgtaatagaaggttatcttcctgctaaagacccaaaaataacctgaaatctgttatcctcataaatgaatatgctttaaaataatacaaatcatgtcaaactacaaggagagttccagaggacagagaataaattcttctgcctcagcagtttgtttggagactaaaatttcctcataggtttgctactcaaggggttcagccttcttttgaatactaaactgtggttcagtagaagtgcccccaacctgcatgaagaatggggcaaatcaatattcgcattattgtctggggtgtgggggaggagtgggagatgaacgcccaggtgaggtagagatctttccacttgaatattccagatcctgagttattcttgattctgctgtagatcagcatcttagagcacctgcctctccacagagcccagactatctccagtcctccggtgatgttatattgtctctgctgtgaatggtgtgcaactagattttggtagacaattgcattgctagagcttttatcatccactgacacctctttctaggag

SEQ ID NO: 28268 - DNA, 1064 bp, Bovine  19866881035589
  misc_feature (1)..(1): n is a, c, g, or t
ntaacacagaaggagctgaaagttttagataatgaaatgcttagcctggtttggacagactgcactgtaaaccaattcctatcactccatgtgggtggatggaattttggccaggtcagtggcatttgagaggattaagataggagaaagtgttgaattccagagatgggacatggcagtattagaaaaatatttctgttgcatcttttgatgtgttggggacagaatagtaaaggggcttaacagctagaatccctaatctcatgcctcacttaaaaaaaaatactgtcccaaagagccttgggaaggcgcttaaatgttcccagtggtggagcttagccatgccaacagcagcaacagcaagcacagcgaaacatgatgctgcctcctctcagtttatggggaagtggtaatgtttctacacttcagccacgcccttcactttgcccacctgtcatcttacttttagctctttgtcagtaagaaattctgccctggttcttccttttgagttctggctattctctcttatttccctgtctgaaaactactgttgctgtaatgcactggggaatgaaaacttcaaagccctgatcttaaagaatctcttcctgcagatctaggtatgacacgcatggtgctagagtgagttggaaaggcacacttagtcactttctgtgatatctttgtagaatatattaatacccagagagtataattacagcatattttagatgtagaattaacttaggcattatagtgtgtttttgaatacacctcaaacaaagcagaagtatataaagaaatctgaaagtccatattcagcaatatggcagagaagatttgatatcctgataactttttaccaaacacctagaggaactggatgagatggaaatgtacagctagatgtctgagaaagttaggaaaatctccacatgccccctcaaaaaaactgcagtaggagtcaggtaagaaactggctcttatgcttcagcaagtctgaagacagcttctaattttggtaaccaagaggcttactgtttctagccttctgtttccca

SEQ ID NO: 28269 - DNA, 1225 bp, Bovine  19866881070182
  misc_feature (1)..(1): n is a, c, g, or t
ntctaaaaagagaattctaaaggagtttaggttaaaaatatactccccaagtagcaaacatcatattattttctaatgagcagaaattctctctaaaatagcctcatgaaaccactttataccctgaccaaaagtaactccctgaagttaaatcagtgccggcttcctctgtccaccctgccagatgtggtttgggacgatgacagcccacagtggccctcttaccgagcagaaaaaaaacacggcccagaaacgtcttggcagagcaagcgaacccacttgcagtaaacctaaagttccagtcttcattcatttgtgatgctgctctgtaaacacagcaggattgctttatttagtgtcacgcccattaataatgcagagatctttacacgggcaggtggaggaaattagtcctgagtgatttcgttactacagggtatacgtgaagtcagagggactcagagtctcattacagctgaggcagaagctgatggcagtacagacagaggtcacggagctgcccaccacaccacaaagcgatataagcaaggcacccacctcacagcctttcagtattaaaatgagttaatgtttctccaccttatagatatgggagagatcgaaggacaacttgaagaccattccttctactctttcaccttcttttatctccaaagtttaagttaaaaaaaaaaaaaaaaacaaatttggcaaatatttgcttctgatggtaactttacaaggattggccagtttgtcagaggattcaataacgtaccactagacactgcaaaatgttgcaaataaccctatgagaccgtgagctttgtccttaaggaatttttcacaaaaaatatttttcaagaacatagtaaactttgcaaatccaaagttatttaaaattcctttttataacattcaatgtaaacaatgttgtggggaaataatgtgtggggaagcagagaatgaaaactctgaagatctttctaaaggattggggagcagtacctttccatttacaatacaaactcccttctacttaacaatctgtctgctggacatttatcatatgtgcattctctaattagcagattaaaataagcatgtatgttttattatggcttataatagcaaaagcctagaaaacgccaaaggcctgtcagtaaggcacagtgtatccatacaatggggtaataaacagcggaaaaaggctagacaggcctcc

SEQ ID NO: 28270 - DNA, 695 bp, Bovine  19866881101585
  misc_feature (1)..(1): n is a, c, g, or t
nttttttaaaatcccttttaatcactttttaatacccaccagaagcttgaaattgaaatgttatgactagactgccctcattttccttgtgctacagccacacaatgaatggtgtccagatctgcactgtaagtgtacagatcattttcctcatatttcttttccttactggaagcagcattattaaaccaacatcagagatgaaagaacatgcccagaaagaaaggcttgggaatgttttaaaaatacatcgaagacaaatacatctgcctcagcaaatgatgtctctcctgatctccacgtctgatcacagagtgtctagtggggagggcagcaggcctccgccagcccggctctgatcctcagccacagggaggcctcccgctggttggaggagagtcgagtttccccatttcacaccccctgctttatgtctggcagcgctttatggatgatgcctcgacatgacggcccgcctgcccccgtgccaggcgggcatgaggccttccagagaacacacgtgtgtcctcccgccatggttacggccccccacttctcctccatggtcacagccccccacttctcctccacagttactgccccctgcttctcctccacggttacggcccgctgcttctcctccacagttacggccccctgcttctcctccacggttacggccccctgcttctcct

SEQ ID NO: 28271 - DNA, 700 bp, Bovine  19866881125385
  misc_feature (1)..(1): n is a, c, g, or t
ntacttaggaatatatctatgtaaagaaactaaagacctatatatagaaagctataaaacactgatgaaagaaatcaaagaggacactaacagatggagaaatataccatgttcatgaattggaagaatcaatatagtgaaaatgagtatactacccaaaccaatctatagattcagtgcaatccctatcgagcctattgatttttaaaggtcaagtttcatttcaagaattatccattcttttttagggctcaaaatctccttcaccaaaaccaaacatgcctattcgatatttcataatgaagagtagcaatctgagaaaccttgaaatttctcaacagaagggtatctggtctacaactcctagtaatgagcggaagctaaatcgagccttttgggaaagcagcatggtgtacttggtattttctgttcaaggatctggacatttccaggtgagccatcctgaaacagtaaaagggcattattctggctatagattagatcagttaaatcatagaggttaaaaacaagctgggtttttattgcattggaatgtaagcatgcactgtgcttgactgaggatgaggaataaattgcaccttttcaaaggaatgatatatagggatccttatttttgccttgttttcctagagtctctccagataaacaacttttccttctgaggacaacttaagacggt

SEQ ID NO: 28272 - DNA, 780 bp, Bovine  19866881142431
  misc_feature (1)..(1): n is a, c, g, or t
ntatgtctctgcttttgaattgcttctaggttggtctaactttccttccaggagtacacgtcttttaatttcatggctgcagtcaccatctgcagtgattttggagccccccaaaataaagttctaactgttgcttcctgacctgaatatagatttctcaagaggcaggtcaggtggtctggtattcccatctcttgaagacttttccacagtttattgtgattcacacagtcaaaggcttaggcatagtcaataaagcagaaatagatgtttttctggaactctcttgtttttttgatgatccagatcgaaggtgatagcaaccaccttatccatggttttgctttccttgatttcagttacctatggtcaatttcagtctgaaaatattaaatggaaaacttcagaaataaattgttaaattttaaattgcacaccatggtgaagtctcccaccatcctgcatgtcctgcctgggacccccaaccatggacatcatctgctcaggacatccagtcatcaatatcatcatggctccatgatccagggccacccagagcagatgatcctccttccgacatattatcagaagatcagtagtagcctaatattatgacacaacgcctacctcattcacctcacttcatctcattacacaggaatttttatcatttcatctcatcacaaggaaaagggtgcatggtgtaaaataagatattttgagaaagagagaccacatgactgcaattttcattacagtatttcattaaaattggcctat

SEQ ID NO: 28273 - DNA, 1340 bp, Bovine  19866881143453
  misc_feature (1)..(1): n is a, c, g, or t
nattattattcttttaatatatgcctggattagataaattgacatattatataaatattcccaacattttttataaatgaaatcatctttagttcttagagatctctgtaaggtttggtttagagtttttctgctttcttaaaatgaattaggaagcttccattttttactttaattatttaagtaattacaggcattacatttgaaaaatgttcagtcagaattcagctatgaaattatctcagtctaaggctccaaaaagtttagatttctaattatcttttgaaatctcctatggccattgctggtttggtgtttacagttgatgattcaaaggctttcacacctgggacattaagtgacgatttcagaaagcttcctcaagaaaagtggtaaaatgcttggttgggaagagcaaagtcctaccagaaaaccactggggagttgctttattagcttacactgcaaagaatcacctctcctacttggatctgagtaacctctggaagcagtagaataatcgaacccaaacaagaagctttatttgctcctttgttgagtgttccttcaaccaatagggaaaaaaaaacaaaaaaaaaaaaaacaaaaaaaaaccaaggttctagcccattttctttgtccccaaacctgctttgccccagttagattttaaagcattttaaaacaaagtcaggaaataaaatggtcattttcattgcagaactaattgtttaagctcctaaagatatttctctaaatatttcaataagcctttcctctctggcctctcttcctcatactagttaactttcccctcttccttctcatagttttcagtgtctttttatcaggcagcttaagtatgttccctaatgccaggcgtttcctacatcattctgtttataattttatctttgcttccctgagtgaactatcttcccaaccctcctgccagctacacccccacatcaggcatgggcttctttccaccatgctcttattgttgctttgagtcaccagaatcaacttccacagaacacactaactcagcagtggtcccttcctgaaatgatttaattgcttctgactcaatacctggacttctcctgatcactagcaatgtccaagttaaatctattgttttagaaagtgaatcatattgagcatgctgtaccactgggagatgagatgcagaatgagctgttaaaggagatatcgacaagctcaaaaataaaattaagtcacatgaagatagtcagaaagaccgtttgtactttgtgttctccttcatctcagagcaacataaaaaaaaaaaaaaaaaaaaacaggcacacatttta

SEQ ID NO: 28274 - DNA, 1279 bp, Bovine  19866881171306
  misc_feature (1)..(1): n is a, c, g, or t
nacacacagtaaaaggctgaacacatattacccacgtgcctcatccgtgtggtttatgatcgcagcataccacactagatcatgacacagtgctaacacagaaacgcaactaggtcagttgatggggtcaggaaaagcttgccacagaaggaaacctgagccaggtccaaaggcaggtggacaaaagtagtacatgccaggccaaaggtgcagcacataacacacagaggcacaagaagctgaaagaagagcacagttttggctctccaaatagcctgggatagttccaacgatgtgtgtgtgtagcgggggaggcactgttaatgaacgcggctgaaggagtgggaaagatcagatcacaaagaaacttacaggccacgaggaggatcctggctttccttgcacagtattcactattggcattgaaggtgattctcatggttgataccagttatatacaacaagatgaatatgcacttgtacatttcaaattggaaacaatacaagaaaaaaattaacgttttaatttttaactttggtttaacttctgttcaatgttgcagagaaagggagagaggattttgttaaagggtgggaaagaaagaggcaaagaaaaaggaagaggacggacagaaatgaaaaaagccaacacgggcacgcaggctggaggggaagaccaaaggcccgaccagcgattacgtcttcagaccctgacttctgcagcagcaaatggtgcaacatgtctgcacaccatgaatgttatgaggtagagcattccaccacactaaatgcactccacatttatgaagatcagcttcctaagacagtgaaagtggcctccagaatccgtctcaaagctgtgctacatggacaaccaaccaacaggagttgatggtgagaggaaacctattggccacaggcaactagaatgcacgtctccttcccaagaaatgtttcccaagatgtcacttgttttggctgaacacaaggctacgctcaggaaatatgtcaaagacctgaattagggggttaagatgggaatcccagagtggagcatggatatagcacagactcacatatagcatccagattttattacagtcatcagtgttccttcccatcctctccttcactttcatggctaattgaacactggcttctatcccaacactgtggctctttctgaacaacccctagagacagatgaaaaagactaaatatgacatattttatagaatgattagttatggataaagattgctcttccacagtctccttg

SEQ ID NO: 28275 - DNA, 1205 bp, Bovine  19866881172816
  misc_feature (1)..(1): n is a, c, g, or t
ntaatagctttgctatttctattctaaatgtttagacctttttcttagagggcaaaagaggagtctgtagagcattctgagcctttcaatatggaaactgtccaaataaggtgtaaattcagcacagctatttgggcaaaagagatcttgaacaaacattgatatttctgcagttcagtctcctttggaagaccagaaagttcctgcattaacaggagtgaaagagtaaaggctgcacaactccagcatactccaggggccccacgattatctacattttgtctggtcataaaaacgaaacagcagctgagctaaaaagagaacaaagatggatgtgaggcaaagtttagaatctcaaaatgctaacaagccagtctttgatgttgacaaatatttttccagaaaaagaaatacctaaaaacagctgaatttctatactctaatctctaaagcaaaaaaaaaaaaaaaaaaaaggagtatggaaacacagaatatcttaaatatcagtatatatgggtagagttcattgaaaaatatatgagaaaagttttttaatagcccaaacctagaatcataagattcacagctaaaggggctagaaaaatattttacagataggagtgaagttgctcactcatgtccaactctttgtgacaccatcgtggactgtagcctgccaggctcctctgtccacagaattttccaagcaaggatactggagtgggttgccattaccttctccaggggatcttcctgacccagggattgaacccaggtctcctgcactgcaggcagactctttaccatatgggccagatattttacaaataaggaggtagttaataggtatttaacttagacatttcttatgatgctcacaagagtgttgttcacaaataaatttctttcaatagtaggtgctagcttaaaattccctggagaccaaaggattttcaaccaaatataaaccttggccaccatccacaagacttgctggccatcctgtgaaatccaaatctgggttaaatgcactcaccaattccttcacaagaaatgccagtacaagcagttgaggtgtctgctattggcatttcaaattagtggagaaaatagctgcctattaaataaatggtactagaacaattggctaaatttggggagaaaagttaaacctcttcttcataacagttataaaaaacaaaata

SEQ ID NO: 28276 - DNA, 937 bp, Bovine  19866881334924
  misc_feature (1)..(1): n is a, c, g, or t
ntaatctctcatgaattttaaaggctgtggtatacgagagagagagaaggaaagggaggatctttaaggtagactattaaaaatgaaaacttccacaaggagacaaataagttatagttaaaatagtggcaaaaatctctatggtttatacagttaaaatagagaggaaaatatcaagaagaacatttgaaagtataaatagatcaggggccagaagtggactttgcttgttctaaattagttgagaaccagcctttgtgggtttttaaagaaaagtattgggggcaatgacactggcccatgtcctcagcccctctccatgcagctctagtcctgtgctctagtccagcaaacttcctttgaagtattctcgaagtgggagactggttctatgtaagatgaaattgactcagaagttttttcaactgcccaaagaaattaataccttcagaaggagcttgaggacactgtcagaattaaaaagaacttggtgacaatttgacaatgaagtcacttttgaaacttcagaagagccagactctatgaagatttaaagtgatccattggaggttgtttaaaatgcaaaattcactttaattttgaaaatgaattgaagttcttcaactgtgttccttgtaaaagtcactggtttgcatcctactgaaccccaagatacaacaaggccaatttatttcttctctgccttccttcctgtctctgttatatctaaacccttagcacagtatctagtacatagtcaattggtatgaaatatacattaaataagtactgtaacaatgctcagtttaattgccaaatacagattggagatttgaaaaagtagtatatattacatagtcatgtacttcagagatataaaaattctaaatagctgtgattactcatgagtttcttaaagatgtcattgagggacttg

SEQ ID NO: 28277 - DNA, 1235 bp, Bovine  19866881531673
  misc_feature (1)..(1): n is a, c, g, or t
nactgttatgttagtaatacttactaaaatactaagggctacttgcattttaatagggccatgttttaattgtataaaagatttgttattatacattttttttttaaagggtttctccaaagacacttctgacattttgcaccaatggggtactgcttcgtacactgatggcaggagatagtacattgtcaactgtgacacatgttattgtggtaagatatttaaatttaaatagctaattaagattttagaataggatatatgtgagaaccaatttttttttaaaacaggctcttctaatcaagttactttttattttccataattattagaaataaatatttgtattaaagatattcttgccatcagttttcatgagtgaaaatagatagctttgtaaaaaagtgctttttatgtataaaaatgatacatgtatttcaagagtctccagaatagtgaaagttttctttttttctctgtgcttagtcatctattttctcttccatatcttaggagaatacttaaagtcagttaacttcccggttatcctgttattttaactagctgctgatgaaataagtagatgaattagcaccttattaaagaattctaagcttttatccagtttgtgtcagaaaacttagattaagatttataagcttgtgataagcaggtttggaaagtttttagttctctgcattcaaaccacaatatgcacctggtcctgatgctaacagaagcatatttaaatagattttagatttattaaaattatattaaattagactgtactaattcagaatttgttttagtttctgcagttttacattctgtgggaaaaagggcaatacgttacccacagaggattgttaatatctgagtatttctaaattgtccataaaacaaatttcactaattgactgtttccacatttaacttgatttagtgtgaaactcagcagctccatagttttaaagacttcacttattttatgttttaactgttccatggtttgtttttgtttactgcaggatgaagttcatgaaagagatcgatttagtgattttttacttacaaagttaagagatttactgcagaagcacccaactttgaaactaattctttctagtgctgccttagatgtaaatctttttataagatattttgggagctgtccagtgatatatagtaagtaaaattatcagatttcttcaggattttagaaagaattattt

SEQ ID NO: 28278 - DNA, 862 bp, Bovine  19866881543857
  misc_feature (1)..(1): n is a, c, g, or t
nttatcttaagtttgttgcaactgtttcccaatagtaagaggggatattcccttacatctttgtacgtcatggagttggcctctcggtatcacagtagcactaagaattttgcctgatttgtttttcctagaagaatagatacatttgctgtgaagtttttctggagttagactatttgtagccatgctttcataccttatctctattcatcaatcacaaagcattactttaaactgtttttcccataattaagaatccgaatttatttcaatgagatttataatgccaaacaaaatattcaactttatttctgatttttaaggaaattttcatggagccaagcaaatttggaaccagaagtaaccttagctgtcatagtctgcttggaatatttcttgtttgtttttgagtttccatttggggattcatcttgccccaactctcaacccttgtgatttgagtgaagttgactttcattctcccttgctctggggagattagggggtggagggaatgacttgggcctggctgattaacatgttctatttctctgatctcattgattggcccaaggataggttcaataatcatgctttcactgttttagtagagaaagttctttttggcttttgacttgaacctgggaggatgggatagggttgaagctgctagcagtcatcctgccccaagttggaaactgacaatgaagcccctgtgagtagaagtgagccaaggaatgggaagagaccaggtcctggtaattaatacagggtaagctgagcctagacatgtgtgctcctggacattttagttacacaggacaagaaactacccttctccctccccaacacacactcatat

SEQ ID NO: 28279 - DNA, 910 bp, Bovine  19866881626891
  misc_feature (1)..(1): n is a, c, g, or t
nggaacacggtggtacacctgtggcagattcatgttgatgtatggcaaaaccaaatacaatattgtgaagtaaaaaaaatgaaataaataaataaataaaaatcaataggctcaattaaataacatcttataaatatataaaccaaaatattttaccaaatattcaacaaatataagtagctctatcatggctgaaaacttacacaaggctcaatcaaagtgaggtcaaagaaccaaaaccaagtaccaattttcagagcattcagaatagtcaactctgatttatactccaaatgtactttcagaaaatatattaataaacttgcaaagactgaaaacaaaacaaaaactgctcccagcttactgcctggatacaatttccaggtgacaatacaggaagggaaacacaaacggaatccaatggtctcactgaacttacagtttagaggccacattaactaggttttgcatggcagtgtaccagatagacagagaaggcaatggcaacccactccagtactcttgcctggaaaatcccatggatggaggagcctggtaggctccagtccatggggtcgctaagagttggacacgactgggtgacttcacttttacttttcactttcatacattggaggaggaaatggcaacccactccagtgttcttgcctggagaatcccggggacggtggggcctggtaggctgccgtctatggagtcgcacagagtcggacacgactgaagcgacttagcagcggcagcggcagcaccagatagaagggagctgcatgggaagagaacaggggactacagaaggggtcctcacaaggttctggctaagtaaagacctgaacatagtaagaaacaatacctaagcaaggaaaaattcaaagtaaaagttcttagagct

SEQ ID NO: 28280 - DNA, 717 bp, Bovine  19866881672937
  misc_feature (1)..(1): n is a, c, g, or t
ncctttgaaattaacggttctgctcttataaataaccaggatttcacctctatcaacaggaatcttcaagtgattgaatggtcatctgcacagagtgttgtcagagtgatttctgcaagatgttgttattttctcttcatgccattaacccaaacagcaggacccagactaccaaccttaagttgctaaagtggcatcaaacaaggaagctggttaagatgcaaccactcataatttgaactagaatctatgaatcaggattaggacaaagaataaatgtccttttgtcagtaaaaactttttttttttcaatagcaaaaagagcaagagggacacttggtggtcagtacaaggcatcgcaaaggaccgtaccataagaaatattctcagggaacttggcctggagttttgaaggcaggagagaactctgctgttcatagtgaaacaagactcgtgtacaaaatagcatcactcttgccctggttagatgccaactatcagaagtgacagcacactgctgctattgtgaataaacagaagtcagtgtgtccaaagaacattccaggggggaaaaaaaatttagacaactgttaaaagtctgggcaaaaccccatgtgataaataacaactgtaaataaagaattatctgccactgcacagaacttggtcactcattcttacgctcttaacttatcattcttcctgggcttaaattga

SEQ ID NO: 28281 - DNA, 1463 bp, Bovine  19866880371354
  misc_feature (1)..(1): n is a, c, g, or t
nttgggcccaggacaatgtggtctgagggcactgtacctagaaaggaaaaggtgatccagtggacaggagagttgtgtttcattcattttgatatttggcaaaactaatacaatattgtaaagtttaaaaataaaataaaattaaaaagccctcaacattcagaaaactaaaaaaaaaaattaaataaaatatgaagatagaggttccgtatcagtgctttgatgagatttttgtggcacttgtgatttatttcattaaatactttcttgattgtgtactcagcaaggactggaaatcagggatgtaaagagcttgtggagatagatccttctggaaaatttcagtcttacagagaaataaaatatagaaatccaggctatgttttaacgcccatatcaatcaccgtgaaatcctcccctaatgaaaatagaatcctatgaaattattaatttgcaattgaaaactaaattttctatcatcttgtagtattcactgattgcttcctatgtgagtatgagttttattttcccctccagattaaatatttgaggtcagggaccatgacttactaatggaatgataaataagacaggttaatagaataatgttataatccctgaaatctgtatctgacaaatgcatatgatataaacagtgaaatcttgggattacttgtcccgatactgaagaagtataccttaatactggtattgttgttgtttagttgctaagttgtgatgactcttttgtgactgaccccatgcgctgtaaccttccaggctcctctgttcatgtgatttcccaggcaagaatactggagtgggtttccgttcccttctccagggcatcttcctgacccagggctcaaacccatgtctcttgcattggcagacagattctttactactgagccacctgggaagcccttaatactgtccagtttagaaaacaagtatatatttcattaatttcattagaatcgggagtatacacattaattatatattttgaaaacaaaagtttgtccattttttagagaaaatatttttccaatgtgtcaatctagttcagcaagtgttttatggtcttccgttacatttcttccttatgtgtttagtattgtttctaaatgaagttctattggtcaataataccaagtgatgctcttttctactggattactcagattatgccaccctggaagacgtcgaaatttaatgtcttttgttgttgttgtttgtttctggctctgtgtttgttttggactttgaagaaatgtttgtggattttttttttttttaagcagaagagatgtttgagaatttagttctaagcgtctggatgttcattcattctgcttgtaatggagttgtctgttttactaatgtctactgacagcttctcattgatctttgtagttcttttctaggaaggtgaaattctgcaggctcaaggtgatggg

SEQ ID NO: 28282 - DNA, 1690 bp, Bovine  19866880506358
  misc_feature (1)..(1): n is a, c, g, or t
ntacctattggtctccccagtgatagctttacaaggccgaacgaaaccccacctgtttataaacttgttctagcacctgatacttaaaaattattcctcaaagcttaaagaggtgacatggtctacccactgaagataatagctaaaatctttatttctctgcaggctccaagtcagttgtagctactctgcaagtagcagtgctctcccagttaatgtccaggttcttactctcccaccaccccttcctgagacccagcctggaaacctcactctggaacttaagattgccaaaggtaagaccctcttgggtagactatctggcctctagtctgactaaagtcatcttctgggccggaagaccctaacttggtaacaagatattattcctttcaaaggcatttatgtgggtgatggtttatcccaagccacctagaggttccaagctctttactgcttcagcttgttttggcctgttgcagataaacgctatcgctcctactacacggctagtgactacccagtggtgaagttacttcgggatcccatctacgtggaagtctccatccatcagagaacagaccccagtctcgagctgcgcctggaccagtgttgggcgacacctggtgcagatgccctgctccagccccagtggcccttgcttgtgaatgggtgcgtgtctttctttcacctgtgttaccatccctccaagaagcccatcttgactgctggatatccttgcttaggtgcccctacacaggagacaactatcagacaaaactgatccctgtctgggaagcctcagacctgccgtttccttctcactaccagcgcttcagcatttccaccttcagctttgtggactcagtggcaaagcgggccctcaagggaccggtacgatgctgccccctgtgctcttcagctgggctctaaacccaactcaaatgtttccacacggtaccacttttcatctaaggttgccctgtaacattggcttttggtattgcctcagagcaatcaaaggatgcctgtggcatgtgtgacatgggtcaactagagtctggtatcttagtgcttctgtgatgtcagtttggtttatcaattttctgataattctttgacttcttcctgggggagataaagcaggtttgaagacttaggatgtgctagacccatgatcccaattctttcggttcccaggtgtatctgcactgcagtgcatcggtctgccagcctgccgggacaccatcctgtgtgacactctgtcctgccagacgtaaatatccaacctatctatgccagaagccagattaaagtgttatttggagtccagtgctaacctttagtctgtggcacatgaatcaaactgaagattcatctaattaacgagccttctttaagtactttcatgatgtaatagaacagaaatacaactagtgtcctagaattccaggcctaaatatttcaggattaatagcttatatttataattttcagccttagtttttctccatataaatttttagtagggagtcaagtgagttcacagcctacaatctaataaaacacttctgtggtatcagatataaatgtaggcttttatttatcagatataaatgttggcaggtctggcaacatggcctcaagacttatagatggcatgggattgcagacttagtgtgtgttaatt

SEQ ID NO: 28283 - DNA, 642 bp, Bovine  19866880528576
  misc_feature (1)..(1): n is a, c, g, or t
ntctcccctcccccacccccagctactcccttggtagctttgtcccaatttaaggattctttccgtagcactttgctcatctgtgtgcatgcatgctcagtcatatctgtctctttgcagccccatggactgtagcccaccagactcctctttctgtggaattttccaggcaagaatactggagtggattgccatttcctcctccagggaatcttcctgtcccagaaatcaaacccatttcccttacatttatcctgcattgggaagaggattctctactacatttgcactagctcttattttattcccattaaactattcatgagaagaagagagcattttatacacttagttaagtttactttttttttttttttctttgcggactctttctttgctctatgcagactgctcaaggtggtggccaccgaacgctcctctacggtcacgcaatactgctgcggcattcctacagtggcatggtgagtacatgtggagacttcatctcccctatggtcatgcggagctatttgtgcatacagggcaaagaaatatttggtaatcccattccattgatggctttaataagcttgaattgtatgtgttttttaatatatttgaacactgtttattttctcattt

SEQ ID NO: 28284 - DNA, 1762 bp, Bovine  19866880569427
  misc_feature (1)..(1): n is a, c, g, or t
ngctctgtagcacaatttggcttttctttctcacattccccgtgcaaagagtcacctgcacctcggaaactcggggattgtggggtggggactttgctcactgagatccctggaggacttgggggatgcttagccattatctcattttacagaagaagtttaaggtgaaagaaggcacttacccagagcccacatttactgaaatacaatgcaaagggcaaatactggtcttctgatcctcacattgaagaccctgtatgcgagacagcaaaagagacacagatgtaaagaacagacttttggactctgtgggagaaggtgaggctgggatgatttgagagaatagcattgaaacatgtattttatcgtatgtgaactagatcaccagcccaggttcgatgcatgagacagggcgctcaggactggttcactgggatgacccttgagggatgggatggggagggaggtgggaggagagtcaggatagggaacacatgtacacccatggccgattcatgtgaaatgtatggcaaaaccccaccacaatattataaagtaattagcctccaattaaaaggaaaaaaaaaagacttagtgtctgtggcttgttgtttttgccttggggtgacagctctcataaaggtaagagttctggagtgatacttttggtaattccacactgaaaggattttatatgaatgatcctaaaatttttgatgtgtatttttttcttcccaggattcatacctgtgtgtagcctgggagtggctcaagtgggcaggctgaactttggaaaggatgtcagcaccttgaaatatttcaccatctgtggcttacaagagggctatgaaccatttgccgttaacacaaatagggatattaccatgtggctgagcaagaggcttcctcaatttctccaagttccatcaaaccatgaacatattgaggtttgctttttctttaaaacttggaccatcagccaaaaccaggagtgggagttcctacttagacaattactgtcatttacttaaaataatggttctaatgttccattataggcgaatctaaggatagaattaccctctgattttaggtactgtgtgagaggctgattagactgattaactgtggttgagcctggaataactttgtggttaatttgcatttgatttatagttggtcctctgcttctgcggattcaaccaaccgtggattatgtagtacccttggtagtgtttccccttgaaaatatccacatcttagtggatccaagcagttcaaaccttcattgttcagggtcaactgtatgcaattctttttttaatatatatacatgtatcggcaatggcaggctcaatctgagtatatacagttgtaacgtgaatttcccagattgtcttctgagttagcagaactgtgagcatatccttacacagccatccctatgtttaatgatctcatttataaaattatgccatgagtaggccatgtctggagttttaaaggtgtgatgcacttttaaaggggttttggaatcaggaagtcaacagtgctgagcatctgaatgattgcttcttcatttgctaggtgaccagaatagatggcaccatagacagttccccgtgtttaaaagtcactcagaagtcctttggctctcagaacagcagcacggatatcatgttttatcgtctgagcatgcccatcgagtgtgccagaggtcttctccaagactgcagctgggagggatccctggcaccgggct

SEQ ID NO: 28285 - DNA, 3812 bp, Bovine  19866880586969
  misc_feature (1)..(1): n is a, c, g, or t
nagctttgagagatttttccatctgtaggaacacccacagtcaagatgcagagtgtttccattgcttctcagatcctgtgctttttgcagtctatccctccctacaagcccaggtcttgatcacctgtgttctgccactacagactagtctgcgtgttccaggacactgatacatgcagtcacacactgtggtctttctgagtctggcttctttcactcagaataatgactttgagattcattcatgttagaatacatgtcggcaatccattcctttttagagcctaatcatggcattttgctacttatggaaataccccaggttctgtgtggttttttttttttgttttttaccagctgatggacatttgagttgtctccagttttgggctcaggtaagtaaaaccattatcaatattcatgtacacatctttgtagagacatacatttatatttatattgagtaaatacctggtactggaaaggctacacatatatttatgataagtgaatatttaacttattaaaaataatgccaaactactttccaactgactaaccatttttcatcccaacagcaatagatgagtattccagttgctccaaagcctactcagcattcagcattgtctacttaaaaaaaaaaaaaaaactagctattttatctgtgtgtagattaaaatatttcggattatataagggaaaaaattttccagaggttattcagagatgcaaagctgcatgatgcttgactagcacatcagaaggatttgaggaagaatcttactttttaatgccttcaacagctatgcacctgactggaaaaaagcagagagtgacagagaaaaaaaaagccctgtgctcattggctttacattatacaaagaagtagattttgaaaaatacatatagattttaaatataattttaaaccataaatatttaaactatagcacagatatggaagagtagaaaggtgactttggagcaatgactggaaggatgtctggaaaagagccatgaggacatctggcgaaagaatactacagatggagcgaacagcaagtgccaaggccctagagcaggcgcagacctggcaagttccagtcacagcaaggggaccagtgtggctggagcaacaagaactggagagtggcaagaaacgaagtaagacaatacgtgatagatagggtaggaactattcaaatgccttttaccgtcactcaaagtgagaaagaaagtctagaaggttctgggcagaagattaacatgaaactttgaagagatactctggctgcaggggaggctcagatagactatttagaatggaactgcaattaaaatatgggggaaatttatccgtattttggtaaacatacatatggcttactatgattagagggcacagcctttagtatactagtaataccttgcagtgtgatatgcaaacttgtgtgatataaattatatacatgagatgttaaaacaacctttaaagaaagtaaaaatgcataaagtaaaagtgacggcaaattattgtaaaaggacataaacatccaagaatataaagttgattctctttccaaagaaaaatgcatgtgattggagaaaatatcttaaatttcttgctctttataacttaaaattatattacatataatagtatgtattatatataataacatatattgtattagtcactcaattgtgtctgactctttgcaactccatggactctagccaaccaggttactctgtccatgggaattctccaggcaagaatactggagtggggagctattcccttctctagggaatcttcccccaacccaggaattgaacccacgtctcctgcagcacagacagattccctggtgtctgagccaccaggtaagtctattacatataataagtgtaacatatttataatacatagtatattatagttataacaacatataattataactatttatagctaaatatcttgagaaacaactataaacaactgtaactcacacaagcacagcagtaagagactgtgcctaccttttccagatctggctcccgcaaagctaaagctagttcattattatccatcaccgaggctgctgccacatccaagtggtgttgaacctctcatagctggtgaggctgttaattaaagcaaagatggaacaaaacctgaattgtgctgtaactctgagtcccatataaaaacatactttcacatagaatttcatttctaaatataatgcatactgtaccaatccaaaataatttaaagtttagttttaaaacccagtttgtatatcccttttatcttaaagattcaatgaaagtcatacatttacttaccaagaccaacactgctgttttccagtaaataactcagatgatcaaacatagctttctgattctgcctgcttatacgacagaagtaacagagaaaacggcaacagttggccaccatcttcggaaaagtgatttcctacataaagagcatttagttagctgggaaagtaaaggatctttgttaatagtgagttctgaagttgaggtctcaatcagattgtgcaatcatgtgtgcccatgtctaccaagcctcgggtactgaagacctctgaatgtccagatgaaggctcacctagtcctagagctaccaaaaatcaagcctgacactaataggaaacctaactattgtcaatggtctgatatggaattaatctacagccctatacttaaaggtagcatgagcctactttaggattcagacaggctcaactgtgattcttgatgcccactattagctgcgcttccttggaaaattaaaccatctcacagattttgttctgcaaaattggaataagatggataataatatttactttaggcaaaggaaggacagttcaatgaggcattttgtgaaaaatacccagtttaatatttggaaccacataataggatgctcttatcatcagcgttgttgttgtattattattaagattccaggaaattcagatcttccctgactggcacatgacttgtctcctgtgatgaacacccttcctggaaggtctgcctgctaggccccagcaaacatatctcccttgacatctagatcttaatccccaaagactccaagttcttattaaacagaatattttataaatatctttataagtttgcctaaccaagagtctgaacatgagaaaaatggactcaggaattcagtggaaccaactgttgtctgaatcaaggaaacaggtctggatagcatgtttttgttacagactttgaatgtgatggaaatgtatttaattttataaaaattagcatactattaactgttatagtttctagatatcttctaaatgagaattatacagaaaatagcaagttacatggcattagataaattattaggcttccctggtgactcagatggtgaagaatctgcctgcaatgcagaagacctgggttcagtccctgggtctgatccctgagtcaggagatcccctgggaaagggaatggcaaccactccagtattcttgcctggagaattccatggacagagaagcctggtgggctatagtccatgggatcacaaagagtcagatacaactaagtgactaacatgttcactttttcaagcaaattatcaatatcaaagaaaaaaacttcagtcagacctctttatctgcaggttacacatctgcagattcaaccaaaaagcaaaaattacagaatgttttaaaaagcaaaaccgaatttgctatgtgccaatacatttagatagcatttatatcag

SEQ ID NO: 28286 - DNA, 822 bp, Bovine  19866880758647
  misc_feature (1)..(1): n is a, c, g, or t
ntaatagagaactggtgagagcctactgtagaggaccggggaactccacctcaatatttgtgaccaaaatattcaccaagctaagtgaatacagctatatccatatagcagtatgcacttagctgtatcatagagactaaccacaacactgtaaagtaacgatactccaatgaaaattaataaagacaaaaaataaaaacacaaatgcacaatattaatatgacagaaggaaaagaaatgctttggagaaaactcaagtgaggtaagaaatggtgctagtgaggttatgggggaagtaaggataagtagcatttgataaaaaatagtttaaaaggatatattctgtcaaattagactgcaattttttaagaaaataaagtttactttaagagaataaaaattagaagttgtttagttcaacaggtcatgaatatctttaaattactggtaaattcagaatctatcacaaatatttgatagcaagtgaattaagcaagtatttacacatgaaaatttttttactttaaatacaaaaaatctgaagaagatgttcaaattgaatgacagtaatgtaataaaataatctatacattaaagagtcataatctaaagcagtgcataactctggcatggtgattcaattacatgctggtgattcaattacataccgacctccttattgagttcggtgctggtatctctggaaaccacatcattcaaacacatagaaatatgtagtatactttgcttcagagtaggaagttgtctttttagagacaaaaagacactaaaacaaggcgtctacaagtagagggcatatat

SEQ ID NO: 28287 - DNA, 2105 bp, Bovine  19866880809458
  misc_feature (1)..(1): n is a, c, g, or t
naaattagcctaggcacttacgtaacacagtcagctatatagtattgtaataggtttagaatacttttcacatgaataatacataaaaataaacacaaaaaataaaagactgtcacccttacgttacagaagtttggaaagtacagtagtgcagtacaacagctggatacaggggttggcatcaagtgaacaggcaagaagagttactgctggaggagggcgaggaagtagaaatgctggagctgaaggagcgtcagtgataggagacggagggcaagctgccgcgtcacgcatgcctgacgtgactggacatgtgaacccacatgcacaactttgaaagtttgcaacttggggattcatatgcagaggacttactgtcctcccatcaacaaccacaaccagctcttctgaaagagagctggtgaggtgagtgggattgaggggcaatataagaatcacagaatgaactgtgtcctcagactctttgagaaggtaacgtcatttcttcccctctgcagaatcactgaggtcctgagtcacaggacaaaagttccctaaactcctggcctgagtcacatgcttcaaataaaagactcttatctcatactcccttttattcatgcatctggctttaaagaatttacagtgtgattttgcaacgagaggagaagaaagtgaaatggaaataccatgatcttgatcaggtgcctccaggttgtagccatatcccagcagtgtgcgtacagcctcacggaggctatccttattggatttcttagttcggtcatctagaagggcataaggaacaagccgagggtttcttctgttctttacatcctacaggaaggaaaaaaaaaaatgtatgtgatcatcaaaggacaaccaacagcatttggaaatgacacagccaccaaatacatcaaaatataaagtgtctgaaggtagatattgtaccttccctttgtctttccaggttgtaggagttagtgaaatactcccagtatgaagaatctatcaagtgagtcactgatcaatgtaaatcaggctctctccatgaaaagaaaatgtaaaaataacagcaataacaaaagccaactttaatgatctcaataaccatcatccatctgtcaagatcacaaggcaatggactaacttaagagaacctaccatttccttgccaagttgactgacaggtctttgttacaaaaagagcctaattagtaaccatcatctctctgacttttgagtcaatgtaccacacaaggcagctgtcccttcctcagagaaaagtcagtatgtggatggccacctcacgacctcaaatggcttaaaaaaataataaactgactccatcaactggtaaacctggtaatagtgggagtattaaaagaactacaaacctcacaatttgtcttttataaaagaggctcccagtttaaagcatgattaaaatggcagtgaccaagcaagaaggcaggctatcttatcatcttaacaaaaggataatttaagagtaaatacaaaatctgggccgtggagatgccccaagactgcgagtctttctaacacttaagaaattacttctttgcattcattcactgctgcagattttatcaaactttccatattccaggaggcatgctgctactgctaagtcgcttcagtcgtgtcccactctgtgggaccccagagacagcagcccaccaggctcccccgtccctgggattctccaggcaagaacactggagtgggttgccatttccttctctgatgcataaaagtgaaaagtgaagtgaagtcgctcagtcgtgtctgactcttagcaaccccatggactgcagcccaccaggcttcactatccatgggattttccaggcaagagtactggagtggggtgtcattgccatccaccaggaggcatattcaatctcaatttatcttagcatgaagaacaatttgaaggctgtatatattcccaaacattctccaaaacatataagctatttggtggacagcatttgttctggttggggaggaacaaagaaaagtgtttcccaatttcttcttccccttctctagcaaatctgtagtaataccttatactg

SEQ ID NO: 28288 - DNA, 2055 bp, Bovine  19866880833073
  misc_feature (1)..(1): n is a, c, g, or t
naatcgtgaaacatggctgaatacatcgactacaattgtttctgtagctctcagctcatcccctcattcttgcttcttaatttttttgccatcttctcacatccactcagaaaggaacgtaagaacatcccctaaggccttctgctgttctctcttctgtgctttcttccttggacatctcatgtagtctcaaaaaatctcactccaattttagcactgacttttatagtgatccttacttccattctcctaaagacctgtgacacccctctcccgcatactcttaacctctgtctccacccctgcctcatccagtcatggcccagaatcctgggtatcttaaagaaccctccaaagagcttagacttgtcttgaaatatcttttgtcagctgctagtaaggtgtctttcagctaacttctcatctaacagtggaagcagcttccctgaataaaaaggtcacctcaactcagccacacgtggcaacatataaagatattttgggttgtcatgactgggaaaagagaatgctagtggcagctggtgagtagagaccaggaatgctgcttacaaaccatcctataatgcacacgatggcacccgtgtcaaagaattaaccggcccaaactatcagtagcgctgaggctgatataagctgctgttgaatagtaagtcaattcatttttctctgtgggagaataaataaaaacaaccactctggtgtaaaggagagaatggatggcattgaactctgcagaatgagctaaattaaaatacacgaactcatataactaattggaattatatgaatatataattaaaagataaagtcaatggagcagttagaatgagatcagagtagcttttgacaataatatatattccattttctgacattcttttctctcatttcatcttaatagtccttcctctaccttgcctggtatatgaccatgtccattcttggacactacaacaactttttttttgctgctcatcttctggacattgctatgggattcaagacgttaagaaccatcttgtcatcagtaactcacaatggcaaacaggtaaaaatttatcttttctttcccctgcaaaaactgaaaaactaacaaatattccaacagaagtaaaaccaaacctcaaataacagtgtacagttttaaagcttttgtggatagaggagctgtactttttctcctggaaaccataaggatttgtagtttgagagtcccttagacctacgttcaagtcttggtttgattgatttagctttgtgaccctggataaattatttaccattcctaaatctcaactccctcattttgaatgaaaacagcaaaagtacctaccttaccagggttttgtgagaatttaaaataaaaacataaacgtggaggtcttagcacaggccctggcacagtaaattctcaggaaaacagttactgttttgttcctaatatgatatctgctgtatttgatactgtgaggaaaccaaagtatgctgcaatatcctcacacactagttgcattagtaataaaacagatgctgcatctgtaatttaatacagtattttaaaccagatcttcttgggctcttttctccacttttatattgggcaaaatgaataataatgtttcacacttgacaaggtcatgcttacttagaggaaagttggcttaatttcagataatcagcttatgttctaatgcaacacacttgtcttgttaaaactttcattattaataaacttatcaattcattctgtatttatcaagtgtccactgagaggtaacacattctatgttatttacttggaataaaagagtccttctttttccagaattttataatccagcatattttaaaattggtgcccttcctaaaaccttgaactatgtccacagttaaattcacattatcatgaccttcagttttctaaatttcagcatactgttcttatatatgtcactctagtttctgaatatgagtatggtatgtatggcatggcataaatccagtgacaaaaactatactaagcttattcgaaaa

SEQ ID NO: 28289 - DNA, 2481 bp, Bovine  19866880836119
  misc_feature (1)..(1): n is a, c, g, or t
natagggcttggtatgtgcacatttgggcttctctggtggctcagtggtagagaatccacctgctaatgcaggagacatgggtccaatccctgggtcaggaagatcccctgaagaaggaagtggcaacctgctccagaattcttgcctgggaaattccatggacagaggagcctggcgggctagtccatgaggtagcaaaagagttggaaatgacttagcgactaaacaacagcagcgacagatgtgcccatttaaataggtggctaacttacctcctggggtagaatggcctccaacagccagaaagcctgcatacttcttcaccatgtgtcttcatggagtgagagtggagcttatatctccgagctgtctggcttctagcttacctctgaaccaagtcctgtggctggggaggccgtgactggtccagatcagctgtgctgcatccctgagggtggagtcagctctgcccaaagagcatgactgcccaccattggtgagaagagagtactgtgtactacaaaatgcttttcatgcagtaggtagcgacttgctacccctaacgagtgatagggatagaaaagaactaatcataagaataaatttttaaatcacgaaactaccatgggaaattcagacatcctgataaaacccttattttatttaggattgctttcatggaatataattatgctctcgtgcaaactttccagtttgtttatctttttaagaaaaagtattgttatattgaaacctattgtaaatattcatgaaactttaaaaatgattatttaaaatcacaaaactacaactcaaagacagttttatttccttaaaagtcagagagtctaggctaaagtaaattaaaccttaactccaaggggaaaaacctcctatgaaatcaactttagatgataaactatgtatcactgcacttataacttaagattggcctaattaaagaaatgattaaaaaagtaattaaagactaaaacagtatctctagaggagcccttttgaaaatagcactaaaaattacatcgtattattatatcaattcctagaatgttgggaaggctaataaaattataatttctagccctataaaccagtgcaagttctgaaaaaagaaagctaaaaaagtatattttaatacatgtctattttattctgcaaagatcaaaaatatttatgttgcaattcattcattcaacattattcaatattatatgatacactgactgtatcatataatgtgcttggtgatgggtattttagagactagtgagagaggtgtaaatacatgtacatacatacacacctacagctacaaaactgtgggatatgattataaagggagatgactacaaagtgctgtgggaagcaaggggaagggttaaattcctttttggatagagaaggatatgagaaggggcatttttgaaatcaaaaggaaacaaaaatagaaccaataagccctttcactggcaaaatcattacagttataaagtaaatgtggctatttatgcaggttttttattagttgaactaaaaataattctgttggtatgcagttacaaatgtatagcgaaagttagggaggaaagtcttgatatacctatgttggttaatttgtacaatttttaggaataagtgttaaagtgtttatcttatatttaatgtagagaaaagaaaaggtcaaaaaaagctatttttaaataatagaagatatactgaagctttgttttgttttctaagattcctctaaaaaaaatcacaaaactctggaatacattgtccaacggagctctcaagctcttccccgggcacctgaactagaactcatcttctgagatggttgccagccctaccccatcccatggggagtgaatgccagcaggctcttgcaagcctgtgagcctttgcttcatgtacatatctacaaattcttttgtttttccagactgaactctattgatgtgaagtatcagatgtggaaactaggagtcgttttcactgacaacgtaagctaccttcaataccacaaagtaaaacgcactctgattagatgagtttactgggcttcagcaggtggaaattttcgacggctacttaagaaagttattcaaatatcggttcatttaatactgaccatatctgagaaaaacccatagaaatacatgattcatcagcccatctcccattccatttctttcaatagctgaaagattaaaatgaaaatatatttacacaagaaaatgaaacatgaaaattcacgtgtattttcattcaggttttagttgaacaatggcattcttcaaaatttttacagatgttagaaacttctaaatacgttttttaaagtttttcttaacattgattgcaatccatttgcttctgccaagttaagtccattattgtgttctttttcttgatggatcttccttttatcaaacagcctagagttaaaccataggacc

SEQ ID NO: 28290 - DNA, 842 bp, Bovine  19866880876713
  misc_feature (1)..(1): n is a, c, g, or t
naacacacatacattagaaaagattatagtgttatctaggaaatgaatcttaaggcatttttttctcagccagcaatagtcatgggtgattctcaaactagcctgttctagcatttttttttgcacaatgacttcagggacgcaatgccacagggatgctctcttccagttgttccagaaaggagtcctattcaatatctactcctcacctacacgttttctgtgggtccactttaattaaagacttacagctggctactaatatatttccaaactttcagctcaaaacagacacgtaaattaaaagcaggaaaaaaaacaaaaaaagggtctactctatttcatttaatttttttgaaaattaaaaaaaataaataaataaggagagtggtagttagcaacagctagtctttcttagatatatatattaaaaaaaaaagtgcagcctaagccaaggggggaaataatatttgctttctttttggctaaagaatattgagcaatatttcaaagtataggaaatttaaaagctgagaaggtttgagggaaaatcatgtaatagaacataattctaggaatagatgcaatcctgcctcatgcaagcagactgcgtgccaccatttacatatgtgcagggaatgagtgacctcattgggcagaagtcgaaagaggccaaatctttcggacttcattgattcagaaaaaaattcacaccaaggctttaattagaaacttgatgttgggttgctcttccataaatatttttctcccatggctgctggaaatttcagaccccatccttcaccgagatagaacaatgtaagcaacctcatctccaaggg

SEQ ID NO: 28291 - DNA, 1508 bp, Bovine  19866880893087
  misc_feature (1)..(1): n is a, c, g, or t
ntgggagaggaaaataggaatcccttgcaatgtggatattaattatagatatagaaatacagatagataaattgaattttctctgaattagttattatggtgtttaattttgtgtgtcaacttgtgtgggtcaccaagtacccaaatatttgataaaactatttgatcaaattattctgggtgtttctagtttctctgcagaagggaggggtctcttttcagccttgaatcttttattaacaatgtgttttatgattctgtgctgaagcccactaattggaattgtgtatcctgtaaaattttggtataaatacattctgataaatgccaaactatcaggctgtgaagtctttgtaaggacttatgcttttatctgtatgctaatgctagatttttctggggctcagactctgaagttgagctatcccgactgtcaaagtgcctgctttctgctgagaaataagtggtttgacatctgagataaggcttaaagagtattctatagctgaaaatacaaaaatagctcactgctttcattcagtgaacaatattataacacttatgagaagtggaattgatgacaggaataatttgtccttattaaaagaataactttaaaggacttctttgagcagttttatgtgatcagcctgaaatatgagttcattaatgaagtttgttatattggaggataatgttttatgtaggccaaaatttacagcctgaatcctggaattttttaaaatgttattgaacaaggcacatattgttggttaacaggtgtgcatattttaaaaattcctattcagtgaaatttcagtgacttctgatttatgaagtagaagactctttaaaaattttgttacaaataatatcattgtccagtagttttaacactttcttttttctctttatctgtaacattgttttggttcattagttcaatagagttagtgaacagaaagctgcacacatgcttttccttctctaatctcttcagacagttctttggtttgttggatttcattatttcttcaataattaaggattgtaggctacaatctctaaaagtttacccttgcatcataaatgtgttatgaagttttcttttattaattatattctagttagggtataatttctatttcctctctgaccttaagtaatttaggagagtttcttattttcctgaattgttcttttcttcatcattttagtatttattcccaaattttatttgttatgatcagaaaatatgtgagtaaatagctacacttaaaaaaaatcttataaaattttcttatggccaagtatgagatctttattaaaagtctggggagaatccaaatggctgagccttgggtcatagcccatgatcaagggaagtgaagtttaaccttttttgttcctttttttcccttaagtttaactttttaaacttccatagaaggaataaaactctgctttcatcaaaaatcacatagggaggacagcccaaacttagaaag

SEQ ID NO: 28292 - DNA, 1557 bp, Bovine  19866880905269
  misc_feature (1)..(1): n is a, c, g, or t
ncaagaagaatataaagcaaatcaatgtaaaaaaatgtatattattcatgggacttgaagattttacctataattatcatgttgtattgctatatagtatatttacatatatacacatatatgtacacacacacatactgcgtggacaaagaatgaagcctgccatttaattaaacaaaggatgctgtcaccatcagcccagcaaccactgcagccacccaaacggtgtacctgaggggattcaggatggagaaaagcaggatccaggccctgagagttaaggtgcgtatcaaaggaatgatttcagggagcccagactcttgcatcttcccatatatagaaatgcacaaaattcactaacttcagatgtctggttttctttcattgtaatcttttgatgttctgactacttatttatttattgcaaaaacctgcatatcctggctcctcccttaccttttagaacagttgcccagagctgagaggctgctcctgggattaagtcctaagtaagtccaccaaataaaacacaacttccaacttttagatggtgcaatattttttttttcagttgacaacacacacacacattacagtgaagtttttaaatgcttttttcctttttgtaaggcttctaaaaaactccctcctcattttcacaagaatactataaaaagtggtttaaagttctgccctttctccttcacttctctctcctccttcatcaatatttattgagtgcttaatatacacactaggtattggagatacgacacattcaacctcatggttcatgcccttggtatctcacgatatctcaatcctaaaagtggtaaggcagttcattccatataacttcacatctgattttaaatgacccattggctaagattctacagaaggggtcattagaaaatgtggatgacagcaggaaaataggcatgctgcatttttttccaaggaatttaatgttaaccagttgactcttttttctcattctttttcaaataacagaaatgtttaaaagtttacctgaatatactctgtaagagtgttaaagacttgttttgccacttgaatagctttggagaaattcctttgtccttgttcatcaatgacatcttttccagagtaataccaatagaaatcactaattgattcctgaaaaaaaagagatgataggatttaggattaaggaatattccgaagctatcaaagacctgtccagttttggactctttaaaggaaatcattttaaataacagattggaagcaaacaaaaatatctgtgaaataaacactattttcaatgattttcctaaacataaaatatggcaaatcctccctagatataaataacatctggagagaaaataagcagaaaacttagctttaaaaatgactttttgtctctgatgaccttgaaattcacaaacataaggattcataacactaatgcatatttatccacagagtatttacatattactatgtgaacatagaaattagacaaatcatagaatataaacatctagtctactttttctccagtaaagc

SEQ ID NO: 28293 - DNA, 2259 bp, Bovine  19866880918255
  misc_feature (1)..(1): n is a, c, g, or t
ntccatatatatgtgttagtatactgtattggtgtttttctttctggcttacttcagtctgtataataggttccagttttatccatctcattagaactgattcaaatgtaatctttttaatggctgagtaatactccattgtgtatatgtaccacagctttcttatccggttgtctttttttgataaataaaaatgctctaggacttgattgtgcggatttgggaaggacagttcttagattcactttgctttgatttttaaaatgcactaaaataacaatttcgagatctgaatttggctgagtcatgccaaatctcactgttttcctctttttctccttttgcaggatgatgaagtggtcctgcagtgtaccgcgaccatccacaaagaacaacagaaactatgcttggcggcagaaggatttggcaacagactttgcttcttggagtccacttcgaattccaaggtgaggtaaagccttttcagtccattcaaacattgaggttttaatagtggcgctgaagttatttgtgggcactcttcggttttctgcggaacacatcaactaaaggaaattgaacagtcttttcactatccagtaagcacttttcaattgagcccctaatccatgtaaataactcagatgcagttgttaacaggaagagacagagtctttttgctcccatgctatttatatcccaggggataagtaaacatggtaataatttcagaaccaataagggctctgaagaaaagcagagtgacagggtggagagtgctgaggtaaggacttttgcaaagagtatggagggaaggccattctgagacagtgacgtttgagctgagtgaagtgagaaagggagaagtggtaagttcctgaccattctggaaagagagaccaggcaatgcaagggcccctcattaagaatgtgctgacagtctcttgaaggaaggaccaataggcactgcagctctggtaccatgaatggggccactagtgaggggaggtgaagggcctaccagcccttggttagtattaaattgaccaaaatgtttgggtttttatgttacatcttatgggaaaacccagacaaacttattggccaaccccatagttgatattctttcctagtaagaaaggaggccattggatcaggtgagcaatgcagttctatgtaatatttaaaagattgatttgacttttttgtggattcgagcaggggtcaccaacacctggtctgcagaccagtctgtggcctctcaggaaactgggcctcaccacaagaggtgagtggtgggtgagcaagctaagcttcatctacccctccccattgcctgcattaccacccgaaccatccctgccccttcgttggtggaaaaattgtcttccgtgagactggtcctgggtgtcagaaaggttggggaccactggattagagaatgtggaaagattaagattaaaagtggggagagcagtggaaggtgcctgcagaagtttgcagggcaactgctgggtctgctgatgagaagcagtgatggtgaggaaacttagtgaggggttgggaatatgcttggaggatttagagggtgtgctgaaagatcagagtgtatagaataaaggaaagagaggaaaggcagatacctctgcaggtagacagtcaaccagaaaacagtcagtttattaatcttttgggtagcactttttagtttacagagtcatttgacatgcatgatcacatctgattgtcacaataagagtatgctatgcatagttattgctgttctgttcactgtacacttgagggcatggatggctgagagacgacaggtattagaccagaggcttcctgtgacttgatgccacagcattgataatggcaaattttcacacttaacacctcagtcttttgatttgaatccctgattattattattattatttttattagcacaggcccatgattctttatttcctgggtctgcgacccacatctaatcaggtcgagtaaccataaacactgccaaaatgcccagagtactactcctacggaagcaggcagtcactgagtgcgagaggagctgggtagcgtcacctgcagggagttataggctgacggctttgggtgtttgcacaaactccttgagaggcctgcgggatgctgagccacgtagattgagccttcaacagctactgcaggaccgtggtggaaaacgcaaatctgacctgttttctgctggaatcattggcggggacgagg

SEQ ID NO: 28294 - DNA, 1359 bp, Bovine  19866880930895
  misc_feature (1)..(1): n is a, c, g, or t
natataccgcttgctttccgtgatctgcaagggcaggtaaagaattcctgtcactcttgcaagccagatgctgcttcactcaattttgctttcatccagcactcagaaaggatgcccactgactagtagggaaattatcacttcaccttactttcagggcaaaggaacaggaaggggctttgagtaatgaagccagaaataccacttatctcagctgatttccctggttctttcccagggctgtgtggtgggaggaacctgttatttgttcttctacaccttggtaatgggggctagcccctcactagtgggcaggtgggatgacttagccaagtacccagcagaggtttctgctttctcagtaatgaaggtccctctgtcctagagaccatcctacatgacaagcagtaagtcaggtatattcttcacagctaagccagtccagttctcccccaatcactagggcattcctgaccaacttaaacagagtccagggtcagctcttctcacctgttttgtagtaccacaagtagtaaatggaaaccggaacagaacaaaagtgtgtgttgccatcacaggtttacattcgctgtcattcctgaaggccaagtgtacagaattcaagagcagtgggggcgaggtcacgttccgggacacagcaatagagaaatggccatcttgggtacagtgtgaggtcactgaaacaccagagcaactatgctgaaggcaggtcacgtcaagtgattgatccagccagacaagagtctaaaaattatagtttcattattttaaattccccaccctcctcttctcccactagaaaagctggcattccaggtaatgaccttgaagcaggttcagccatccagaatttaactggggctttggatgggcacttgggtttgaatcttgcctccactacttactgtgtatttaacctccttgtatcagcttcacctgtagaatgaagatagccatacctgctgtttcactcatcagctaggattaagagcttagaattatgtagcatcttgtttcatgaaggtcatttttacgtgagaaagacttggaacatgatttgggacagtgttcgtttgaaataaggctcatcttctgaaataaagttctttatacacaatcagccaccagattgtctatttcttgaaactggttaagtttctatcaattaacatcctgcacatagacttagcttcctgagttcattgaatgttatttgctttctgttgggttctagaagaatatgcaatggaagactatagaaagctgggtcactgaaggtcaagtgttctaaggaggtactaacttatacattaacctttggtcatctttcagtatttg

SEQ ID NO: 28295 - DNA, 1210 bp, Bovine  19866881007813
  misc_feature (1)..(1): n is a, c, g, or t
ncaagtttgtacaaaaaatcatactccaggttttccaacatttttaatatttcttcaccctgcgattcctctctattcccaaccaaaagattacatccagaagcaagaatgttttaacttatgggtgtgagagaaaaaagacagaaacaaacaaagcctgcctgaaaccaaacatttgaagggtagggagaaaggtgatttaacaagcactctggcttcatgctcagagcagtttagaagtgtatctgccttcctccatagcactggtccatctgctacaacctctggttgcttcccacccatcaacagatcatgaagctgatttcatggaccttggctagcatttttaaaattaatacaatggggaaaaaacagaaaaaagtataaaatatcagaatgtatcacagagaatcattccacaaacttcaattacattttggtcagaaagtttacgaaaacactaagcaatacctctttcctttcccatagcagctccttcaaaaggactaaatactatatagcaaggaaataattcttgagcggagtggtgctttatacatacagtaaaacaggaaaggacattatataggaaaaaatatgctctttccctcttagagtgtgggaagtcttatatgagttttagagatacattagaactgactattctattaatgaatcatactgaaatctcattactaatttttataaccaaggtatttccaactaaacaaacacttgttcagcaattatgctacagctattatttttaatggagcatgaagattacctggttttggatgttttgtgctcttcgtcagcactggatctcttaacagagagagataagccaggatttttgctcctggactccaagacacttacatgcatttcaggagcacatcgtcctaacaggtcaattaaagctgaataaaaggtcatgatggcatttcccatgtggatggtatcatcctcttcctcttctgtatcactttcatggatttttcaaaagaaacaaaaaaagcaaacaggataataaagtaacatttcaatttattacatatttctcaaacgaaagggatcagcatggtaataaattctgcctcctctgacacttttcacatatatgtttaataaatagcttatcatttctaaaagaaaaaaatgggttaaagatatgatttgagattctatcgccaagaacacatgtgtg

SEQ ID NO: 28296 - DNA, 1354 bp, Bovine  19866881086451
  misc_feature (1)..(1): n is a, c, g, or t
ncacccccaaaaattaatttaacctttttgggtatttttttttcaccaaatttacatttatatattttgaagaattaagtcattggtgaagaaattagcattaacagcccttgtaatggattggggctcagatcaagtgtcatttgtgacaattatagtgaattacttctatacaatttgtacacctgagtactttacatttctgttctaagaaagtgatctccatttgaaacgaataaacctttctacaaggttcctttgagatcctttttagtactatgtagctctcagacagtgatcacaggttctaattttatgtttaattgctgcaaatgagctacattctctctgttgacaaggcagccttgctttgaaagtataaatacacatggacccatttagctttgcaatttcacatgaaaatttctgataatggatttatttctaatttctgttttaaactgtaagaaaatatatattctattttgttctctctgatgactattgccccaaaatatcaccattcttattcaggttttaaatactgtatttttctttttgtgtaatcttgtatatttctcttgttctgtaaaccaagaaacatttttgactttaaatctccagaagaatgtaatgatctccatgggttagatgcattgctgcagaattatgcttttagcgtctgaaatcttcctaaactggccataatctacctgttccatctcctactggctttgtacctcaggcacatcagctctgcccagcattcaagacttcagtcaacccatgtttcccgtctggaaaatggtcgtgcatgagttctctgtggccccacttaaatgttacattcctttcatttctctataggcagggttacctgcttacttagctgaacacgtgtatatttgcgttgttctcacttgttatcatatttggttaccaaccctgcctcccagacaccagctgtccctaatcacagatattcggagacaaacgcattgagctcataattgtactatgttcagtcaacacctcaataaacacatagagaggagcaaagtcactgatcattgtagactaattaatcatattgccccctttctttattttctgtttaggtattcttgaagttttacactgtgtgttagtagaaagtccagaagctctaaatattattaaagaaggccatataaaatccattatctcacttttagacaagcatggaagaaatcacaaggtaagtgaaccattttattgcctgaaatgaattctggaataatttcaaacatactctttaaaaaagataatttttaaaaggtgtgtcacatttttcatgttttttactttttaattt

SEQ ID NO: 28297 - DNA, 1523 bp, Bovine  19866881103100
  misc_feature (1)..(1): n is a, c, g, or t
ncatggaagggaaaattgaaggaagaagcattaaaataaataaggattgaaaggaaatatttagttggtatcagaggattgattgtttcttcctagcatagggagctctgtagtccaaaacccatattgaaactgaattatacccttgattagtgtttgaaagaaatcatcattattcctaacaccctcattaaaacaaaattaatcattaccattataaataacagattcatggtcaaaatcctgaaagtttattaaagtgtttattttatcgcagattctgtgctgaaagggttgcattcattatctcatttttttctgatactgtgggggaggttctcttgttagctttatttacagatgagaaaacagaggcttaaaaggtttaattaagttatcctaagacttcagaggtactaagtggcagagattaggctcaaaattgaattttctatccccccccaacctttactcttagtcatcaatcataaaaataataatctagaaagaatatgaaacctaaattactgattttaaggtctccagtttggagtttgccatgaagcaatataaaattttgtgttatggccgaaataattttctccccgtatgaataattcaggagtatgttatttatccttgcaatctcctactcagtttccattagagatttaactgctacaatagaacatttgaccattatcatttcagagggctacatttttcaagggacatgatttacaacaaggcaaagttcttttgatattaaacccatattttttaaaagcctttgcttatctttttttttttcctctctcaggaaaaattggatgtaggagtgagaaaagaagttgatggcatgggaacctctgaaataaaatatggagactcagtatgttatatacagcatatcaatacaggcttgtggctgacttaccagtctgtggatgtgaaatcggtgagaatgggatccatacaacgtaaggtaagaatgtacaaaaacactgtctatggcagtcattcttaatgactgaaaaatacaaatgcaagaccaaaacaagtagctaacactctcagccacttgctatgttatttacatgctagaggtccagtcccaccctgataagctctctggtttttgtatggtgagcagttttagatgttgctttgttgttgtcgtttagttgctcagtcctgtttgacttttttcgaccccatgaactgtatggcctgccaggctcctctggatagaataccgaagcaggttgcctttcctcctccagtagaccgtgttttatcagcactctccactttgatccatcgcttttgggtgtccctgcgtggggcgtggctcatagcttcattgagttacatagccccttcgccacacaaggctgtgaaccatgaaagggttgaaattttagttttttgtgtgtttttcgttatcgcacccaagtcacgcttatctcagcttgctgtcatttcatctattctggttgttcatctcagtatgacttctgatt

SEQ ID NO: 28298 - DNA, 1599 bp, Bovine  19866881130857
  misc_feature (1)..(1): n is a, c, g, or t
nttttcaaagatattgactatgttatccctgctcatccccacacactccttcccaactcactcagagtaagagccaacccatggttattgcactaaggagccttcaaaagctgatccaactcctccctcctatctagcttctatcttccttccatcctgcccctcatcactccacaataattactatttccaggacacacttctgttcatatttttgtttggaattaatccctcaaaacaacagctttttgaagcccctctcattttcatacaaagccttatcaacaccatcaacatcttcttcctagcctgctttaagcagcactttttagtttgtggaattttttcaggctctgcatttcacacttcaccataactagctctgtctggcaagagaggttaagactagtatccaggtctcagactgatttttcccaaagttaaacagctagttaaatgattgctattaattttctaaatgttttcatttctaaatatgcatatattattagaaatctccaccagaagacttaaagccatgtaataaatcacccagatcatgccttctctcacagtaatctcttacacatcctaccatatccattcattaatttgtgaggcaaatgaaacattcaaatcatcctaaatatttttatgctttttaattacttgtgcattttttcctgtgatccagactacttctatcttggcccagtgcaaaataatattaacacaagagcagtattaaaatcacataaaatattaggggaaatgattaatttttttacttatgtcaggtggcactggtggtaaagagcccacctgccaatgtaggagacataagggacgcaggtttgatccctaggtcaggaagatcccctggaagagggcatggcaacccactccagtattcttacctagagaatctcatgcacaaagcagcctagtgggctacagtccataagatcgcaaagagctggacatgactgaagcaacttagcacacacatcagtcaatgggaggtaacagaaaaaggtcctaaacttctgggcactttgagaactctgactttgaaactgaatttgagactaaacattccagaaagagaattcatcaaaaaaaaaaaaagaacatttaatgaagccctaagtaattaaatgtgttcactcttcccactcagtttcttgtattcaatgcttctaaccatggtttcattatacaaaaattttcagcaactctactgataggcagtgaaaacctaatatgagaaaaaaatttcagaggaaatcaacaaatggatcgcttcagtggacagacaaaccatagtggcccactttctattacatgaatggcctgaacagacctatccttaatttataaaaattgtatcaaaacatgaaaatgaaaggcttaaagctctgggcccaggtaccaacctccgctgctcttcaccgtgttctcctgaagggacagtgaggcattcatccatgtgtccatgaagcaacctgaggacgtcaccaccaatcagataccctagaaggatcgaaacgcagtcacatttgaattgtcatcattggatatcgaaagctaaacagatca

SEQ ID NO: 28299 - DNA, 2636 bp, Bovine  19866881223509
  misc_feature (1)..(1): n is a, c, g, or t
nctatataacaaaactgctgttttctatagtttgtttcttttcagcttctttttggagaggagggatgaagaagttataaacccaaagtatcatactgacaaatatttaaaatatgtcccagaacaacaaaagtcatgccctaaaaatctgcaaaatttccacttattttctgatgagtatctattgctacctcagtcatcaaaagataacaccgagaataagtggtaaagaataaaacagaataaaccaaaaataaagaggcacagtgattctgcactgctaggattcaaatcctaactctaccacacatgagctctgtgactctgggcaaattacttaacctctctggtttccttatcgttgaaagaaatattatagtaacaggcctatttcatagggttactaaccagataaaggcgttatcagttgcaaaacacttaatacaggtatagagcaagtgctagagaaatagttattacaggacttccctggaagaagtcccttcttccctagaggttcagaatccacttgcgcacgcagggcatgagtttgagccctactccaggaagattccacatgctgcagggcagctgagcccatgtgccacaacctctgagccagcacgctagagccctctagccacgaccaagaccatttgcctagagcctgagctctgcagcaagagaagctaccacgatgagaaacgcatgcaccacagctagacagtggcccctccacaccacaattaaagaaagccctcaagttccaacgaagacaccatacagccccccagaagaaaacatttcatttcatttaaaaagactttaagaaatatttatgacagtcaccaaaaatcaggtcattaacaaaagtttccggagtaaattcaaattagcataattttaaatttaattattgatgtagccattgatatattactgaatttttactagaaaatgattttatgttgcatttttccctgaatcagagatgactgcagccatgaaattatttttcatgatccacagagttgagcgaaccctagaactgttgcgaccctgtgctgttctctattgttatttctcaagccaaaaacttctcgcctcagttatggaagcaaaatgtccccaaaggcaaagaccacatcagactttcttttcataaactctgcagaactttgcaacctactaggcaggaagtctgcattggagaaggaaatggcaacccactccagtgttcttgcctgaagaatcccagggacgggggagcccggtgggctgccatctatggggtcacacagagtcagacacgactgaagcgacttagcagcagcagcagcagcagcagcagcagcagcaggcatgaagtctgcactcatcaagttaattggattaatctgacaatttttaaccttacgaacctggcattttttttattaattcagtttattaaattcttagtgtaaatatagaaaacttggtcaatcttgtttggttagactataatccttcaatttgttgaaaactttcttagggcatacatgaactaccatttcttcagaaagaaagaaaaaagcaaaaatacttccagaaataacttctacagtaattttctgaatccttttcccagttttccaagacctaaatattgtggattacaacataaattctggacattggcccattccaaaacaacaggaacaaatcagtcctccaagctgaaaacctactcttccccatttttcaatacttctcagagtgggagcctatttgagaaaacagaagatttagtccttatttataaatgctaaagagatagaaactagcacagaaaaaagaattgtaagaaaaagattctaccctcagaaaaatgttaatgttatattcaaacatatttaacccatatcattaaaaatctaattcccagaagcttcctggtggcccagtggttaggaccctgtgcttccactgcagggggtacgggttagatccctggttctggaactaagatcctgcaagctgtactgcatggctaaaaaaaaaagtatttaaaaaaaatctgattcccttaaaatgcaaggattaagcacaccacatttcatgaaaaggcaatgctgttcagatgctaatacattcatataatgacagaaaatgctaacacttttgtagactcaaaacatatagtcctatagtaataaaaaatatatttattacagataggaacaagtgaatcatttcattcgcaggcaatttgatgagcaatgactcatctgcagtactttctggaaactattctatcaaaaactctgaaatgtatggccataacctagacttaatatatgacctaataaaagtcattacctcaatacaattctcctgtgaaatcatatactctaatttccccactggacaatcttccttctctttcccactgcctctttgccaaaaatttgtccaggagtatcagacagtgttcctgacttcttttccttctttaagcagcaaccccactcacgcatgattgatcaaatcaactataactatactttaaacccagttccctcagtaattctctacttcccttgtccttctgctgcaaccaccttgcatctcacatcctcagatcaatacagcta

SEQ ID NO: 28300 - DNA, 1272 bp, Bovine  19866881317390
  misc_feature (1)..(1): n is a, c, g, or t
natcccctggagaagggaaaggcaacccactccagttttcttgtctggaaaatcccaaggaccgaggagcttgtcgggctacagtccatggggtcgcaaagagttggacatcactgagcgaccaacacatccacatgtctcccaaatgtggccagaaacaggaaatactgctataacttaacatctttttttacttaacctccaaatctctccctatttgttctaaaaaagaaactagcatcccaacctgggcaagatggttctttgggaaagaagtgcaccatcttctcagcctgcgaactttctgaatacagtcactattcctcattccaacacctcaactcccaatttactggaatgtcatataggaagaagatgaactggggctgtgtaacactggcaggacaaaaacccatctcctgtgctcctttcagacagacacatacatgcacacacacacacacaaatatacacacatgcattcagagaaatagtgacatgccacatcacatatgtgtatgacaggccgacccgtacttgaccaagaaaattttgctctgataaaaatttgaaatgtatcttttactaactatggtcaattgacctgattagaaaattaatggatttcattccaaatgccagaaaatgagatgggcatgttcccaagtacaacaagaagctggttaaatttatgaagaaatataaaattatgcaggaacacaagtacacacacacacacagaccaaggtcaatgttaataggttgtgaattcactgcaatcttttttctctgtttacctgcaattttactggctctggcagtttcatttggagcaggccctccttgggcctcttagcccctttgttttcttcctcagcggctccttccagcttggagtcttccacaaagggttccttctccgccacctcgctctcctcctccgggctggcggcttccttgaacacactaggctcaatcaactgcaagacgtgtttcaagtcctcgttgtggaagacacccatgatgagcagggtatagaacagcttgatgagagggacgaagaggaactcagtggtgcccccaacggggtctcgggcatgaaggctgccctctttcacggcttctgtcagcatctgtatggtcttggccttcaggatgtccagcgggaactctgggctgtactggtaaccctcggtattaatgctgacaaaactcggggaggaaaactgcatccgcggcctgagggaggtgctgaggccgatgcccgggagc

SEQ ID NO: 28301 - DNA, 1569 bp, Bovine  19866881369250
  misc_feature (1)..(1): n is a, c, g, or t
ntttatataaacttcaagacctttttttttgatagtttttttcttctgatgcacactgcatcataggatggtgggaagaagacagatagttaagaccgtcagctctgattttgagagtcaaggattatctatgctcttcctaccacacattatttaatgtagatcactttttaaagaaaatataacaaggcatacacagtacttgtacattgtaaaatacagtaaacattattttgcagctccttcttattccttgaaccctccagttgccaagctgaatcaattcatgccatgtaccataatgagctgtagctccagggtatatatatggtctgaggtagaagggccacaaatatccgctgaatggagtgatcttttccccctttgattccaccagtttagtgggactcagagggtggttggtgattagcagctgcaaattttttgttaccagtctgaggggagaaagagagtttgccaagaatttaaattaagtacatcatttaaaatgaagcacattaaagaaaacagaacaacacaaaaacccctcaagactttctagttggaaggagcagaatgtttgctgattttcattttggtgcaagttttttgtctccttgtgaccgcaaagtagtagcattgcactaatgcagatgagtcatccaaattaggccagagctttgaaagaatcatttttaagtaacttaaaatagatgatttgccatacatcaacatgaacccaccacaggttaaattaaaaaaaaagatttgaatattttattcatatttgatttgaatattttattcatattaattatttaataatataaagaagcaaaagttatctccaaaggaaatgatatatctagagtcaaataagtagacaaattgtaattgtggctaagactcttcatggcgttcctgctcttgggtccagtttgtcctcctgggtgagaatataacccctaaagaactcccactcagatcagcccagccccttttcagtactgtgagaataatgcaaaacaaattgttttaatgaacctaaatagtatacattcataggactttaaactactattgctctttaatgtttatttcactttacctgtttgtacacattccaaaaatgcttattttaatttctgctaatcctttctttctgtttatgtatttttccattacctactctaatcttttaacatcccccctcctttccctctggttcccagtgcctttgcttctcctagatcccttttccttgctttctttccctcttttgctgccagttctctctccttctggatttctttcattattttgctgttgcctcattttcactgatgtgcaggatcctcctggtacataaaccctaggccaagagttgctatataagagacagaggtactgagctcacaggtgatctgtgagcccacgtccaagcattgattaaaaacccagtacttgtgcaaagccaggcaaatgtgacaggacagaggggcaaggaaatcaaggtgggttgctaagaagtgattctagtgatggataaagcatctatactagaattaa

SEQ ID NO: 28302 - DNA, 1648 bp, Bovine  19866881597295
  misc_feature (1)..(1): n is a, c, g, or t
ntagctgtacatggtcctgtcccttaggaggattagccaaggggctgtaaatttcataatcattttctggttgctaaagattaaatcctgtctttatttaacactaggtttaatcatcgatgcttttggggaactaagagaccaacaggaacaggtcaaagaagacatggaggtaagtctgtttctcactctacatttttgttgtggacactctgtcttcactgcctttatcaaagaattatggcagtgggaggaaggaggaggaacatgaaaaatgtgtaacttcattggcctgtttttggttcaggcaatacatgtagttgagcaaggtggtgggctccagatacatacagacagtaatatggcagcatccacccctccaggagtgggaagaccatccattctaaatgacggattcatggacagattagtaaacaggcaatcacagagcagtgtgatgagcacttataggaggaaaccctgagtactggggtccttgaggcttgtgtctcatttcatcttggataatcagggaagttcttaaaagaagagatgcacaaacggaggcctgatgattgcagagatgtggatgtgagagagcacgcaggatagtttagggaaccttctcacccccactatgtgccccactaggccccctggattctgtgagatgtcactgcctgaggttctatataccaagacactggttttcgggaatttgatatgcagatttttcccttggaagcataattggtgcaggatgaagtattacattctaataatgggactagcaaggaaggccaactaattaagagcctaaaaacgcatttgagaaatttacagtataacttacaagctaggaaacaagaaaagggttttaagcagggcagtgacgtgatcagatttacaataaaaaaaatatcaattaaaaagggaatgaaggcatgaccaggaacagggaagcagctgtcagcattttctaggtaggagatgatgaagctcttgctaaagaagtgccactgaggaggtgggaaccagatggactcaaggagcactttggagctggcatgaaaagaacttggtgattggccatatgcagaggatgaagtttggagcaagcagaaatgatactgaggttctgacatgagcctctagaaagaagcatggtggctcagttaaacacagagtgaccaagggaggtaacagaggaagggcaggttcctggggaaagctgataagtgagaacctatttatagaagagacactgaatggtgtccaagactggacctctgaatggagcctttctgtcatcagcagttgttgatcagtaaagcaaagagaattataaaatatcttaataatcttgattctagcatctagggcatcataaacatgcctctagtggtacaaaatagcatctaatttgcagggatgaggagcatctggagctgcatgaggacaatcgttattgaattcatttgagttgatacataggcagtgctaatggtaaaatggaaagcctgcttctccctgggttttgggcctgcagatggcagacctagcaagtgaagagagagatggatgggatgggagaagcggggagagaaggcatcctatttctagagcagattgtcatcccagtacaggc

SEQ ID NO: 28303 - DNA, 1721 bp, Bovine  19866881619514
  misc_feature (1)..(1): n is a, c, g, or t
ntgctgcaatagaaagagtccatactttgaggtatcaacaggttgtggattaaagttcccttcagaatccattgatgactgtttttccatcatactgacataatttgactccatgtagtctggaggcaaagctcccgcaactgcactcaggcaaggcagtgccagtttgaaaagttcttgttcatatttctgggaagaaatggaggaccaaaaaaataaatatcccattacaacttggcaaaagttgtcaacatgagcactgcgactgacatgatgttgtaggagaaaatctgaattaccttcagctaactcaattcccccaaagattctttttctagaaaacggaaagtgaaagtgaagtgtgaagttgctcagtcatgtctgactctttgcgaccccgtggactatagtccaccaggctcctctgtccatgggattctccaggcaataatactggagtgggttgccatttcctgccccaggggatcttcccaacccagggatcaaaccaaagtctcctacattgcagcagatgctttaacctctgagccaccaggaaagccccagaaaacggaaaatatggccttaaatcccaccaaacacaagagaaactgaagctttttactgaagttgtagcataaaaagaataaaatctttgcttctctaaaagtttgttttccaatatgtgaagtgaggtgaacttgaatattcaaagtgtacaatatgcttttacaacataaacatgatttcagtcgaggagtacattagttatagtttatcacagctagttacagattattgctgtaccacagtataaagactatatatgaaaaatacctaaaggataacacccagagagtaaaaaattttaattttataccttgcatttcaaggtataaaaaaaattctgaacagagaaacaacttttacaggaaaaatgtataaccaaaacttccagggaaaagtatattagttatatagttaaactgtatttacagattttttaaaaaatcaaaaataataattattttaaagttatctcactttaagtgcttttaaagtgcaaattcttctaaaaatacgttctacatattgttttaaaaggactctcagtttcccaaacacaattcagcaagaaaaagcattcagatgtagctaccacatgttgtcacagataaacttcctttactatgtagcaaacttctgttatactattccagtcatctgataatgtctatctgggaattcaaactgattttgattaatgatttaagcataagcatagcaagcatgttctgattttcactgaaatactatgcttcagtttcctgaaaagtgtacaaaaccattcactgcaaatatggcaaatattagaggatgtcatgtacttaaagcaagagtgaatgcagacacttaagtcaccatagcagcaaagtgtgaaaagtcaataaggctactggaatattataattttatgagctttaatacttaacatttttacatttgacaagatttcttcaggctttataagattggggaggtgactgatgaggaagggtttgagtccaaataagtccaaatataccagaaactgatcaatccatgtgaataatttgctaaaatgcttagccattttcaagtcaaaaagtgttgtaattacaagaaacatgttaccatcatgactatgaaaagtcaatataaattgcattctcaacatttgt

SEQ ID NO: 28304 - DNA, 876 bp, Bovine  19866881913577
  misc_feature (1)..(1): n is a, c, g, or t
nacatcctcaagttcctgcagatcaatggctatgctgtatccaggtaaaagcacacctactccaggttataagtaggtgttataagacttgttataagactgttataagacttgttataagactgaatattcaattagccctgtcagatttaatgctgaaaatgagctccgtggcctctttaaatgtcagagctctatttagcgtgttcaaaatatacatgttgaaaacattaatgcccttagctgccatataattgagttccctacactttttatgtcaagtctccgttcatcatttaggcaaaatctctaggcagaaatgacactctgtattttgaaatgcaagatcttattgtgtagtaatatttattaactacagcttcttatcatatgcaaagtattttttataatttatttttagctataaaatattagctaaccttgcaaatgtatcaatatctgtgtataaatgtatatattgctatatgtaaaatgttaagatacctctctgtatgtagatatttaacaaaatatattttgtttttaccttgccttctaataatctttcttagatgttggtttccattttttgtttttgccatcctagagggttcaaagacctggaactggacacaccttctattgagaaacggtttgcctatagtttccttcagcaactcattcgctatgtagatgaggcccatcagtatatcctggagtttggtaggtaccatggtcctgttactaacagcccagtttttgttatgtttgttatttacaacatcaggatctagaacagcatagaccactgggatgcttatggtctgttccctgatggtgtaaacatttttatatcaatcctaatattaacttgag

SEQ ID NO: 28305 - DNA, 2249 bp, Bovine  19866880165999
  misc_feature (1)..(1): n is a, c, g, or t
nacaaggatgcccactttcaccattactattcaacatagttttggaagttttggccacagcaatcagagcagaaaaagaaataaaaggaatccaaattggaaaagaagaagtaaaactctcactgtttgcagatgacatgatcctttacatagaaaaccctaaagactccaccagaaaattactagaactaatcaatgattatagtaaagttgcaggatataaaatcaacacacagaaatcccttgcattcctatacactaataatgagaaaacagaaagagaaattaaggaaacaattccattcaccattgcaatgggaagaataaaatacttaggaatatgtctacctaaagaaaccaaagacctatatatagaaaacctttctgatttttttgtgattgggtaagataaacgactagttctggataatgaattgggagtggaagggatgagtgttatttctagactgaaacatttaattaccagtgcaagaatcttcagacatctcttttcttctagtgtggtgactggcaatgttagagatagtaactactccatcaacccagactcctgacccacaatacacatataacatgaggaagaacctttgctaatttggggcagcaagatgttggagatgtacgttcctgcagcgtcacctagctaattcttcatgatacaatatgtgtcatccccatggggcagtgaactcctcaacagtcttcagccagttcagtctggcatccctattatcttgcaaatgcatggtagctgggtgttcaatgtaacatttgttgaatgaatgcaaacagaagtaaagcatttaaatcccagggatatcaatagaaaaccattaataaaaatacagtgtttttatgccccttggaaaaaaaaaaggccacttgagaaatgtacttaaaaccaattcacagctgttttcgttaagttttcagtgcagttttgtattctggctctggaccttgtattgcaatgaggggaatgtttgttaaagaaatggtgcaggcatacgtgtttaatttgtacatctctgtgtagttggatgattggtcctaacagaccgtcagagctttttagaaaacagcactcagcaatgtgcacattgccttgattaggtgagctcctgttgttgttcagtcgccaaatcatgtccgactctccttgaccccatggatgcagaattccaggcttccgggtccctcaccatctcccagagtttgcctgagttcatgtacattgaatgtaggggattgcataactcagtgaagctatgagtcatgccatgcaaggccacccaagactgacaggtcagagtggagagttctgacaaaacgtgatccacttgaggagagaatggcaaaccactcccagtatacttgctgtaagaaccccatgaactgcattaaaaaaaggcaaaaaagctcctaggtgcagagacctagcaagggtctgcctagttatccccacagatgttaagggactagctgtttgagagcaattagttactgagacttaacttttttcagtgatggaaaatgatgagaagctgcccttgaaccagctgtgtgtttgcctttgtaagtgaccagaacactgtgtcaaagctccatacatgaactaataacttgcatttggaactgcttcccccgtcttcctggaagaggctcaacattaggaaatattgactaatggtgaagagaaagaaccctgggaggcctgtctagtcagggagggcttcagggaatctttacaggagccagagataagtaagatatggcttgattaaccacaaaaagataacaatgagcaaagtggacagtgtttggagggggacaagctcagacatcagggattctgagaaggagtcattcttattattttatcacattggagcatgatcaacttgtgcttctccaaacctgtaatctgggtgagggattcccaagcctttgccagccctgaaacttctctcaatgtgacctctttccataaactaagaagggatagagaaaggtagtgcactgattaaaagagggctctgcctgagaaccagacctgtctgactggaggtcagatcccaaagccgccacctactactgtatgcttttcacctcattgaacctcaattttgtcatctataaaatggtgtgcttatcacactggagtgttctgaagattcaacaacatcatgcatgtaaaactctcactattctcataagcacatactaag

SEQ ID NO: 28306 - DNA, 1649 bp, Bovine  19866880364613
  misc_feature (1)..(1): n is a, c, g, or t
naatggctgagctgggtgattctggcttcaggtctcttgtgaggaggcagtcagtttacagctgggctgtagttatctgaaggttggactggggctggaggatggctcactcacatggcagacacgtaagcgctgcttgtcagcaggatgcctccgttcctcaacacctggacctcctcattgagctgatgtcccccaacagacttggtgactggcttttcccaaatcttccttgcttgttgatgtcaaattttgttcagtgcagcagtgtgcccacctttataaacatgaattcccaagctcactgggcctatggtggccctgtgataccattctagccaataagatgtaagagaaagctcttattttcctggttaagggagagtctcacttggcacacgcttttacctttacctgtttttcctgcctgaaactcacatgcgatgtctggatatgcaagcaccatgatgaacatcacatatgaggaatggcagggggcaatgatgaaaggcgcttagaccctgacagcttcatggagcttctattcctgactagagtgcttaactcttcacttcttatacttaagaaaaatgacccagtttggttacatccctgttgtcagtttcttgtttcatgcacctggacacaatcctaacacattcctttgtcttcttctaaacttctaggactactattactataaacatcacactgaattttccttactgacatgggcttctcctcaacttttcactgaacttaataaaggaaaacatcagattatacctaactttgtgtggtacatttttattaaaccactgggcttatatttaaaagaaacctttaatgaattctttgagcttttgacctcaaagaataagttcaatcattctattggtgatcagtaagtctggtctcatcctgactttctttctcactagagccaagatctgggtcagagaagacagacatcaaaggcagctggggtggagaggggaagacctgtttgatgtgaaaaaagagggagaggtctttgctaagttgactacaaagaagcacttctgtggaaatggctgctggcttgccaggtcattatttttgccattcaccttgcatgggtcagaggactcgaagacagattcctgcagccagagagtctaagctcatcgtgaacgtgactccaacctgtcactgggtgccctccccactcctttaagtgcatcttcctcaaaggataatgagggaagagtcaaagttgattccagggtgatgaggtgactagggggatggtgtgtcattaagagaaatgggtggtcaggggctggcgtgcagagcacacagcagacgggctttcaacatccaagtggaggtgtgcaacgggccagcaggaatttaacttggagagttgtaagaatgcttgaagtggtccctgaagatgtgaggatggaaatgactccctaaaggggagaatagagcaagaagagaaacagatcaggattggaactgcagggaatctcccaacttgggtcaagaaaagagaaaaaacaggggcatttaggacagcaaaattattctgtttgattctgtaatagtggatgcagttttctttttctttttttttttttttagtaagtactagtaattttatt

SEQ ID NO: 28307 - DNA, 1183 bp, Bovine  19866880565006
  misc_feature (1)..(1): n is a, c, g, or t
natagacagaaaggccaagggacaggaatgattatggcatctcatgagatagcactgttcttacctgtcaagtcacagacctataatgaaaagtggcagaaattgtcacggggatgttgtgagcttgagagcagagagctagcttgtcccttttctcctgtttttgaatggagggagtacttcttgtcctgctgttttcagttggccagaacctatagaagatgttccctaccactgataattcccatcctcactggtgtgatactcttactgtttagttgctaagttgtgttcgactcttttgtggcctcatggactctagcccccctggcccctctttccttgggatttcccggccaagagtactgggagtgggttgccatttccttctccaggggtcttcctgaccctgggatcaaacccacatctcctgctgggcaagtggattctttttaccactgagccaccagggaagccctttggtactcttgggagagcccccttttagaacttgagggtattaactggatcagtccttcaagccctcctaaccttggggaatatcttagtcatttggctagacagtagttctattacattttagagagaaaagagtctcgtgtattaaaagtgcacatttatgtgctggtccactttgtgaaatcaatcagatttagttctgaaacattactcaaagacagttaactttgacaagaagaacatactgaatatgatattccaggatcaagaaagaatgcttattttttcctcaaatgaattatatattaacatgattatgcaaatgtttgtatgcagcatcttttttgctttatcatttttgtcttccagaaaaccatatatcactgttacttacaaaatcaatatgtcctgatattgtaacacaaattcataaataattttaaaatttacacatttgtcaaagataaagagattcttactaaattccttagagactcttgatttaaagtactgtcttgtaaagtactcttacaagagactagtttaaggtgctatactttaagagagtactctacgtattgtaaggtgatagtgcacaagccataattcaaatttttgattcagaaaattatataaaaatgccagtcagctcactctcagcagctatgggacccgtgagttaccaaaaaggcaaaatgctaag

SEQ ID NO: 28308 - DNA, 733 bp, Bovine  19866880584560
  misc_feature (1)..(1): n is a, c, g, or t
ncactctagagagcctgccctgctcttctgtctgtggaattctccaggcgagaatactggagcgggtagccattcccatctccagaggatcttcccaaaccagggattgaatccaggtctcctgcatggcaggcagattcttgaacctgttaacctaggcaccagagaatcatacaatgcatatgtggccttatctgtgaataaaattcctataaacgtgagatacaataacacatctttactgagctgacctactgaatgcctgcacatgtttcaaatttacatggaattattctctcaggagattccattctcccttgaaaaacacacatgtacaaaaacaaaacttgatttaaatgaaacagacaccttaagaatcttaacaagtagagctgaccttggaaagtaattcgacaagacttattggacttggagatattggacagatcaatgcatgacaactcccctcctgaacttccataacatccagaggaggacagattccatgagactcatgggcaagggtgacttggccaaaatcaggtggtgctatttttcctaccaagcctggctataatcaagagcccttctttctccctggaagctagcatcatgtgtttcccttcatttgatagtagcaaagccttttagtacagagaccatgggaggttgcctttctgtctaagcagaatatacatgtgcagtaacatacatgtacatacacagggacata

SEQ ID NO: 28309 - DNA, 1853 bp, Bovine  19866880587310
  misc_feature (1)..(1): n is a, c, g, or t
nttcctggaggatcttttccaagtaggaatattacctagctttagtccatatttatatatagtcacggaatactggtactgtcgggacactgcttttttaccaatgaagaagtaagaacgtgggtaaatattggcatcacatgggtatcttcagcctctgattgtgttactgtctcagaagtggtagagaaggtttctcccctgcttaccaagtattcttttgaactttatatgttaattgaatataccccaatacaaaataaaaaaacacttaaaaaacaaaataagaaccctattaaattgtacatacaatttgttttaaaaaagtatatgaagctggatgcagtacatagggaaaatgagatgttacaaaaaatggaaaagcttttagaccattatcactgatgctccacctcaccaccctccaacagagtgctccagtctatatcctctccctcctagggaggcactccatgcaggcattcatgattattcagggattttagtccaccaaccagcctggctttccaggtggctcagccctaaagcattctcatgcagtgcaggagatgccggagacctgggttcgatccctgagtcgggaaaatcccctggaggaggaaatggcaacctactccagtattcttccaggagaatcccatggacagaggagtctggcaggctacagtccatgaggtctcaaatagtcgagcgcaactgagcaccacgcaacgagtcttcttatttcacagtgaacatggcagtgatggattgaacgcgttgaagagaaaagtgattgattttctgacaagaagccattctatgtcctcttatcagccagccccgccccctaaactgaaagggtaagaagctaaatgctgaaacaattaaggttacttgacattctaactcctggccactagaggggggtagcgaccaggcttcttctctccccagctggatgagaggcctctgcccaaactgaaatgttatcccttgaagagtgacaattcagcatacggttctgttcattagcttttccctctgtggagtcagtgtttcctactcaagtaaaggtagctcgtctttcctaagaggagtatttccaaccttgttagtgggtatagagtctttggccgctttaaagtcatagcgcctggatgtggggcaaatagaatggtgcacacaccttccccacccctaagacatagtttccacatatgatctgatatatggccttatcaagggagaaaatattttaggttccagaacatgcgtgattattgtttggtctctgttcaaacaagagtaaagggaaattagcatctaaggaaaatcataagcattgctactctttcaaggagatctctgtgtccacagatgcctctaattccactaaaaccatctctggcttgtgaagggtgcccaaggctgatgcttatttctgggatgcctgcgtaaggctggcttctgctatgtaggtcctggcattcgtctcctggaaagtgttacgaggattaaagcaatcaatattgttcagtaaatggagaatctaaaatagttgcaaatgtagcacccctaagttttaaatcagaaatatacataagtaggcagagtatgcacgacaggaacagaatccaggcaatcaaaggggttccttgtgaataattatcaaattgatttggtaggttatttctgtgttatcttagtatttggatttttattcttgtcaaagcaggaagagagtagttacagagggaaggacactgaaggcaggaagaggaaaacacgtgggactgggaaggcggagcttgggaagatcgcagaagagtcagcgtgggctccagcacact

SEQ ID NO: 28310 - DNA, 1620 bp, Bovine  19866880669526
  misc_feature (1)..(1): n is a, c, g, or t
ncatctgcctgctaaggcagaagttgcaagagattcaatggatcagaatccctggatcaggaagatcccctagaaaaggaaatggcaacctgatcctgtgttcttgcctggaaaaccccagggacagaggagcctggtggcttacagtccacagggtcaaaaagagtcggacctgactgaacacaaggtggggggcccttaactttaaaggtaaaggcagatccatatgctttttcttgcatacttgtttctttttttttttttgaccccagaatatctcgtgtttgtgtagacagaggccactggcagctgacagactgtcagttgaagggatggtggcagcagcagtggaggactgataagccctttggggagaaggatgctcttctagaagtagagcccacttatccagaaggcatcagggaaatcactggtggcagctgataaacaaacaggaagaagggacaggcttctgtacatctttcccattggtaaacttccaggcagatgaaaatgctttccaggtggtttttgcatttgaacctataggggaagttccagtataccccaaagcacctagtttgagaaatgccacagattccaccataaagacttttgttctgcaaacccttgaggatgtcagggaaggcactcttcaaaagttctgcaatcctctaaggtgaatttatccaggtctactgctgaaatctagggcaatgaaaggtctctcagcctacccattattccttcattaagttatgcttaacaagtttatataaaagccccgtgcaaagagaatctttatagggtagagtttcaactgactgtacttatctgtagtcataaaagtttttcttttattttttgattggtcactatagatcaaaaagtatataggagatcagactaggtttagagatttcttttttcttttcttttttttttgcacgttctctttatcgttagtaaatacactaaacgctgattttcaaggagctgcctggccatggtggttatttttggggaaaaaagcaaccacacgtcatctttcttctcttttaatttgagttttacactaaaaatctgttttgagagggaaatggagcgtgttaggctaatgacagctttaccctctcttattttttccgtttaacagcaacgctcctataggctccccggcgtgcctggatgtgggcactgcagccttaagtgaagcctccaacgactcgaaaaaataaaaacaaataaacagccccattccccccactccaaagggggtagagcttaagaggaaactgtacaaaatgtgtcggcaaacagacgaatatatttgcaaaggtatagtttctgtgactacagacaatccccacgttgcccagaaattgttagatgcgtcctgctgagaaacgtgcttggctagtgcgtgattgcctttcggatcggccccggccgacccaccaggaggacccgcgtgaggggcccccatttccattcttagggagaggaagccggggacccacgtgagcgcggaagacagctgatcatcaggtcccaatacttgccaagcgtcccctaattcccatttggttacaaaaactctctcctccgttgcatatcctc

SEQ ID NO: 28311 - DNA, 855 bp, Bovine  19866880725535
  misc_feature (1)..(1): n is a, c, g, or t
naccttaccctaccccacttcagctctgtccaaatgaccgcaaacatttcccacccattatttatctgcttccaaaaacggcaacaggaagcaggtatcacagccctccactcatctcccacctcagctgctgcgttgtcccggtctctcagctaatgaatctcaaagagagacagggccaaacagggaggaagaaggtggctgctcagagaaacttctggacagttgtggaagcatataagtggggaggaagccagaaaaggaggcaaagcagaaacaaggaacagacctaaatagcccacagagcaaagggcgcctcatttgtagaactgtttagaatctgctatgagctttcctatgcttgctccatttaaccttcaggaagactctttaggtaggcatttttagaacactttctggaaaggaaactgagcctgactcatttatctgaactcacacagcctgcaagacataaaaccaagggctccggatcaatgccttattcccattatacctgtgccaaagtaggaaggagtccacgggaccatattgaggggtcagctggtatcacccagccgtgaaatacacagagaaggcatacataccaaggcttagtcttcctcatcgagcatggaagtcattttaggtcatgccttgtagataccaggcatcttttcctcatttgtgtcccctcgtatttgagttttggacaaagcatttcaataaatagaccaaggatatcagtagcatctgggatcagccctacagtggggcattaggccagggctgagtggaaaatgttttccatcacagtttatttaaatatttccaagttaagttgaccaaccttgaaat

SEQ ID NO: 28312 - DNA, 819 bp, Bovine  19866880785960
  misc_feature (1)..(1): n is a, c, g, or t
ncctagaggggtcctagagctgatgccatgtgtatcacgaggacctctggacaacatccctgggattgcccagggagcctgtgacagcaggaaggtgcaggaggccagcttgcctggattcctgtggccagagctccacccacacatgtttacacgacgtacatttttccctaacaagtgagccgagtgtcattatgagttcagttcaagagggaaccagtttatttctaaagtaaatcaagttgtattttttatttgggaaatgagaaagttgggccttagtaacctcacgtagactttttttaaaaaatagctttcttacaaaacattcatgttaggcttgaatttggaagtaacacgttaaaggtttttaaatttctctcgtacagcaggactgaaatggtttcctctggcatatactcttttgtcttgaaaaataccagtaatgaatgctatgaatttctgcatcggaaaatctgaatcaccctgggatccacatgagttccttgatgaaatgtgaaattaattttatactaaataaaacttgaaaatggtttcaattatggggggtggggaaaacatgaaatgaagacagtaattctactgtatcatattcttgtttcattattttgaatttttaaaatatcatcatttttagacactgttctatttcataaagatgctgagattgtgaatgttggaagttgtggtgatacctaatacaacctgtcaccttctaaagagagtctaggactgctttggagtaggaggaaatggagggaagaaacaaatatttatgaagcattcactgtttgccaa

SEQ ID NO: 28313 - DNA, 1309 bp, Bovine  19866880801568
  misc_feature (1)..(1): n is a, c, g, or t
natggccccagaatcccatcacccatttccctgaagatcctgtgcagtgtattacaatgtaccccatggaacttaatcttcccaccataccctggccaggcaagcctggttgccaggctgttccattttcccaaagccccttcaggtataagaaaatatttttccactgggagtctactaaatgtcatgtctaatttaatcttaaatacatttccacagaaaaaagagtcaaatgaggaaacctctcctaacattcctgatttcttgtttctctagcccttcacccacatctccgttccatctttttttttgcaagggaagtagaagtgaacagggcatttgaggaggggggactctgccacttactaatttgttttccatcctcagccctaaatttctttttctctgacttgcactgagacaggacaggtggaatggtgacaaagggagactaacttacttatcttaaaagcacaaattgcccccagtcatctgaatgctacttacacccgagcaagcacctctgcttctccttaaacattttggttttcttgggtactcatttaagttttaatgggataacaggaggtgagaaagtcagggagaaatttaactttgctgtcaatctaaattccttctgacctctacctctgttttcttccctggtcttccttatggaggaaactgaaatgattccagtcagagtcagatagtgggaagaaccctggttcttcccagaaacccaggctccccatcagttcaccaccacattcccttgtggagctgaacacctgacactcacgttcctaatctgtagggtaaggaaattgaaaggattctcaccaagatcccttcccattttcactgcaatggtttcacggttccaactcaaattcaccttttatttctcaatcatactcagtttgatttcaaattacttaatgcaacctcctgtgttgtatgtgctagcatgatgctactcaaagtgtggttgtggacccaggccaatctgcagacatttactgatctggggtgagataagcaggcgagttgagaataggtattagaaattttctggcacttgccatggccacaccatccaaacatgtgaccagtggccttatttggttgtgcttgcctacagctggatgagtcgtgaactgtgtcctaagctgtgtgcaatagaaccaggtgtaaaatggaatggaaagaagaaagaaatgaatgctccaatggtgatcaagaccagcatcacccttcataaatcatattgatggtttgcatcctgaatatgatgtgatgaaaagtg

SEQ ID NO: 28314 - DNA, 1492 bp, Bovine  19866880828517
  misc_feature (1)..(1): n is a, c, g, or t
nctctatctggatattcacatgggattgattccaggattccagtgggtaccagaatcggcaattgctcaagttccccatatgaaatggcagagtatttgtatataacaaacagacctgtctatactttaaatcattcctagattacttataatatcatacaatgtaaatgctatgtacatagctgcaggcatgcagaaaattcaagctttgcttttaagggactttctggaattttttcaccccaaatttttgatctatgattggttgaaactgcgggtgtggaacctgtggattcgactctacttcattctcacaatagcttttctttgtgttttgggttctgcttttcttcatgacctcagattgcttattggaatatcacagcatgcttaggtggcaggcacgtcacattcctggctaatgatggttgctagtgcggcttgagctgagtcacggcgctgtgtgtggggaatgtccagtccaatcctttgcagatgaagcagctggtgacaggcttgggagaactcactagtgactgtggggcttcctttcaggtttgctgtcatgaggtcgaaggtgcaccaatgccaagtttacacaatttgctcaagtacggccattgttccacagatgcagctgagaaatgacacatccctggcctaaattgtgctagaaactgctcttatttaatgtcttatgaattctctggcttaatccctacagcagatgtttcaagcttagtgtatctaaccccaaattctaactacttttctgtcccctcctccatagaaggagacctcaatcctagtttgctacaaacaaaacaaaacaaaaacatgaggtcatttgatacaagttgtgtccttcatgcctccaagagcactgcatttttcattccccctctttgtttcattttgattatgaggaatctagttgtttcttggctccagcactggaatcgtcctatggcccttggcccatttctcacacccctccagagcttgcgtgtctgtcaagccgtctctcccctacattttcagttccttcatctcactcagcaagtgcctcttacctgtgtagtaacagtcatggctactctggtccagatcaagctcgctctgttctgccgctcgtgtaggtgtctccttttctcctccgcccttttctagcaggttggctgcatcctctgctggaggtcccacctcctggtctcttgttggggctcttcacatgcactctctccctctctggattcagtactcactctcctcccttagaaggagtaagtgctcaagggaaaagaatggaaatctgaagattaacaaatatttgctctgattaggaaattaatggtgctttttaaaaaggaatctgtttattcttctatgtactttacaatttttttttttacattaagcatagttttaattaggaaggcagcttaaatttggatgaatgtctatctacttaagaaacgttctacttatctac

SEQ ID NO: 28315 - DNA, 2500 bp, Bovine  19866880850339
  misc_feature (1)..(1): n is a, c, g, or t
ncctggtcttgtttttgctgactgtatagagcttctccatctttggctgcaaagaatataatcgatctgatttcggtgttgaccatctggtgatgttcatgtatagagtcttctcttgtgttgttgaaagagggtgtttgtcatgaccagtgtattttcttggcaaaactctattagtctttgccctacttcattgcgtattccaaggccaaatttgtctgttactccacgtgtttcttgacttcctactttggcattccagtcccctataatgaaaaggacaagactagatagcatagcccagaacactgcacatatagaaccaggaagatgaaaggtgaagggaatcctttttttcttaagtcgttggagttcttctttttttgaaccaactacttataagtgtgtattcctgcagttgacaacaaaggacatggcttgttttagattgaggctgggaaattggtggcatgcatatttatcaaatgaattccattactatagataagttttatttatctctccaccagcaaacacaggtaattaagatcttaagccagacagtcccactactctttaaaaaaaaaatttatgttctattggagtataactgattaacaaagttgtgatagtttcaggtgtatagcaaagggattcagccatgcatatatacaagttcttggagttctaatgaaaatgccactgaacaagaaagtcaatttgttttctttctcatactaaagaatgttgtcaaactaatactaatgtggactcaagcagaggacatcatcctggggtccgggaagccctctctggacttccatccattgagtgcttgaatttgaatgcaaaggtagcttgagaagacatttgaagatagcattttggaatacagttaacttggggctgccagaagtttggtcacatgctgagccagttcagagatagtaacccacatgaagttaacttttccccttttggcaccgttttttgttgataaggagttaactcaagtttgctcgttgcctccagcttgcgagagaattttgtttcacaaaagcaaatttagagaaatagagttgcattaaaaaaaaaataacagtccctttagacttgggtcatattgaagattcaatttcaagagtgttttagtgtaaacacatttctaaggttttcagatgccagcagatacagtcctttggggagagaccaaatgtgtccaaatgaaacaggggtcaagtgccagagaaattctcataaaagtaaactggtgcaaaaaaagatatatatacacacttattactttgtatattacatatttaatacacattaaattattatttatatttaatacatattaaatatgtaaatactatgtaaataaaacaatatgtaataatacatattaaatacatatacataaattacatatcagctttggccagagattcagcaaagatagctcaagataaaggaagacaaagattaaatcttaatacattcaattaaaataaattcaaaattatttaaaataatctttccgtcttcacaaaggagtcagctgtggtttgtgtctctgatgtcacatatgcatgtcccagcaaggggctggtgtgaacaaccagcaccagtcccagggtgagcggcattctcagggcagctccagaccctttttctgattgttccctttgtgctgtcttcagaaacagtgaggaaaggccatccttctctagttagtatggacagtcaggtgttcagagatccttgatggtccatgtttatccaatcataattcagcaaacacttactgaactcctttcatttagcaaatgtttaccatactctgtgttgtgaccataggaattaatcatggtctctttcctcaaggatttcacagtctcttgaaggagacacatcagtaatccagcaataaccatgctgaagtaacacagggtgctggggagaccaggggagagaagataattcatcttgatagtgaagcacagagggaggtttccaagaaaagtatccagagaagaccacactggaactgactctgatactctgaaatgtgaaggaattacatagaataagccccaaaacatacttcccagtgagaaacatttgtctgtctttctaagtaatggattgtgactgagacttaataatgggtctgaatattaatttactggtttcccattcccagtcctagttcaaggtgttagatacaaactaaatcaagttagttgcctcctgagaaatctgtatgcagatcaagaggcaacaattaaaactggacatggaacaacagattggttccaaatcgggaaaggagtacatcaaggctgtatattgtcaccctgcttatttaacttatatgctgagtgcatcacgcaaaacactgggctggatgaagcacaagctggaatcaagattgctgggagaaataccaataacctcagatattcagatgacaccactctcacggcagaaaatgaag

SEQ ID NO: 28316 - DNA, 790 bp, Bovine  19866880859254
  misc_feature (1)..(1): n is a, c, g, or t
nactgatttttattacatactggggacctcttccttttttctcttttgaaaatgtacacatctaacagcatattccacaggaaaaagttttctacatcatctttatagaaacacatgttaaaatgagttctaagaaccattccaaaattctttcctcaccaatgacaggttatgtatgtattaaacctgaaatcaatatacaacattgttatattctcttccttttttgccttttatagatttttatttagatgttcatcctcatctgtttgtaaacaatcatgcataggactgaaagcttggtatttgatctcactctttggcattcactggactttatggtctaacttcacgcctctgatcctttatatttcttcctgtctatttaccaatggacaaccagagtaagttaactgtcacataaagtgtaatgatttttctattagtcaaattccccattttatggtctagttgtaacagatatatagaatattatttctttcaaaaataattttcaagatcacataggtgatagcaacctagttttccaagctaattcaactggaaaccacaccactcggaggaagatgcaaaaaattcaaatgattcaaaatagcggtaggcttcagttatatcttaacaactttcacaacaaaccccagtgtctgttttggcaaaggatatctcataactttattgagaaaaataagtttcagatgccaaaacatgttttagcaaacatgtttgcttagacttgtggtttattgctttgcgatttaaaataatagca

SEQ ID NO: 28317 - DNA, 1580 bp, Bovine  19866880883681
  misc_feature (1)..(1): n is a, c, g, or t
nattttttttggtgggagaggtttaaagttcaggcaccaaatggaatagtgctcagccataaaaaaagaatgaaattttgccattttcagcagcaacatggatagacttgcaagatattatccggagtgaaataaaccagcaaagagaaacactgcatgataacacttacatatgaaatctaaaaatgcagcaaactaatgatcataacaaaaaaagcagactcatagagaacaaactagtagttacccatggggaaagggaaggtagacggggcaatataggtggttaagagatacaaagtattagaaatacaatgaactacaaggatatattatacaacacagggaatatagccaatattttataatcactataaatggagtataacctttaaaactgtgaattactgtgctgcatacctgtaacttagataacactgtacatcaactatacttcaattttaaaaaatggaaaaaaaaatacaagcaccaaactaaaccttttactatcttgttttataaataaaaaggccctggtgttactgcttccttatttgaaaggccaagcccagcagaagtgctgaacttttggctgggccatttgttaattaaaatacagaattctcctggccactgaaataacatttcacagagcacccagtcctgggaaccaccttggtcactttgggatgaatgacccagtgcccagcaagtgccctccctggagagaaagctggacacagtgcagctctgttgctgaaccgggttggagccagtgttccctggcagagacagagcagaccaaatcctcccttccccagcacaaagcacagacaggcctgcaactgggagccaggctggtgagcccagggatggccgacaggatatatctgtaaaaatctgcttcctttttcctggcttcaggcttgtaaagaacctggtcagtgggcacagagtgtagagaaataaatactttacaaggaaagggggaaatctggtgacgatactggaattaataattcttttaacatgaaagagcttttctctgtgatctttactgtcttacctagggtttggagtttaaacagagcaagagggtgagctggtttcttcattgtatcccaagcaactggcccatgtgtgagcacaaaggtaggaggcatctgagttgctcaaagaatatgggccagaagacctttcaaaacccctgaaaacttttccatacaaataagcaaccaggaaattggagtcttcattttgtctttgtgatcaaagccagagaggaaagatattaagcagatactgacccgaagttttgtggccaccgttaggatttattgactgaatagcaaataaggactgtgggaaagccgaggttggtgtttacttgaagggaagaaaagatttggattcagaggctgactggaaacagaagcctgccctactacggacatgagtccatgggctttggtaataggaggtaacaacacatttacagcattgattgacatgcattacatgcctggaactccaggacacctaataatatatgacagtgttaataataatggcaatgccat

SEQ ID NO: 28318 - DNA, 3669 bp, Bovine  19866880924385
  misc_feature (1)..(1): n is a, c, g, or t
ngtaaggggctcaggggagacttgtagaagtgtacctgcagtgctctatgttttgtttcaagggatgtaggggtgaggtcactttaaatattcatgggatatatacttaggttttctgtactttataggattgtactatgcttctgtttttttctttaatttttaataggaaaataaaaaagtgtctccttaaggaattctaatgtgcctcaggttagagaacaacaagctctgggacccttgacagtgggctggtgtttgtgcttcttcagccaactgtatgtgaggctccgactcccagctggacggactgcagccttgttgactcatggcgctttggttaatctaagtaccactgggcatagccatactgctggagacccctcacctgaacatagacctgccctgtaccccaacccatggaatttttcagcttctgctctactcctaaaatccttcctctagataatagcagagcataccaaatgtaagtcctattgtatcaattccccttaaataagcttcagctgttctcttccacaaacgttgaaaacttagaattctaagacccctatgtgtaaaacttcttacgaagtttaccttgcccaaagcttagcaattaaaaatatcacttccttttctcctctccactttgactccttttcttgctcctgatcacagatcccaattcttaatcactcacaggactttgggaatggacagacagcctgattttaacacaaagtgatggtaagaatctcttcttctgaccacagatattataggattcatctgggaagcaaaggattttggttattatgtatagaaatccagggaaatgcctccttgagaacagcttaacagtcattatgcttattttgcaaatgcggaaagctttgcaaaacctgaaatggcttggattggtgcagcgattagatagatctgcccagtcttgaaagatgtgcattctctttcaatcttaagcaagaaattccagcagagctgggccagtttcttacagtgatgattaatgcacttattgatgtatatgtttgttgaaggtgccactggattttctctgtctggtttgagaacagggtaatttcctagagaaaaacgtgctttgtgtttctgctcagttttatttatttattcgttttacattatgataaattgcactgtgttttgagaaattgacatggtacatgttaaaataaaaagaacagagaggaagaacacaatgtggaaagcagctggagcatcttaagataaaagagggaagtagaaatgacaaagagttttgaaaagaattaatttcctcttcatcatctaaacaaacaaaaattttatcttctgggattgttgggagagatgaatgtttgataacactcccattcaaagcagtttgctgtgatggataggtatccagcctctaccacaaaggagcatcgtggtcctgagtaaattagtttgtctttctgtgcctcagcttccaaatttgcaaaaacagagcgataagcatagaaataattcatgaagagggcttctatgtgccagtgttctaagcactttacatatattagttcattagatcatcatgaagcagtgaatgcaattattatcatctctactttacagttggggaaactgaggctcaggggtattaacaggcatgatcacatagctagtgagtgacagagattgaatcaaacctaggcagttggctgggtgtccattctactgcttctgtaggtttgaacatgtcacttttcttaaagtgctcctcccagaatcaccatcagcatgaagtccaaactccacaacgtggagtagattgcctttcacgatgaagcctaatcctgcctctacagtcttccttcccctgaactctggccactacagcacctcccccaccagccacacaggggactctcatctcgtgttccctgaatatcacctgcaccctttcatgccctggctctgctcttattcttccctctgcctgcagcgctctccttccactgaccacttctgatcttctttatggactcctgtccttctttcaggtaagccccttaaaacctatgtgccctctaggaatgaccttgatttctctgggcacagatgagtcactcactttctatgcttcagtacagcttaatgtgtgcattggttgtagtgcttgtcactcagtatcacattattttatgtatgaatctgtctgtgctgccagagcatggttcagataatgggtttcttctgtaccagtctaagaaatcagtagtactagatcactgggttgagaaggatttttgaaggcatatttgaattcagtaggagaatgttaaatgcagacttcataaaggcagagacctcacctgacttttacatcttagtatctgtagtgccagggcttcccaaatggcactagtggtaaagaatctgcctgccaatacaggagatgtaagagacacaggtttgatctctggattgggaagatcccctggaggaaggcgcggcagcccactccactattcttgcctggagaaacccatggacagaggagcctggtggattgtagtccacagggtggcaaagagtcagacaggaatgaagcaacttagcacacacgtctatagtgcctgtttcagcctgagtacacagtagacactcatttgtatgaaagagtagtgaattcacgaggtctcctatagcaagagcggtgaaggtggttacattcatgctggatattttacgttcctctaatagtcactgaactcttcaaggggaaggacaacatcttatttatcttagtgtctttgtcacctcatttagtctattgaacaagatattattgctatataaatacattgttgaaagaagtgttgtaaagttcagagagtctgtgctgatgtgaggcatgaaggaggaagaccaagtcatgttacacattctatcttttgttctgttatgaatcaaatggacccctgcagaaagtaatgctttctgtgactgaagatgtgttcactgatgtgtgactctccttgccccaccaccctcactcccaccatgttgggaaataacagcaggtccacctgagggttagaatgaagagggagatggcagatgccagaggggctgggagattgtgagacaggctttgcatttattgttttctcctccagtcctcaggaataccttcatctccctcactttttactcttgctcctcctctcctagctctgtgttagccagcctggtgcgtccagtgtttgtcccagaaaaaagtaaatcaaagtacctctccattgtccaagtcgttaaatgacaaggagagggattttagtcctataaatgactagtctattttaaaatgagccaaggccaggtgggacatttccactcaagatgccaaccagacaagcctgtgactccttcataaggatattctatatactcatcagttaaccttggatcctactctttggaaggcaccagaaactctcagtgaaaaagacagaagacccaaagagaggaatgacaaagaggtccgatcaatgaaacacttcagcagcaccaaggggcccaatgccctttgctgcctccaaaaggtgctggtaatgtaattggtaaacaaacaagtactctctgaacagattctgtttccag

SEQ ID NO: 28319 - DNA, 1089 bp, Bovine  19866880952038
  misc_feature (1)..(1): n is a, c, g, or t
ntgtgagagttgatggccttgtttctcatttgtcagttgtaaagggagtccccaaggctcaatttcaggcccggtattgtttacatagcccagcaataatacatcacatgtggcaaaatattacaaattcatttttatgctgatgatatggctcatgcataaaagcagctaatgtgcttctctttttcgttgaaattgcagctaagtttctaaaggcacaaagggccttttgtgttttgaaccataaagaagagaaagtatatgacagtttttagaaggactaatgaagggtttgatctgcctcggctgccatctgtgagtcccattatagcagttacggtcattataataccataccctctgaaggcatctgtcaggatttttaacactactattattattattatcatcatgattattatcattattattattattattttggaagctatggaaaatggctttccattttgctgtttgcatttaggtgatgggaaaaaaattgtatgaacgatgatttccatctggtactttattcaaatggcctgtaccaaccatatggagatgacacattagcatgtatactacgtaacaagggatacactgcatttaaaacagtctccatgtaaatcaactcattacgagtcacagtaagttgcctgcactttgtctctgaagaatcttcagcaggaaaaacatgagcatattttaaggaacacacagatgtgccccaaagagccaaaagctgtatttagtttttggacttagagtctgagaatgcaaaccctgggtatctttctcaagaaaagaacagtgccttgtaaacaagatttcatgctatgtaatactaacaaatcagaaaagcaaacaaataaaatggcaacctcctcaggaatttggcatgttttaaatgaatatttacagaaaggaaaaggagaaagccgtttcatacctcttctttagatacattctagctctaaagcctgactttttctgacaccaaaagacagcaagtagctgcttggccatgggtaatttggatttaattgtgtttgcttaaaccatgcattccactcccaaaccataaaa

SEQ ID NO: 28320 - DNA, 1993 bp, Bovine  19866880969948
  misc_feature (1)..(1): n is a, c, g, or t
ncagccagagtgaattctcaaaccaggaaatgagtccaaattctactggggattttctcttttgcagcaattgcttctgaatagtgaaaagctctcaacattttccttgagcatatttatcaacaaggaaatggccctgaaaatgtttctcttgcaatcttgcattctaagacaatgtgatactagcatttaataattaccactggaaaacaagaaaatgcaaacctacctcttatcacacgattggaaatgatgtctgaaattgtgtctatctggggccaactgttttagcagacatctacccaggagcaaatccttgtgtgctactggacatgtaattaacctggtttgcacatgtatagagtgttgctagtattaataacagctatctcacaagcttgtcatgaggattgaacaaaataccctctaggaaaacattctacccagaatagatgcctgataaatgttcattcctcacatccttgctctctttttccctcccccacttctttctttctcctctcccttcccttttcaccatcccctcccctttcctcccttctttctgtggtagagctgatatttacaggaaaggaccatggagatctagacagaaaggagattgactctgggcactatgagggaaggagagaaaagtcagagaacaggcaaagcgcaggtagcaagtgagagggatgggcctggacagctgataagagaaaaggttttgcagttaggaagtgcattggcactgacagtatctgaggcttgaagaggtcaaagaggtatagatcacatgcctcctatagtcagcccctatggctgaactctggagaaggaaatggcaacccagtccagtgttcttgcctggagaatccccatggacaaaggagcttggtgggctagagtcaacagggttgcagaatgtcggacatgactgaacgactaatacatgactgaatccaggcactctcctggctgagttgacctcatgtatttttgtgcctaatgaggaatagcagggctgagtaaccccaaagcccactcccatctcctgctcccaccttcttccatatcccttctttgtaaacatttcttatttgggaagttctttatcctccacctcaaatttgcctgccactcttctgcttatcttttgatactctgcttaaaatcccttagtcagtgcgattgattcttgcaagtgttccccaaagcatcttgactgcacttcacatgtgcatttattaattcagttcaggacagaaagcactggtggggtcgcccatgttctgtgcaggaggccagggcctgagtgagagaacatgactgagacagagtctcactcccaaggccttcccagtaggcacagtggttccccaaacccagttctcaccagacaattaatttcagaatgcacggggaccaggtgttcaaaattatatttctaggccctactcccaggtacccaggtaaagataaggcttgagaatctgtaacttaagaaactctctcaggtaattctgatgtgtagtcaggtttggtaacttctgaaaagataaaggaaaagtaagcaatttagaatattctctctgacaaggtttggattgatggtgtactatattgccagctatgctgctgctactgctaagtcgtttcagtggtgtccgactctgtgtgaccccatagacggcagcccatcaggtcccgccgtccctgggattctccaggcaagaacgctggaatgggttgccatttcctccctccaatgcatgaaagtggaaagtgaaaagagaaagtgaagtcactcagtcgtgtccgactcttagcgaccccatggactgcagcctaccaggctcctctgtctatgggattttccaggtaagagtactggagtggggtgccattgccttctccattgccaactatagctgggcccaaaaacttcagagagcaattaggtgagcttatatttttactgtgggacttccca

SEQ ID NO: 28321 - DNA, 1691 bp, Bovine  19866880982714
  misc_feature (1)..(1): n is a, c, g, or t
ntgatgtccatgtgtagagtcttcttttgtgttagtggaagagagtgtttgttatgaccagtgcattctcttggcaaaactctattagcctttgccctgcttcattccgtactccaagtccaaatttgcctgttactccaggtgtttcttgacttcctacttttgcattccagtcccctataatgaaaaggacatcttttttgggtgttatttctaaaggtcttataggtcttcatagaaccattcaacttcagcttcttcagcattactcgttggggcatagacttggattactgtgatattgaattgttttccttggaaacaaacagagatcattctgtcatttttgagattgcattcaagttctgcattttggactcttgttgaccatgatggctactccatttcttctgagggattcctgcccacagtagtagatataatggtcatctgagttaaatccacccattgcagtccattttagttcgctgattcctagaatgtcgacattccatcttgccatctcctgtttgccacctccaatttgccttgattcatggacctgacagactgatagtctttgttaaatcctattttaacaaagacttactttaacaaagtaaggaaaattagaattatgtttcattgtgagaaaagaatcattgaagatttgcctcagagatgccatgattatttctcttgttccttcagttattttcttaaataatagtgcagaactactgaaaatttaatcacaacatccagtttacattcagtgtattaacatataagaagtagaattctcccttctgcctgtggagagagtcagctcaggaaagcgtttaaaaatttttttccttgcaaggaagggaaaagggtgtgccatttcccaaacacaaggagcaagaacagccaatataatcttgaaatcaaacaaagctgaatcacagttcaggcaatccctaattttgtgatcttggacgagttacttagcattgttgaacatcaatattctcattcagagattggggatcaataaaaaaaaaaactacatcatagtgttgttttagggtcagttgttaatagtacataaattaaaggcattactgttattattgaaactatttcttaatggaacatttggccatatccaggaagacggctgtgatatcattttttcaaacaaacaaacaataacaacctcttgctattgtatagaaaataatttaaaagggatcaagagttgggtaaccagaaaaatgatggcagctttccaaataggagactatagtggccagtacctagatcacagcagtgtagatgtttcaagcgtctagagttaagatgactctagaatgcagaatccatataatctggtattagactggttgtgagaggttgtgccggagcaaggaatcagcactctaggtctctggcttaaacatctgggtggatggatgtaccgttagctgagttggggaagactgaagggacaaggtcaggttgaaggtggcagggaaatacaaaatttgatgatagaacaaaagtccacttttagaaattaatagtggaggcttccctggtagctcagcagtaaataatctccctgcagtgcaggagccatgggagacctggatttgatccctaggttgggaagatcccctggaggaggacatgctaacccactccag

SEQ ID NO: 28322 - DNA, 1494 bp, Bovine  19866880995525
  misc_feature (1)..(1): n is a, c, g, or t
nccttcccttctccgtggacctgttttgtcgaactcccccatgacctgtctctcttgggtggccttacacagcttagctcatagtttcattgagttagacaaggctgtggtccatgtgatcagttttactttatcagtttgttaacatcagatatataactttgatatatattaaatgatctgtttcttctctcctttgtaaaattgctgtaatgataaaagtgataattctatcctgacaggccagttcagtagttattgtgacttttgtcattacttaatacataccagaagaattatatggttagtagtaggaaaatttgaaagagaaagaaagaggcaatgatttttttgtacctaccacacacatatttacatatctgcatccctttcctgtagctagctcattaaaagtccaatgcatttatgccaatgccttccaacaaaaaatgtcatcacatatcagacctgatggaagagttaatagttcagagtgagagccccagcactttagtcctacttttctgagatgtcaatctattcatcagtttatggaaagaaaagaaataaatgataaaatagagaaaaactggaaggaaaaaatatgttatgaaatatgtgcataaataataaaagtgtagtttgtaggagaaggggaaaataatgtgcaagtataaaatgttgttacctaccaaaagtaattgcttttctctttattaaaccctggttgctatggaaacctttttgcattgagttaaaactttaaaaatacttatgaattatcttgttccagaatttgcatttagttttaatatttttaaaaaataaattgattttaaatgctgttgttttgaaaccaagactgtggtttgacaactttgatattcacatttctccatgaattgccccagccaagctgcatcttctgcaaaggcagtcactttctgaaggggtcctatgcatgcttcactgctgttcagccactcagtagtgcctgactctttgtgaccctatggactctgatcttctaggctcctctgtccatggtattctccaggcaagaatactggaatgggttgccatgccctcccccagggatcttcctgacccagggatcaaaccctcctcagtctcctgcactggcaaattggttctttaccactagcaccacctgggaagcccaactggcctttaaacttggagggaaaagacaataacaaataatctgaataattttcaagagattagagttctatgaataaaataaaacagtgtaattggataaaaaaagagaggcaagacaagtaaactttttgagagggtagtcaggcaattttaagagaaagcaatattcgagtagaaacttgagtgagaaaaaatattgcagagagaagcctttcagggagaactccctgaaaatataaaaacccaaagcagaaatgaacctgaactgttccaggaaaattaaaacagtcatgatggcttgggagcaca

SEQ ID NO: 28323 - DNA, 1335 bp, Bovine  19866881084015
  misc_feature (1)..(1): n is a, c, g, or t
ncctctgcacacgctgctccttctgtctatgactttcttcccctaactcatcctgtcttttctcagatgcctcatagaggacttccgcgttccccacttagcgtattctgaacctcagttcttgatttgcttccttctttgggtttggggagctatgagccaggaaccaggatgattcacgttaaaaatcacattacttgatcatacacatttgcacaacagaatttatgttccatgaagagagggaccaggagagtctgatttgttcttatatcccctgggctgagcaccatgagggatccatagaaacttctggataaatttgtgttgactgagaaaggaagaccccagcccaacactatcgacattggcagacacgaggtcaactttggtattgaccttataggacactcagatcttgctccatctaaagcactccactcctacatcatagacagggtgagagtttagtcacagcagactgagtgtccatcagatacagaggggctggcccgcctggaccaggttagtctgtggacttccttgacttcttaagcacaggtcttatgtcagatcatatggatgaaagtcccacttccattttatgtagactgattgacacctatgctgtaacatgtatgtctgtcatgtctggctatctgtcacgtctgatcatcagtgttatgcctgttagcctcttcatgaccagttcaggaatccagctcttccctgatctgattttgtggctcagcctttaaccgttacgataatcagtgtcatctgagtctgctctgaaatagttcgctgtgccatatggccaattaaaagattataaagactgatgcttttaagatccaccctggccttgactctgtgtggccaatgaaatcatcttttttcaaggaaaaatacctgtgcaggcatggaggaatgtgcttcagatatgattcttcattgggttatatctatgccatgtacatgcctatacattttcaaacttctgtagtgtgcctgatttggagaagtatgagagataataatatctctcccattaacaaaattaatttagaatcatggtacttccacacaagggaattttctcagcagtacaaagaagcaatctactcacatgcaataatgtgggtgaatctcatttgcatcactccaagcaaaaggagccagatttgaaagactacatatgtgtggttccatttatgtgattttctggaaaagacaacaatacagggaaaaaacaggttaggagttcagggggctgggagtaggttgtgcaggtgggaaggatgatcacgaagaggcataagcaaattctctggg

SEQ ID NO: 28324 - DNA, 1510 bp, Bovine  19866881098439
  misc_feature (1)..(1): n is a, c, g, or t
nttataaattataattaaatttctaaggtctaaatcctcatctacttacttggaggaatatttgattgggtaatatagtagaataattaaacaatctctgtctctttagagtttaaacaggatttgatctttagtgtaaataatttcttctttaatttgcctaccaccatcctggattccttgtttcttactggtccaaaccgtgtgtttaagtaacattttaaatgtgaatttcttaagaagtcttttgtgcttttattttttcttaaaacaatttttgcttgcctggcctgggacactggctttggggcttttggggagataagacacttcagtgttttcttgacagctgaactaaagaaaacctcttacacacacgtcatctgatttacttcatgccattttgattgctcctactgacagttctgatttaatttttccttcaaaaaagagtatcaatttcaaggtttagagttcttgggatttagaatctttgattaaaaaagtgaaatttaatcttgaatcaaggggagggaaatgtgagcaagattagcaggcttctttttgatagaagactcttgtagccagtatttattatggtaatgctttgttattataaacctcctacgaataatattttggggagctaccacacaacaaggcatacattataacacccgggttaggaggcgggtgacagcaacgaactgagaagcacaattatctcacggatatgcatgcctatgaagtgtgttattacttttgttttttacaacttgtagaatattttcattgtaggtgaagcatcagacacatttttattcaaaggaagagaaacaaaaagaaggttgtgtctgctgtgtgttctgaatggtaccctggtggccctggtcctctagttggggggctaatttataactgagtgtctcccaggcgccagaacattcagctttattgtctgtgtcatggtcttctgatatccatggcacaaaaggagtcattatttggaaatggtgattagtcagttcgaacaggagggtctgctggtgtgcctacaggaggtgttgttttaggttgacttagtgaaaaaaaaaatcagtaaagcttggtgtgtgttagttttgatgtttcagaaatcaagtaaccatgcaactggcattttatttgttgctaaagattttaagaccatattgacagagtcctaggataaaaattagtcagttctggggaagaaagtgagttagtgactgttaagtactttgccaggtggtttacttcaggtagattttaattctcacaacaacctataaggttgatagtacgtccatctttgcagaggtgaggaaactcaggctctgagaattcaaatgagtttcccacattgctaggagatagtttgttgttctgacactcagtcatgtcttactctttgtgaccacatgaagcatgtggtcagcatggtcaggcttccctgcccttcatatctccggaagattgctcaaacacatgt

SEQ ID NO: 28325 - DNA, 761 bp, Bovine  19866881102474
  misc_feature (1)..(1): n is a, c, g, or t
ncaggccagctgttgttctcatcactacatcctttcctgaaccctccagaggctttgcaatctggcactaacccccagcgctacactaatcacaaggaacaggaagcaaatgctaacctgtgcatccactttccttctctctgcagctccacacccctcacccccagtaaatacagacattgagagagtagggaaggaaggtgaggaaggagtggactgcagggaaatcgttggaacaaactagcctgggattcacaatttgaagtagtaagatcttggtactcataaagccagatgtcctctgcccacgagaagaccaaagatgataaaaatgcaaactacaaagcggggccagtggatacacagccagcaaaggccaccgcatatgagagccagtggaaaccttgatacatggttcaaactcaggttgctcctttaaaaatctcatcagaagaattatttcatttgaaaggcttgtggggcagcgagggttttccttgcatggcattttccctctccctgtacagcaactgtcagcatagccctaaaaacccagaaggataaaaagcagcttcttcattttgcaaagatgaaaaagaagcttagagcaagtggaaaggaaccaacccactggaactggtgaaactcacttgagaaagtcaagttttcaaagaaatcttctaagtgctgacacactccaggctcaagtcgattaaggaaaatgaatttctaaaactaggttggcagcaggtatcttggca

SEQ ID NO: 28326 - DNA, 1112 bp, Bovine  19866881105917
  misc_feature (1)..(1): n is a, c, g, or t
ncatgaaagtgaaagtgaaagtgaaagtgaaagtgaagtctctcagtcacggccgactcttagcgaccccatggactgtagcctaccaggctcctccgtccatgggattttccaggcaagagtactggagtggggtgccattgccttctccgagaggcttctcacactattcattcaaactagtgatgcctgtgggtattggtcttgtcaaccagttctaagtttgtgttttaagacaatcaggatgtaatccaatcttggcaagctcttgggatgatcataatctaggcccaacatgatcaaaggaagagatgtgtatagactgttggaaatagttgtgatgaggggctcctagcttgagccaaagctctcattctgacaagtctgggcaactccagtgaaaaagagaagtcccctgtttgtcttcttgtgagagcaaactccatcctaagacaggcagagatgcagcacgacagaaccccctagttactgagtctagttacagaaggagggaattattgtgaatataacttggcatctgtcactccagctatcccaagtccagggcctgccatggatgcccatgttggttctgaggaagaaagatgctgaaaataaagctgaaaagaactgtgaaatattcaagtacaggcccactgatttgggatttctataattgagtaaaacacatggaaaggaaaatccagatgacactgctggtgatcagaggtctccatgatactagtggcaacgtgcagtcaaagaggatggatgcagtagccatgccaggctgagagccagagtgactgggaaaacggggcgaacaggggggacaatggcagacagacatgagagacgatggactcctgtccagcgcagaaaagagatatttcctctatcataaactctttttaggaagactaggcatccgcctaggaagatgatcaccattggcaatacctattataaaatagtacctgtggacaaagcatacatatattctctggcaaatggactagtaagcagaaagaaaaagtgcttggcttcttgcagaaacaatgagttgtgttaaactgagcttctccggaataatatcagacgaggtccagaag

SEQ ID NO: 28327 - DNA, 938 bp, Bovine  19866881128894
  misc_feature (1)..(1): n is a, c, g, or t
nttctccaaatttagagatagattcagagtcgagaggggagttgctttcagtaacctgcaggtctcaaaccagtaatttgacttcttgggagcttaaaagaggattgtctaggccagcaattctcaaattatttggttgcaggacctctctacattcttaaaaattattgaggacaccaagagctttagtgtgtaataaaattatgtctctgggttggtctacactggagagaagttcttaccttcctcaaatattcttctgtattttttgactatctctgtctaccagaatgtaacctccacaaaggcaggaatttttgtctgttttgttcaccattcagtctctgaatttgatgtcctaaagctagaacattgtctataacaatgcttggtgcgtagcaggcactcaagaaatgtttcttgaatgaatgattaaatgaatcgagaaagataggatattcactttttactcgaacattgtggagtgtttcatatttctcactcctccaccctccaacccttaggtcccagcatgctaggcaggctccaaaattatattttgatccttcaggacttcctgactcaagccctcgacacagctttggtgtttggtatcctggagatgaaacagcagtagcagtagcctttgtgtttccagggctctgtcactcagagacatcacacaactgcccacaaaaatgccatcttgcgaaactgttaaggagaatggggaaaatattattttcatcactatacaaatgaaaatgatcagacataaacagagagatgctgctctgggaaatagccgtcaaccatcaagagaaagtgacgttgtttacttaatattccccatatactccatctttagcaggatttgctaattttttcttataaataacttctgaacaaacattttaggatataactcttttatattt

SEQ ID NO: 28328 - DNA, 3590 bp, Bovine  19866881155967
  misc_feature (1)..(1): n is a, c, g, or t
ntagagctttgcaagagacagtcgggttgtaacttgacaggggaaaaaagatgaggaggctccccctgtaggtaaattgtgataagtcctatttcagtgggggaagggaccacaggtaggtgctgacacgtgtactctgctggctgctatgaggaaaggtgttcaaagggtcttactgccgcgtggcacacggctcatgcacataaagtggatagacaagggaggcagctggtgtgtgacattacaggacggcacggcgccggttgcttggggccctgtgatagcccttggcatccctttccttatctctgcaccgcgcagctgtgcaaaccccatgggaacgagagtcctgcctgcacttctctgctgtcaggaaagatgccaagggcagggaggataaattagaaaagcatttctaagtacattaattaaaagctcccatgacggaaagtatgctttacagggattgctcgggccaggctggtgctctttacctgcagggctttcctggaaaagctcatttgaagtggatcctgtggtttcccgttggagcaatgggcgacggtgtttcctgaccaagaactcagcatcaaacagaacattattgacagaataatgccattaaagcagaaaaaccaaagccataaatctcagtaactactgaaagtgataacattctgctactgattctgtaaaatgaatataaatgtagagtattggtgaatactgactaaggcaaggtccatgatcttctattaacatataaaaattcagctcaactgtgtcataaattagatttcactcatgctgaagtattaagtgtgataacatgaattgaatacttgaataacaatagttctgcccctccctgaaacttgacaggtctatgaagatgcttttattttcctcttaataaattcctttgttatcagcagaagcatgcataattattctgttatccattccatccacctggatgtcaagctcacagcatcattagatcaacgaggtggaaatctgaggaccatgcaaagtggatcaaatcacagcctatgtcagaaggcctctgatgtacagattagaaagatcttagctggagaaatacttaatagctaaaatctacaaatgaaagctttatttttctcccattctttattttctcactcactctagttcctaaatttgaatttaaatattaatatgtcttatgacattccttttgttgtttaaaaaatacactgtgattttatctttttagaaaagtggtgcatgttcattgtagaaaatatgtaggaaaataagagaaagagccagcactcagggtattgaccgtggtgaatatttgggcatatagttttctgtgtgtaatcactccagtattcttgcctggagaatcccgaggacagaggagcctggcgggatatagtccatagggtcacaaggagtcagacacgactaagtgacttagcacataagcacgcgtgtgactacacaagactggaacagttttgctctttttccattaatccttcctgaatgtttccttgagtttaaaaatgtacattgtaaacaccatcgtaatgtctgtagaatatttcattgtagaagtctcctaaaatgtaggtaactaggcccttattgtaggcaatttaggttatttctttttttttccattttaatagtattgtgatgacaccccctgtatataaaccatatgagttactatttccttaggtgtgaaatttccttatcaggataaaaatgtttcttagggctatttgtaagtattgccaagttactctgtagaaagatcttctaatgttattaagaacatgagagttgagattagaaaggcctgagttacagtcctggttctgaagttctgaatctgtcatcagccacgtgaccttggggatatagttaacatctccaggcttcagtttccctatctgttaagtgggctggtagtatcacctgcctcatatctggttctgtatggagtaaatgtgataattcatgtaaaggctgagtagagcaaagtgctcaacataagagctacacttttacacttttgccagcagagtatggactgtctatttcttcattctcttacaaaatctaggtacaattttgtgtaaaagtcaacttgacaagtgaaaaaagacatcttatagttttaacttctgtgaaaagacacatctttcaagcctttaaaaatatgtgacacatttcaagtcaagaactgactttgacaaacatttttccctcaaatgttgtttctcatgagtgccaagtaatagaagaagctcaaatcttccttagttttaaagggtagatgtattattgattgtgtctgagagtccagagtagtctgtgggtagggtagattatgtgtacatagcaattattaaatatgtgctttgaacgtttctctaagcagtctcagtgaattggattgagctgttcataatttattttaaattgtataaatagcttcatacaacaaccggtagaaatatagagaaaagaaggaaaacactggccagcagtcctttcacacaaacaaattaaattttgtttgctgactgtccaaacagttttatagaattacattagacattctttcaaatcagagggtgcatttcctctggttgaggtttttcccaaaaaagtgccaccattttaccaggttcatgaggtcccatccccttcatgtcatgccagtgggagttgaatacgacagcaagggtacccacacccttgggccaggaaagtcggtgagaaacatgtgaagcagaagtggacttggagggtaggacggcagcagccaaaagtggtgctgtgaagtctgagtgcagatgtggtgggcgtgggtcagtctgaaatgaaaattgaaacaatagaggaaataatgttgaggagggttcctccccagacattcagtggctgttgtaaggacaggctttatttgtcttttcttggaaacctggaggctccacattactttaaagacacaacatgcgtgtctaatattagaaagggttgaatatgatttcacaggttttctgtaatacaagtggagaaggtattaagaattacagctttgattattacagaaagcagagagagcagtttttctgtcctgattattgtgtcttaagtatcaggcatcaaacaatctctctttgcatgaaatgaaagcactcttgaggtttcagacttgtttctcttttgttccagcttagttcccatttcccaaggctgtggccttgagtgttgaaatgtaataactttgaaagtacacggtgagtctattgatcttttaacatggtttctgccatttaattcttgttcagagcaggcaattctacccagagcaagctggtcactctctgtaatcaggtgtgtacacatctcacaccaagagggaatgcttgtgtaagaacactggatgaccatgtcctgatcacttttcaagatcatcagtgctatttataatcttgaatagtattttttctgcttccagccttgaattagattctgtaaagaagtggtttcactgaacagagtatgaaaaaaataagtctaat

SEQ ID NO: 28329 - DNA, 1137 bp, Bovine  19866881206009
  misc_feature (1)..(1): n is a, c, g, or t
ntgtgtgtactgtaagaaacctggaagatcaaagagtaaaacaataattaatgcttaaagaaataaaaagacattttctctgattccctcacattaaagatgtcaccttcttggcttcagattctagaattcaagcagcataagaaaaaacaggagttaaaagctatgtcctcaattgcctgaggagtttagaaagaagtggtcctagaaggctctaccatgaactctggtctctgccagtcatgttctttgtaagcttaagagcaaagaataagactttaaattctggattatgttatagtttctgattaattgttccaaggggctggataccagctgtaatgtcactaggaagcctatctctgaagttatctattatgtggtatattgtgatcatcagatatagactgcccaaccacaaggaaacatgtgatcttgatatgagggactaatctggatcagtctggaaagttggagtctgtgactttatacatatcctcttaaaaaacaaatttattattaattttataaactttatatcaaaactaaaaaaatatcttcctagctactgctctcataagagtttacaaatgattctagaatatttgactgattgcttagaaataagcaaagtgcttgtgatgaaaatgtcatcaccatgattcactcagctctgcccagtgacatgtctccatatctattggtgtcatcgggattacatccagatctgagttaaagtagaatctcactatggtatttttccttttgaaaactgtaagatatggcatagtatcgttttcttccagaagagagagatgaagttgttaatcatcactgtcttcattgctcatctcttacactcaagtgaaacaggctgcctttgatggacaggggaaacaggagtcagcaaagacattgcaatttcaggctatcacgctctagctgttatcaatagctatacatgcaaaaattatattaaaacatgtatgtctcatctcacacaccatagtacccatgttcattatgttaaatgctctgaattctgactttaataaattaatttaaccattctacatctctttaaagactaggttaaaattccatactacatatttaagatatatgcagttattttcg

SEQ ID NO: 28330 - DNA, 760 bp, Bovine  19866881209502
  misc_feature (1)..(1): n is a, c, g, or t
naggttcaaagggagcaagtgatgggatcagatttggatttccacaacatgtaagcaatcctctctaatgatggtggatgtttccctttcgggcttgctaaactggaaaaggaatatgaaagagcctttaagatggctcctgatcttggggtgagcacaattgcactcttgtttaccttaatgtaataggatcattatctgggtgccccatttggatgaagccttgaaagcatattaacctgtcaactttgttcgcaataattagggaaaatctctcaggctccaagcccaggtttttaaagccaatggtgaagtggtctttccttgttttctatgttgactttcattaaagatttgcataaacataaccgaatggtgactcttgctttttggtgccagccaattatatgaattgatttttgcaggccgaaggtgtttttgatctgcagtttgtaaaaggtgaaggcgggggtgttggctgaccttgacctgaacaaggagaggacttacctttatatctcagggtctaataacagagacctcagtggtaaatccatgggagccagtggctttctaaccccactgtgacagagggtctcctggggagtggggccacaactgctcaaaggaggcttgtgcttctcttctccctgacccactgcctgcctccatttacccaattaaagtagtgcagggcatgacctgcctgctgctttcctggtttcacttagccgacccaccctctgactttggagtgcat

SEQ ID NO: 28331 - DNA, 1755 bp, Bovine  19866881501409
  misc_feature (1)..(1): n is a, c, g, or t
ncttgctgcagggccttctgtgtgactaatgataaagactttgtctgccaatgcagtacaccccttgggttcattgtcctgggttgggaatatcccctggagaaggaaatggcaacccactccagtattcttgcctgggaaatcctatggacagaggagacagtccatggtgttgcaaaggagtcagaaacaacttcgcaactaaaacaacaacaacaaaacttgctgggaaaagagcactagtctcaggagatgtaacttagttcacttttttgtcacttactaatgtgactttgggcctgtttatagaatgactttttttttaattaataaaacagggactgtgctatgtcctctttagcactcataacagaatgagaaaggcctttgtaaactgtaacgtcatagtccaatgtgaggttattatgtctccaaggtcaatgtgtttgaaaatatattagtttgtgtttgaaacacactgcagttctctttacatcctggccaatcatttccatatttaaacttaagccccttaggcacttcccaggtggcactagtggtaaagaatcaacctacttagatacaagagatgtaggtttgatccctaggtcgggaagattgcccagaataggaaatggcaacccactccagtattcttgcctgtaaaattccatggacagaagaacctggcaagctgcagtccatggggttgcaaagagatacaactgagcgactcggtaaaaagcaaacaaggaccttggctcaatctcctatatctttcagtctaattagtggcctgaaagttttgctttatttggaatttgtcaccccacgttctaaagaaccaggttcagtgattctcaaaagactaagattctaagatctggaaaagtgaatcctaattgaatgtcttcagaaagccaagagatttgatgctgtcatcaaattggtctctatttcagttatattgtaatagagcttattattcatatatcagagctactcacaaaatggcagcaccttgaataggggtgtattctaagagctgtgttcccaacatgataacaaatagacatttgtaactgtttacatctaaattaattaaaattcaatcaaataaaaaatttggtttttcattcacactggatacatttcaagtgctaattgaccagatatgatgagtggctataactttggacagtggagactatagagtatttctatcattaagaaagttctattgactagtcctgctctagaagaaaaggaaactgatgtcacattattcagaggtatccactaaggtttcatgaagtattttttatatcatttttaggtttccaatttaaaatagaagcctttaatgtctggacaaggtttgacatttactcacctactgcttttcttcaagttgtatttagaaaacttggtatctgatatttttgaatgttcacttctttctgttggtcccttaggtcctgcgtgacagacatgtgtgaatgtccagtccataaaaactgttactgcgaatcattcctggcatatacccgggcctgccagagagagggcatccgtgtccactgggagccacagcagaactgtgcaggtgagaaatttctggcagatccaaccatcagaaactcaactccagtgcccaagctagtaacatgcttgtcgctaagtcgtgtctgactctgcaaccccatggactgtcacccgcgaggccctctgtccaggaattctccaggcaagaat

SEQ ID NO: 28332 - DNA, 2067 bp, Bovine  19866881738551
  misc_feature (1)..(1): n is a, c, g, or t
ntcccttttgttttcccgtggcccaatgaacaggcttccggaggagcctagcaaagcatggctcttgttgctggctgaccgcacaacggctctgtttttccaaactgatggcacggcttgccaagagtgaattaaatgtttccacagaatcatttgcttcgctcctatttggctctgtaaattattttccttccactagtttaagaggggcacactggctcccttggtcaggcacctcaggctagggtttttgggaaaggaaaaatggaaagtcatgagaggcccttctagaaatctaagggggagaatggaaaagtctgggctgagtgcaggcgtggccttggagcagtaggtaggacagaaaacacgtggatgcttgtccagagctcggggtgatggagaggctgggaagcaaggatttctgggtcattgacctccgggacacaaacaaaatcactaacgagagtcacggaagctaatgccgtgactcgcttgtgctggaagattctgtccgactagccccacttccctggctcagatgggagacttctaggatgtctcactcactgtgtcttcctccaggtggtcctccagccttgccacagtgaccatctgcaaataccttgtaacagaacccccaccttgtctctctgcccatcgccccagctgtcctagggttagcagttggggctctgtgctaaatttcttcagttcagcttagggctccttctcagggccaagtcagtctcccactctccccaggcttaagcatgactccttctttccagtatcagttgctcccctctgcctgcatttggaatatgatgaaaatgttgcttctccagtttttcctttactttattgtccctgaaaacaaattcatttaccatattcatctcaacaggttgttgctatttactccaggggatgagaatagcagtcttgggcaagtgatgaagctttaaaataaccagggcccttgtcctgtagtttctaatgttttcgttctgggatggtagctgtgctctcccttagatctttactcttgagaggtggacttaattatataacctggtaacaccttataatttatcatttaatggggataatttggggaatgaaagggatgttattagcaacatgccagaataataggaataaaaaaggaatattatgggcaacagttatattcttaccctgacattgcctttagcagcccacatggagcaaaagtcccttggtcaagagttgtatctggggtcatttctctttggaagtggtacatggatgtgacagcccgctatatggcttgaaattcaggaagatcctggtgcaactcttggactcatactaaatgcatagacctggacaagtagtttctttggtgactctcaattaccctgtctgtacaatggttataatggtaactgtctcaaagatgacttcaaagaataaataacatgtaaagcatttgatttggaatgcctcaatgagttctagtttctatttcttcatcttttccctaatgaaacccacaaagcatgccaactctgtttccacttcctctcctttcgagggaagatggtctgtaatctgctactcagtattctatcttaaaatggattcccaacattgccttcctaacatcttttaatgtaccaaataagagggctgaaattcaatatattaagtgaagtgattttaatgtatgagacagaaagagagatttagtttatgttccaaatatgcatgaacatgagatgcattcagaacaagatattgccagatgatgaaaatgaaaaaagatgaatcttgtgctgggcgtaattaaatgactgagaagacagctaatggttttaggatgaaaactttagctccagaccactggttttagtgcaacactgaaagctattatgcccgttgccagcagctaggaaaagcgactgactagaaccaaatgtaattgctctggagagtatggtcttggacaggagtcctatgcccttgaagttcctcacactctcttggcttcagtttcttgacctgtaaaatgggcataaaattatg

SEQ ID NO: 28333 - DNA, 1057 bp, Bovine  19866882076848
  misc_feature (1)..(1): n is a, c, g, or t
ntttggagtgtaatagcgggacctagaatatgttcgtgtactcctagtacccaaaaggaaatctttggagagagagctgaaaggatatttctggctatttagtaggtttctgtgtttgtttggaagctggagtacagtttattagttagcgtgtccagctccagtgagtttgagagagcagggaatgcccattacctggaggtttcaggagaaatgctggagagtgcttggaatgtcaggaataattccagattccctcctttgggttcagcattagaacatgacctccttccaggtctagactagtaagaaaggcggttgtgtaccagtacctccaaggagttgggaaggtagagggcttaagactgcttgacatcctactttctttggctctgattggtgtggcaagtgcaatggctttgggttggtaggtagatgtggagtggtggtggggaaacaggaccaggcagagtcaaaggttgactttattagataatcaaacatttcagcttctctcattatcatgaaccacagtttctccattggattatttcttatttgtgtgtcaacttaatgcaagggtttctttgatattgaaatgagaggtatatggaaacttctcattcagttttccttaggtaaaaactccaagctaaaagtgccatgttgttaaaaattcagctgtaggttctggttttccaagacactgaccactgtgaggacgccctgcctgaagcatatcggagaagttagctggcatttcttggccatcagattgattaccaagaattcagagtcactaaaatgaaaatggccactgtgtttatttataaaagtactttgttggttttctaagttgaagttgatgacagatgtgtttttagagaaaaagtacaaactctagaaacataagcatctgctctttctcaggcttgcctcctaggttgatatttcattttttttagccacacaaagggctttcttttttctactgaatacctgaaaatatgggtgtaaatgactaatatggattcttgacagttttactggaacaaaa

SEQ ID NO: 28334 - DNA, 569 bp, Bovine  19866882140298
  misc_feature (1)..(1): n is a, c, g, or t
ntgattggacatgtgttgtacattgtattgtaagtataaatgttgtacatgtgaataagcctgtgacttctgtcactgagagaggcaagttggcaagggagaagtcaccctgctggagggatgccaaggagatgactgactctgtgcacctgcatccagcaggtcaatatgggacgagtccaggcatgtggttctcggtccaaattgaggtgatatcatcagatggcgatgtctcaatttcctttggtgttctttccatctgtttactctttcttgctctccagcagttcttccatcaatgctgtaaaacacattctacttggagaggtttatttgttcagattgagttatgagttcagagaaggcaatggcaccccactccagtactcttacctggaaaatcccatggacagaggagcctggtagactgcagtccatggggtcgctaggagttggacacgactgtataactttcaagtagacaacctgagcgacttcgctttcacttttcactttcatgcattggagaaggaaatggcaagccactccagtgttcttgcctggagaat

SEQ ID NO: 28335 - DNA, 791 bp, Bovine  19866882190935
  misc_feature (1)..(1): n is a, c, g, or t
ntaattaatggcttaaagtgtaataacaattatagatcatatagtacatgttgaaaacctaaaaacagttgtgaatgaacagctaagactctgtcagctactgacagacagcaaggaaatcttaaatactagatttaaagaaagaaaggaagaaatcagagtcaaagagaaagaactagaacagggaagagaaccggtgacaagatttgcgctttgcaatggacaagctggagccatcagacctcgtttgtgccacggacctatggacctgatgcctatccccctttgcacttttcgtgttcaaattcttctcctatctctttggctactttccagaagtgagtaaatctccgtgggaatactggggctgacgttgattgtggcattctatttttcaggaaggcgttgtcacagagtctgaggtgcggtgtgtcgttcattgtaaaaacccctccaagcatctgggaacatgctgccccacgtgtccaggtaacctctcaggaaggggaaggcagtgcagctccctggtacagtacagcactgttgaaatccttcggggttctctcaagcatgcatgattttcccactcccgactggaatttttctccctttatgtctgtgtacctaatgggtgaggagagcaaacttctttgcatagaaatgtccggttggactctggtgggcccaggatgactgcaatgtgctgtaggtcttggcaaggatgctccaggctccggaggcctgctttccactccacggggccacaggtaacgcttattttggaaggaaag

SEQ ID NO: 28336 - DNA, 1728 bp, Bovine  19866880365573
  misc_feature (1)..(1): n is a, c, g, or t
ntaggaatgcaggtatttctgtgtgttgattttatatcctgcaactttactataatcattgattagttctagtaattttctggtggagtctttagggttttctatgtaaaggatcatgtcatctgcaagcagtgagagttttacctcttcttttccaatttggattccttttatttctttttctgctctgattgctgtggccaaaacttctaaaactatgttgaatagtaatggtgaaagtgggcactcttgtcttgttcctgactttagcggaaatgctttcaatttttcaccattgaggataatgtttgctgtgggtttgtcatatatagcttttattatgttgaggtatgttccttctattcctgctttctgcagagttcttatcataaatggatgttgaattttgtcaaaggctttctctgcatcttttaaatgaccttgaacaaagtgcttgatttccctaagcctctttccctcatttatgtaaagaatataatccttatcacataagggtgttttgacattgagattttgaggtagagcactaagtgataccataattgggagagaataatcactcactcagtaggagcttcccaggtggcactagtggtaaagaatctgcctgccaatgcaggagatagaagagatgtgggttccatccctgggtcagaaacagagcatgacaacccactccagtattcttgcctggagaatcccatggacagaggagcctggctggctatagtccatacggtcacacagaattagacacaactgaaatgacttagcatgcactcaatcactcaataatctacttcttgtgttaattattgttattagaacattcaggaaaagaaattttcaactgggaataatttggttacaagggacaaaatcctacttaaataaattcaagggaaaatatggttgattcaaaacatatagagaattttcaatgaacctaatgataagtactgctggtcttcccaagcagtaggtgagctttaagaaatttactctttaaatatctttctcattgccttctctcttatcctgctgaagattggcttcctttacaaagctcttttttctgcttctctacgaattcagctttcctagcatcaactccgctcctaaatatttattatattaaaattccagtggccagtacaagcttactgactcagtctcacatcctgctttgaaacctctgtaagacagaattcaaaatcaacatgaatggacatctgttcagtgtccacctgactctccaggtgtcaggatttaatgtggttaaatgtccattattcctgctgtggctaggggcagacttacaaaaaaaaaggtgagttgatgagaaggaaaataatgtaaatttttagctaaaggaattaattcaggataaagaaagatgacatgtccatttttgaccaactcaagggtctttcaacacattgagaaatcaatttcagaacagcatataaacgtagtgtttggaaagaattcccttgtggctcaactggtaaagaatctgcctgcgacgcgggagacctgggttcaatgtgagaccaaaaaagccatatcaaaacaaaaaaaaaaaatgcaacaataaaaaacacaccaaatcctgtctcttcttataatagtaaaaacaaaactacaaaatagacttgtcaaaggcaagatattcctctctcttaaagaattaggttagaccatcca

SEQ ID NO: 28337 - DNA, 2222 bp, Bovine  19866880440888
  misc_feature (1)..(1): n is a, c, g, or t
nttgtcacctagagagcttggcttttgtcttattggcagtgaggagtcaacatgggatgtaaaagagggggaagatatgatcaagtgtgtttggacagaaggaagccttggcagcagtgttgaggatggctgctttctctcctggaatgaccccttgtcttctccatctggctggaccattcatatttaaaggttcagctcaagtgtcacctccttcagagccttctctggtctcctccatctggaacaccatggaaccctataaaatgtgtttcatagcacccctaacacccagtggcacatttctttcctggttaacctgagggttgtgaggattggcctcctatccttgcatccctgtgtggtcagcacctggcaccatctgcggcacttcctaattgctcactaaaaactttattgttgaatgaatgagcataagcatccactgtctttatatttgctgaagctggttatacataaaaagtactatcgactgaatgcttactctttgtgagataattgtgatctcactttattctcacacaaaactatttgcaatagtgagaataatgtttctttttcttctactgctactactactattattactactactactgaaatttcttacacgactcttactatgtgccagacactgtagtgatttacatatattaactcaattctcatggcaacctgctggtataggtgctagtccccataccccccctctttttttttttttttttacaaataaggaagctgagacagagtgtgatgaggtaacctgctagtcagtggtgaattaggatttgggcccaagcagcctggctctaagaatctgtgtgctttccgttgtttagattatgtccaggacttccctggcagtccagtagttaagactctacgcttacactgcagggggcgtggatccgatccctggttggggaactcagatcccatgtgccacatccatatgataggtctaaagcagttaggagggtttaggctcctagggtataggttcagttataaaagtcaggacaaagaactaactccatgactatctggctccaaagtcctaagactttagattcctgctctgttttatattaaacataatatgagtgttcaccagggttatcactaggacattcagttttgaatttctgcagagttaaacaaagcatgatagggagaagtctgattcctagagggtttagaagtaggggaggctagagaaactcagggtgggtggattgagtgtctataagaaattggaagtcagaattgcttcagtctatggacggaggagcctggtgggctgcagtccatggggtcgctaagagttgggcacgactgagcgacttcatttcactgttcactttcatgcattggagaaggaaatggcagcccactccagtgttcttgcctggagaatcccagggaggggggagcctggtgggctgacgtctatggggttgcacagagtcggacacgactgaagtaacttagcagcagcagcagcagcagcagcagcagcagcagaagaagaaattagctaatttgctggatagtctccccttaaattttcttacatttctcttgagttttatttaggataaaaatattctcaaaaataaggactacttcatataaacttgatccatttaaattgagataaaagaatacgttcactccaaagtaatacaactttaagagcctaaggttgaattccgaatagagatgataattccaggctatgattaagtaagttgttaaggagttaaaagtacttgtcattagatgaattagtttcatatgattcagtgatgtgctgtgggcatccagatggatcgtgaaaatatttaatttatttatgtggccaacattatgcatcatatacttggtttgttatataaagtgtcaaccctcctaactgggacgttatttttcctgatggtattttcctccacatctgtacacaacaatcaccatcattcttagcctcagtttccaattcagtccatgcttgagtagagagtacgtgtggcttcagttacaaaaatcactgtgtgtttgtgggtaggtaagtttgggagactaattattaaatttctctgcctgttggaatcaaaaggagcttatgttcgtattagcttgattaaagacatttcttcttgttctacagctgaactaaggatattctgtttcctctaaat

SEQ ID NO: 28338 - DNA, 1791 bp, Bovine  19866880446050
  misc_feature (1)..(1): n is a, c, g, or t
nttctaagactaaatggaacactcataatggtccctgaggaaatgtaatgatggaaaaatgccatttccttgctagccaggaaattgcattatggaaattgtgccatcagaataagttaatagatgtcttaaaaaaaattcggtgcccagcaaacaaatgaatatattatctggagtaagattaatgttaaaggaacctttgctcagtttatagaagagggcctttgtatacaggcaaaggggtggatgaaaaggaagctttgaaattggacagcaggagagcatgcacgtgcctgagggaactgaaatccatcgaactgcctgggtattcatctttgcccaccagccactttagcaatcctgagtcagtcttatctttggtgctaaactcctgtctgtaaaggtggcagacacgctggtgatcattgatgaaatgacgacaggctgaactgggctgtctgctggggaagcttcatctttgccattaaatggagttccccgtcccttcttttcacagtacatttcacagccacttctgatagagcccagctgtgctgagatgaccgctggggaggctgcagtgcggttgcttgcagctcagggatgtctgagagcagctgagcgagccccacagccttcagacactcatcgaattgctttccacaagcacatcccttcacccttctctgacatggaagggagcagagggaatgggcatgatcagaaatgacagacatgctggaaggggatgagctaatttacagggggaaatacagcttgcaagttaagaacaaagagaataagagccctgcagagtgtcatgaggcttttagtgtatcctagagagaggatcgttagcagtgagtagatgggtcttggaaggatatttggggtgccaatgtcttcccccatcgtggttcccagggagttgcatttatctcgctggtccacaggagctgaacttttaaatctgataacctcagctctcttaagtctgttgataaccttcacataaccttcctgtttcccaggaaagtaattgccttactcttttcttggctacacaaagagaaactctccttagaaaacctgcgggatatatattgtaaggcaaatagtcttgtcggcttggatcatctacctcaaagataacaactcaactcaaagtttcctacaaaatacttattctgagctagatttggtggaagaataggaatgtatttggacaagattgcatcaaggcaaacatttggtagaggggctgtggagaggaaactattgtagagctgggaggctgaaaatgaagatgtgctattaataggcaggctcttcatacatgtgtagagtgattaatctgtatctcccccctcccctcccatttcccaaaacactctgattattgtgtttcttgattgaagattatattctttctattttgaaatttgttcacaaaaatacacaagcaaaatacaatttaaaagctataccccattctttctgaaggtatcttacgggcttgtgcctgcctgtccaaattcaatattgatccttctcacctcctcttctgatggagaattgcactgtgttctggttactttcctgctattgtgtttgctgatatatctgcttagaattttctactaggttgtaagtattgaggaaattttctttcctctttaaagcatcaactcaagccttaccttctcactgaagatattcccaattcccttagcattcaaacattcttctactgtgttcccactgtaagcaattcttacagacataccaaca

SEQ ID NO: 28339 - DNA, 1569 bp, Bovine  19866880484329
  misc_feature (1)..(1): n is a, c, g, or t
natgaagtagagtgacttctaggtctgcctgggtatttagagatttgggtgctaaaactgagactcccaggcaaaccaggacagttgatcaccctcagtgatgcaaaagtagagaaaatacttatactaggaaagggctgggtctattacctgctggacagaaaagcctaaatcgttcttatttttattagccatgaaaaagacccttggaaacctagaatatatttgtcatcatattatctttgccaaaagaaatggaaaatccatttgaaaggatattccttttgcttatcctgtagcaatgtatattatacacagcagtattctttttggcttttttttttttttttgtcacatagttgctttacaatattgggttattttctgctgtatagtgaactggcccttttatttcaatgactgactgattttgcattttaaaattactaattgtttctcccacactttcttcttcctgcatccctcctcatttctctttctactagtaatctcaggcacacacatgtgtgttacacagatcattagatgaaggtcaatggtgttgacctgaacaaaaatggaaataagaacggacagatctttgatccccatcagcacaaaacctcaaggcacttcatatttttttctaaaaaaaataaaaaggtcatgagggtcagcccacatactggcttaaaatgttttcttaccaaatgaatcaagatgggaatgctaatttgtttgaatagttataattccagtctggattaaaaagaaaggcggaatatactgtacaaataccaactgtaacccaaagaagagtgagtgtatgcatttacctataaatacatatcgatgtatatatcccaggaccttctcataataagaaccaaaaggtcttgcactgaactgtcatatggactagcgtcatccctcagtagttggaaggtaattctgggacctccttttccccctacccatcagggatacaaaaatttgcagaaatgccataatacagtatgatttctgtatacacaggctcagcatgcatggaatcaaccaactgcgggtcaaaattgtttgattctgaagatgtggaaatggcagatagcaggcggattttatttatttcctggacatttgtcaataaaggaagcatttgctaggcacttagttttctttagaaaacagaattgtataaagcataaaacaacaaacaaaaagaaggtgatcggccttatctctctcagaaaaatcatctttgaggatttctaaagatgaaagcataccttaaaacatagcaacttctcccccaaaaaggtgaaataagggataaaaagatagaaattctattatttttcttcatttaacttcaaatgtatctatacttaactggaaaaaagaaactctggctgagcctgtaccagcagacctcctttgatctcattttttaagactatgctttatttcataccattgaccatggcagtatttctcaaaatgccaacttcttaagaatcacattgagtatttaacattcagattcctggctcaatgtcagattctgtttca

SEQ ID NO: 28340 - DNA, 607 bp, Bovine  19866880521529
  misc_feature (1)..(1): n is a, c, g, or t
nctgtctgagtactatttaaatgctcttagtgtttatcagcttactgatctgtaagatatcaggtggtatcattcaatcattcagtgtgtgtttattgagaacccctatatgccaagcagtgttctaagcactgagtgtataatactgaataaaaatagttcctgctctctcggatctttttattaaggctagaatgagataagactaggatgaggctatctgacatgttgtaatacctaagtatttatgttacttccttgactcccttccttcagagtaagagattagattagtgaaagtatgtttaatttttttattgcttaatttctgttggtttgttttggaatatgaaaggggaattcatggtgaagtcacactttttgaacttgagagtccctaacaagtaagtacaatgatatcacatgatcaagggagatttctagaaagcacattaagtcagatgtcctagattctgactgcttgtgagatttggaaacttctaaatttgcagacttaatattttctgaatgtcttgcattctaaagtagtgttctttctccctggcctagactgggatcaagcactctgtctcgaatgggagggagt

SEQ ID NO: 28341 - DNA, 1236 bp, Bovine  19866880549400
  misc_feature (1)..(1): n is a, c, g, or t
nctaacttaaccaatggattttaggtgatagcgatgtgtcagtgtaggttcatcagttgtaacacatatgtaagatcttttttttaaattttacttattttttaatcgaaggataattgctttatggaattttgttctgtcaaacctcaaacatgaatcagccataggtataggaaatctttgcataggaaatcttcacatcggaaatctgtgtatctgccattcagtttttctgaacacttttataacctaaaagtgttataaaatatcaagtctatttttaagtgtatcacacagatacattggatgtgcctaatgaattatccaactccaagctatattttctactctataacatgtcacatctccttgtaaccagtactctcgctttctcgctgcagtaaaatgtctatcaaaaatagaatacaaaggagaaaactgtgacctaagcaagaattttgggtctagaattctaccaaaagaatccaattcaaagcaagaggaaaaccgcatgtttttacataaattaaactaaatctccatttaaagatcatggcactaagatgctgatatctgtcaggcactctgtgaaggccatgttcccaccagctattctaggccattcttgggagattttccttggcaatgagacctcactgaggagcttctcttttaaacacagcgctctcccagcagccatgtatggcggatggcactccgtgactatgattcctgggcacggcatcgggcttgaactgcatgtcaagaatgtgttcggacacgcatgtgtgccgtggactttgaggaagtgaagattacctccacctctagtgacgatgtttacagtgccatcgtggcaatccattgaaaccacacggccttgaagagcagctttgaaactgaccacagcctgccaccatctcacaaatcccaacacagtgtgtttcgcaggatctctgtgccaatgtcgtccagtttgagagtcagccacgggtggaaaccagacacaagaacatagacatcttagttgttcgggacaacacagagggtgaatacagcaacctggaggatgagagcatgaacagagtggtagaaagcctaaggaccgttactaaggccaagtgtttgcgccttgctgaatatgctttccagctggctcatcggatggggtgcaagaaagtgacagccacgtacaaggccaacatcatgagactgggagattgtctcttcatccag

SEQ ID NO: 28342 - DNA, 1872 bp, Bovine  19866880576117
  misc_feature (1)..(1): n is a, c, g, or t
ntgaaaaaagcataaatattcttgtgtgggtagcctattttgatgcagctgtatctcactgaccactgactatcacctgaatcagaatcaattggatagcattttttgaatcagttctaatgaggtggatgaaactggaacctattatacagagtgaagtaagccagaaagaaaaacaccaatacggtatactaacacatatatatggaatttagaaagatggtaataataaccctgtgtatgagacagcaaaagagacactgatgtatagatcagtcttatggactctgtgggagagggagagggtggggagatttgggagaatggcattgaaacatgtataatatcatgtatgaaacgagttgccagtcgaggttcgatgcacggtactggatgcttggggctggtgcactgggacaacccagagggagggtatgtggagggaggagggaggagggttcaggatggggagcacaggtatacctgtggcagattcattttgatgtttggcaaaactaatacaatattgtaaagtttaaaaataaaataaaataaaataaaaactattaatgcaagtctgataaattagaggttgggagttgaggtgtggggaggctgtagaaattttgtgtaagtttccacatttcaaaaagctcctccagacattctagcaatccaggtttggaggctactgacgtgtaagaccagagcagtgattctttaccatgactgctcactagaatcccttgtagtgtttcaaagaatgcaagagccactgatttaattagtctacagtggagtttacacataaatgaatatttttgtgatagcctcattgagataataattggttgtggctgtccagttgctcagttgtgtctgactctctgtgaccccatggactgcagcatgccaggcttccctccccttcactaagtcccagaggttgctcaaactcatgcagctctgttgcccccttcaatacctgttcctcaatctttcccagcgtcagagtcttttccaatgagttggttctttgcatcagatggccaaagtattggagcttcagcttcagcatcagtcctttcagtgactgttcagggttgatttcctttagaattgacaggtttgatctccttgaagtcctagggactctcaagagtcttcttcagcaccacagttcgaaagcatcaatcctttggcactcagctttctttatggtccaattctcacatccatagatgactactggaaaaaccatagctttgactatatagacctttatcagcaaagtgatgtctctgttttttaatatgctgtttatgttccttatagcttttcttccaaggagcaagtgccttttaatttcatggctgcagatataatttacataccacaaagttcatccatacatgagtgtttttcagaagctttctagataattccaacgtgcagccaagctttgaaagtccctggaagaaaacttgcaggaggtaataacacttcccagatggaagacataagagattttgaatttgggcagtgtcagtaagtgaaggtaagtgtagactgtatgaggcagtgatgtagggaggaattcagagaattctctgaggtttaattaacaggatttcatgattagttttcatgtggtagaagaataattcaggagtctaggattaggtcagtttccttcgatggacttggtggatagtgacatctgtgaattttcctatctccttcctatatggggctcctttacatacagaaattaggcaatgtgatgtatgaaacatttagacctagtatgaccagattcaacaagttacattatttactggatgggagaccccttccagggcccgagcgtgg

SEQ ID NO: 28343 - DNA, 4662 bp, Bovine  19866880588864
  misc_feature (1)..(1): n is a, c, g, or t
ntgcctcccaggaagcaaagtgaagggcaccaatcattttaataaattgacattccccatcaaatatatgaaagctattagggattacctgtctagttagtaatgcagaaaataattcctgactatttagatgacaagcagtttttcctcccctccaggcaagctcatacgtattaaactgtgaaagtcaggagttgagttcgtaggctcatttttaatcctctgccctgggaaattcaaaagcccctgtaacttgaagcacaatggctaaacagaaaggacatccaggcttctgtgaaaatatgaccaactggaacccagaaattgcaaatttttcttggtaactagtatccaggaattgtttgtatccaagtatacttaatgcactgtagatcatgtggaaaaaaccagattgaagccactagcctgaccaaaaaagaatataaactcatgcaatttgcatcactttctcctaacaggatgcactgattagaaaaggtagttgcctgaaaatgttgccttgggtccaaaatgtgttgaatcaaagagcagtatctatgcattcattttggtggtgtttgaaaagataataagtttcaagcttggcagactaatgtggttttaaagcattctccatttttatagagaccttaaagttatctatgtgtggcagcaattttagccaagaagattgagtccatgaggggagattctagaagattactttattaatcttgctaagaaaacctttcagtacctcctcagtgcttaagataaagtccatcttccacagcatgatatctaaagacctccatgattgaacttctgcctgcctctccagctttatctcctcctcctcctcctcagacatttcaaatcccagctcattctaaactactctggtcactgaaatgcaccttattgatggcttctgccttaatcttatctctgcctacaacacacatatagacttacgtgttgattaccaatcagtccagttcagttcagtcactcagtcatgtccgactctttgagaccccagggactgcaacacgccaggcttccctgtccatcaccaactcctggagcctactcaaatttatgatgtccattgagtcggtgatgccatccaaccatctcatcctctgtcatccccttctcctgccaccttcaatctttctcagcatcaaggtcttctcaaatgcagtcagttcgtctcatcagaaggccaaagtattgaaatttcagcttcagcatcagtccttccaatgaatattaccaatgattaccaatatctgatattaactaaagtacaggtgtacctcaaagatactggcaggttcaaattccaggccactgcaatgaagggactatcaaaattaagcaagtcacataagtctttttggtttccccgtgcatatagaagttatttgacactatacagtagtctactgactgtgcagggcttccccagtggctcagtggtaaagaatccacctgcaaaagagaagacgcaggagacccaggttcagtctctgggtggggaagatcccctggagaagggcatggcaacccgctcctgtattcttgcctggagaatcccagggacagaggagcctggcaggctatagtccatagggtcacagagttggacacagctaaagcgactgagcacacattcactaagtgtgcaatagcattatatctcaaaaaacactgcatgtatcttagttaaaaatactctgttactcaaaaattctatcatcttcagtgagttgtagcagtaacataaaaaatagctgtattaacaaaacattgtagatcaaccatacttcagtaaaacaattttcaaagggaacaaaaatcactgatcacagatcactgtaacaaatttaacagtaatgaaacagtctgaaatattttgagattcgccagaatgtgacacagagacatagagcaagcaaaggcagtttaaaaaaatgatgccaataggcttgctggacacagagttgcctcacaccttcaatttgtaaagaagacaatgtctgcaaagcataataaaacaaagtacatataacaaggtgtgcttgtaatggaaaagattgatttttgagggtagctaattatttgaatgctcctgatctgttccctctcaaaatatcccttccatagttttcctcattccagttggtgatgaaatctaccctttcccattctctgggtcaagatcttgaaattgtccttgacttttttcttttgcagtgcacatctaaatctttgctctgccttcaagatatattgggatccaagcatcatatgatcactaccaccacttctccacatgacatcattatctttaatatagattatggccaaaacctccaaactcttctcctgtcccctgctgtacagctgtctcctctttgtaatcataacatggtagtccagcggataatgctgaaacatagattagatccagtcatttctctactccaaaccttccacggctccccatttcctcagtaaaagtaaaaatctttatagtgatcaacatgactcgacgtgctctcagctcttctccttgttatttctctgtcctcaccattcagggggtggatttcaagcatccttacctgaatcccttgttttcctgttatattttccttatagtttggttgtttgaaatgttcttctcctaaatattttcatgatctgctccctcacatcattcagatttgtgttcaagtgttacttcctcaggaagaccctcagccctgactaaaatagctcttcctttctgtctgttgtattgtcatcagtaatgcttttcttgactggtccaactacctggccagaatataaactccatggggcaagagttttttttgtcttattgccactgtgtttccagggactagggcaacacttggcacacaacagttgctcaaaacatcttttgaataaagatacttgaatctcttttagttttatattagtctacaaaaccaaaatactgtcatcaagataatatcttagaaagaatgagaaaattattgttgtcaatcacacaccttcatccctggtatttttagatcatatgtaatcagaattatccttgaggttttcttctcctcgtattcccattcaatcaatcatcacaatctatttgttttttctctattcttttgcctagtcgaaaccatcatcatttagattttgtttggaatgatagcagagggcaagtcttcaggtcccacatcctgttctttcttcatgaaagagtgttctttctgtttcatagtataatccctataaaaggcaaatataatcaaatccttttctcgatgaaaaacgtgaaatggtttcctgcgcctcttggtgtaaactccaacctggactcccccgtgagtccctttcctatttcaagttataatcaatatcttgaatttttcccacactgatttttttttttttttttttttttttagatttttctcaaagctgtgatcctactgcaggtctctgcccagagagacctgggcagtatttggaactctttgcttctctttctccacctttctttctcctcctaccatttccagcccccatcttcccttgttcacttcagtttcaactgcagcttttcttcataaatattttctcaaacatcttgtaaccttggctatctgtgcatttttatgaatgatgtgttagaagttggttgaaaactcagtttacctatgtgtaatattgataaatgattttaagtttattcttttgagcaattgagattttttgagaagatccttccagtctaatggaagagatcagtgacatttctgaaagaattatacttggatgctagcattgtgagagccaggtgggatagataaggcaaagggtttcagaactcagtatatgtatttccacggaatccccttgtttgtcgtgcaatgtctctgctctcagctgccttccagtttctgtggtaccttctgctgagaaggaaactgcagtctttgctggggcaggaggaaggccaggagtctggctgaggtgagggagcgtctctgaggaatcttaattgattacttatctttccaattagttttcttctcttagcctcactattccctgcagtttcagagacagctgatgcaaccacttccggtgttctgtggtgtaaatcacgttgctttctggcttcttctggcttctccactgaagggttatgaatcatttttcttaggccttctgagggagttagttaactctcatccatctcttttttagcttccagaattctattgctcgtgactcttctccaatgtcctttgcttttgagggtttatgtccttcataacgtgcctttaatattattttattactgtttcatggagaaaggagtgggagatgtgagtatttaatctatcaactttagttggaactaagctcctcaattctaaaattgtttctgactcatagatgaaaaatcaaaataaaccatggatgaaatgtatatgtaataatagtagaacgaaagaatgaggcattggaggatataaaatatatttctctttcagaatagagaagattgggggaagggatgtaatttaatttatatatcgtgacaattattctctctaaaaaaatattagaaga

SEQ ID NO: 28344 - DNA, 4036 bp, Bovine  19866880600227
  misc_feature (1)..(1): n is a, c, g, or t
nctgcctgcaatgcggggaccctgggttcaatccctgggtcgggaagatcccctgaagaaggaaatggcaacccactctagtaccttgcctggaaaattccaaggactgaggagcctggtaggctacagtccatggagtcacaaagagtcacacacgactgagcaacttcacttatggtatgtgggatcttagctccccaaccagggatggaacctgtgccccctacagtgggatcatggagtcttaaccactggactgtcaaagaagtcccaggacctagtctttactccacatgtgccccaacatgggaagaacagtcatgctgccacaagttgcctcctgtgtcattccctatgagggtcacttgtcaccagtcccctgattcagaagtatggttgtgaagatccaattgccattgtaggttttactgcgtttaagcagagatcttgtatataaaaatcatatgagcatcttccactttaaaggtaaagggaaatcagggaagattaagaatctaattctttctgtgtcccctcaattttcttcagagaatgttggccttattacatgaattctgaatcaaaggtcaatttcatcccctttcttttccctcattttcttttgcaaatgactaattaatgcaggggagtacaggcatggaggctgaatgacttttgaaggggaaatgaatgcccacagagacctccatttatgaaaccagctactccactaattagtagggagacggtgtcaccccaaggtgagaggcagtaaatcatcttatctgaggtggcactcattttaatacatcaccctgctatcagtaccatttttaagctgtcttttcttgacttatttccaagtgtgaacaaggtaggtcaaccacactcaatttgtgggcagaaaaacagacaatcatctttgtcctcagtggaacattagtatgcacttggagacaccttgcatagacttttattttctctctgaaaaaagatatttgcttcctagagtgatgtaacagcaggcctccagaagaccaaaacactgcatagctcagttattgcaagaggcatcatttttttgcagacacacagcggcagaagttggcttaccaaaagccttccctccatctttcccaacccctccgggggttgaagaagacactcaatgtcaagaactgcagaaacaccagtttctagtaaactgaacctaattagtgacaaccacaacgtcacttggtatgggtctcggagtcccagacacatggctcctacttctgtttctaaaccttggtgccagagaatggagaaactccatccctctcctattgtttaatctggttttagtaatacaaacagaaggcaaacatttggcaaaagtgtgagttgctcagttgtgaccaactctttgcaagcccatgaagtgcagcccaccaggctcctctgtctgtggaattctccaggcaaaaatattggagtaggttgccattctcttcttcatgggatcttcccaactcagggactgaactgggattcccaccttgcaagcagattctttaccttctgagccaccatgaaatcccaacattaggcaaagtaagtgattaaaagccccagcctggatactcagttgttatcagaaggagggacatcatggtgacaaagttactactttggacctctcttgtaaaaatggaaaagatggggagaaatgaaaagaagaacaaacaaacagattaatgagtccagcttcatcattacatttttaatcaggatgtgcacagattcagcaagagaaacttgtccatcagactgctgaaaaatgagagtctgctgttatcaacctcatactgagaagttcaacccttttaagtttgggaaagaggcaattatcccaactctgcttaaatcattcgtttctcagggtaactgacttcaaggtggccatagacagtgaacacggcaggcaagccaaggcacatttatttacccaggtgtctctggccttcccatccgtaaagctgctgagaggaagggcaaaggaaggtgggggaaatgatactccacgtgtgcgttcaaccacaagttcaggtcccttggtcaaagctccaatataacagccaagagagagtgaattcaggaggtgcactgagtgattcaggaggaactttggggattattttggccctctagtttttttttttttttttaattcctagagatgcccattgtggcagggtcagggacatgcctcattcagaagttgaacaaagggaaggaggagatggaagttgccctgggcagcatggttttcattagaagctggggggtggggatggggatgggaaggagtcttgcactgagatggactgaaactattccagaattatctgtggggtcctttgcccaaagttacgcttagaaggaacttgaaaaccaaaggctcattttcaaattgccccatttccgatccataaaatgtcctttaaaatccaaaagatgcaatgaaaaactaataatacataggaagaaaacagtaatatatttacaaaagacctggagatttcttattaaaaaaaaaaaagagcttaggagaagagaaaggcttattggacataatagaaacaaaatcacaccaaggtttttcttttgctacatcagcagttcttaggttgggatccatggatgcctaagagtcaatggctagacattagcagtcactaaaacactttgctcattttcaaacatatattcaaggcatatatgcaaatatttctggagagattattcagagcttccattaattcccaaagtggagtgtgtacgtgtcgtgtgtgtgtgtgtgtgtgtgtgtgaagcaaagaggtaaacaaacaaacgttctgcctactttattcctaccagctctcccttccttgacacaccctcttccccaccgcctcctttataaaaatattcaaattaacttgatttccagagaccctttatcagaccccgtggcaaagaactcacacatcttccacctgcttcaagctcattaaacacataattagtctctctggacgataatcgctgttgctcaagtttatgaatttctttccccctaatctctaattctgggtaggtttgtgacataaggcttcagaaaagaccagtctgtcattaaatggaggactgtaaagattttactaccatcatgagccacggaagccttgatcatacttttactgcctctacaggaggaatataaaccaaaatgctgcttacatgcccccactgaggccctctgcctcgtgacagctgatgaaatatgtcctgcattttacctctgaagggacggatgccaatcgtgacgggtcatgggaagaaataaatgttgatatctggccctagcctcaaaaaatattttcccacatcagaaggaattgctttgctattgcacagggatgacaaacaagtaagacttgagaaggatgggtgatgagacagcagagatgccctggaaaaggtatgcagacaaatacaggccaaaacagagactcggaagccagatgtcagaagactcaagttcctgttttaggcttaggcaagacatctaacctttctgggactcaggtttcataaacactgaggaaataggatttgatgaaagattcatttatgctcactcttctgtgcagtcaaatttctccacatctaaccttatataagagcctaatacatagaaccaaccatacagttgaagcttcaaaggtttacatggggatagatgttgaaagcccatttcctatatcttagccccacccccagtcactctagtgtcccagtttccatcatacagtttcaaaaccattataataggtgtttcatttagatttgacatgctgggttacggctgatctctcatcccacctcggagaattccagatgacacagcagtcctcaacagctgtcacttattgatactgatacttgtaacagcaacagcaagccactgcaagggactgaggggccctctaaatggcagtcaagagtt

SEQ ID NO: 28345 - DNA, 1628 bp, Bovine  19866880611000
  misc_feature (1)..(1): n is a, c, g, or t
naacaatgacagactttattttcttgggctccaaaatcactgcagatggtgattgcagccatgaaattaaatgacacttgctccttggacgaaaagctatgaccaacctagacaacatattaaaaatcagagacattactttgctgacaaaggtccatccagtcaaagctatggtttttccaggagtcacgtatggatgtgagagctggaccataaagaaaggtgagtgccaaagaattgatgcttttgagctgtggtgttgggagaagactctttcgagtccgttggactgcaaggaaatcaaatcagtcaaccctaaaggaaatcagtcttgaattttcattgaaggactgatgctgaagctgaagctccaatactttgaccacctgatgtgaagatccaactcattagaaaagactctcatgctgggaaagattgaaaacaggaggagaaggggacagcagaggatgagatggttggatggcatctacgactcgatggtcatgagtctgagcaagctccaggagtcagtgatagacaggggaagcctggtgtgctgctgtccatggggtcgtaaagagttggacacgactgagtgactgaactaactgaacagtacacttggggaccatgacaatatgacaacatcagttctgtgcatttgaaacacatagtctttacctttcttctagctacaagaacaaaaccaactgactgcaaagccccaaagaccatgcccccgactaaaaaatacaaaatactgacctttcaaaaccctgtgcctgtttagggaccaatcatgtaatatatttgtcttcagctttaaaaagtcagggctgcaacattcttttctgaattgtttatcaacaacaggggacatgaaataccacagatgtaaaaataaagaaaaaaagcaaggctctttcagctccctggttgcttagagatattttctggcccagactctagagttgtcacatttatcctgtggaattaaatgtggagaccttgttaacagtaagcagacatgagaactgaattccctgcatgctgtgttcaaatgccccttcatgaactctattcctctaaaggagtattgtcctagtaatggctagggccattaaagctttggcttctacttaaagaaaaaacacagtcagtcactccccttttatccagtggcccaaattctatcatctttaagtcttgagaagagagtcgtgactcagaggttatggaagaattctctgcagcatataatggccatgacacccatgtacttgattccaccataaaatactagagacactcagagggtagagaagagccaatgggagttaactgatataacatgcctgcttatctcatcctgagtcgtggaggagatgactgttctgctcatccattgtttccacagagtggaaccttgtttattccagggatcactgaggcttactcccctcactgctctcatgtctttgattatttgcccctcatctatgagccctttccagaccaccccacataaaactgcaccactgcccaaccttgcacattcatctccttccttcactttatttctccccatagtcccaccatctgacattctatatagccctgccctgtca

SEQ ID NO: 28346 - DNA, 676 bp, Bovine  19866880612612
  misc_feature (1)..(1): n is a, c, g, or t
ngtggtgttggagaagactcttgagagtcccttggactgcaaggagatccaaccagtccattctaaaggagatccgccctgggatttctttggaaggaatgatgctaaagctgaaactcctgtactttggccacctcatgcgaagagttgacttcttggaaaagactctgatgctgggagggattgggggcaggaggagaaggggacgacagaggatgagatgactggatagcattactgacttgatagacgtgagtctgagtgaactctgggatttggtgatggacagggaggcctggtgtgctgcgattcatggggtcacagagttggacatgattgagtaactgaactgaactgagactgcttgattctagagcacacagtctgaaccaccagcaatgtgctttcacagaaatgtaccattttcttgctaacagcgacctgaactcttgtagcttaatacttcatctgtattgccactggggaccttgaaaattacagctgaattctttacaatgttgatcatttgtttctctggcactcaacgtcagggggagtcttgttttaggcagctgaattaggacaagcttattggggcttcattctgaactacagagctccattctggtgagctcaccattttatgaaggctgttgtggactcagtaaggcaggca

SEQ ID NO: 28347 - DNA, 1263 bp, Bovine  19866880633972
  misc_feature (1)..(1): n is a, c, g, or t
nctcaatgacctaacattaccctgaatttctcctccatttatttttggtagcattccaggcagcctgattagctctaaggaggtgatttacagaagacagaaaatctggcttactcttctttgatgcctcacactgcccatcatgaaccaaggcagcacataaatatgtgctaattgacttattgattgacacaaagtaatggaaggcaaagaaagctggatgaagggataacaaagggaagaaaggagataaatggaggcactcggctctgctgggatgtggaaagtgaaactatttatggaagcccatttttttttcttttgctccctctgactctcaagctattcagtttccaaaactactaattattaatcacaggaaaagcatatgccaagctaattcctccggacgaatcacacacaccgcaacctaacatgatcaattttctttgcaacaattaagagtaaaaaaaataataataacatgaagtctgtgggagactggcctcctttgtggaacttgcagttctaaaataaaataacgttatgtaagtgaggagaaagacgaagaaaaattttccagcaggctatcgctcctgttgtgattttaagattcggaggaaagcgtggtgcgaatatggaaatggataaaatccatatctaacgtagttgttaaaataagatctgattgttgcaaggttgaatttgttagaaacaataattatttatgacactttattacaacaccctccaaagcatatggttaccttattagaaattaaaattcattttcatataaatctcagcaggatatcacaccaaaataactagagtaactccaggggacaaggaataattctagtttagctcttctaaggcctggcatttgtaatacaaaatttaaactaattcacttgtaaatataatggcaggttttgaaaatgtggacaatctacaagtatgaccataattttttttttaaccactttgaggacatgtataatttacactttcctcataagtttcttttgcttggttttacgttttcaatataatacaaactttgttcattatgaaagccattgctgttctctcatttttaatttgtgaatgtttacaaatcagagcgttcagctgactggctttctgttctttcaaccacagtgaacaatacataggatcataaaaatagtcatgctcctgagagcccgtgcagccatcgaggagtatagatatttctgttagatttcacctcggtttcat

SEQ ID NO: 28348 - DNA, 907 bp, Bovine  19866880682540
  misc_feature (1)..(1): n is a, c, g, or t
ntatcatcagtaaaaaaaaattggttacaacaaaataattatgacacaattactatttgaataaatgaaggaaaagagtgaaaggagaaaggtaaaatcattttcttttttataccataatactatgccattcaatgtatttgattattcaaaaaatgcatgtatatgtgtgctcacaattttaaaaatacgtaagagaaaaagcagtccaaagaaataattgaaaggagatttccaaagacaggagtaaggaagtcataaggacagctatatttgttttaagcgtctgtgtattatttaactttccaaatagtctgcaagtattacttcaagaagaataaaagtttatttaaaatggaaaaataagtctatgaaatgtgtcttgcaaacttgatttattaatagatattcatgaaataaacctactagctatagagtgaaacaatataaatttctccctgcagttatatattggtatgcaattggtacaatttggtgatgaaaaacaaataggcatgagataaaaattggagccttgggctttaaggtaggagtgaaaatacatacacatataaataaaaatataaggaaaaaattgaactgaaaaactaggcatccacaaaataaagatagaagattggaagcaaaaccttgggtacttatattttctgggcaggaggaaaaaattgaagaactttacattctttaaatatagcatagtgaatttacatatgtaaagattatatatatatagtagacagcaaacttattagacttatgtatattttaagagatttctgtaaggtaagaaactgctactgttgctgggaacaaaacaaaaattcctgccctcatgtacattatcgtctgcacaagtattgttcgagtacatataaaacatttacaa

SEQ ID NO: 28349 - DNA, 1901 bp, Bovine  19866880700629
  misc_feature (1)..(1): n is a, c, g, or t
natgaaaaatagagaacatgtttaaacagaaaacaggctctgaatgaagaggacttttatgctttattccttcaggtctgtttttatttagatctgacttgggaacatcgtaagtagctttcctaaagtaacttcagctctgtctcctgcttgacagctggtataggggctccagaccatctgccaagtgaggagccaagtcatggtcagacatctccaaacagagagaaccaatattctcatgtcctgatttttaaacagtttgcattttttcccactgaaaaacgttggttgttcttatgtttatcctaaattgcttccaacatatatattatattttattatttaggaaaatttcatggaaacatttattatgacagtaagaaaaaatacagatttatagagctttattctaacttagctaacttttggttaatgggtatgaaagaaattatgtatctcataattggaagatgatttaaaaagaaaataattttatgtttatcaatattataccaaatacatatataagtgctaatttagttgatatgttttatacattctttcaaaataaattcagaaggttgctacattatatataaatgattcattttaaggtatttatttgcattcatcttgttactttatttatttatttttttttttactgtctcatcttaaaagactctgatgctgggcaagattgaaagtgctaggagaagggggatgatagacgatgagatggttggatagcatcactgactcaatggacatgagtttgagtaaactctgggagttgccgatggacagggaggcctggagtgctgcagtccatggggtcacaaagagtcggacacgactgagcgactgaactgaactaaatggaaagacttgccagaattggaatctacattccagaaaaggagaagaaaagatgatctttcaggaaacagtcttcaaagatcctagcctattttcatggcagggggtacaaaaaaggggaccacaaatcctagggaagttaggatttgtgaagttaaaaattgtgagctatttaatgcacagtttcttttatataaaactacctattgcacattttttttaatcagacagttcaactcaatgtatgttattatagcttttctataatagaaaagaacccttacaactctgttaaatataaacaccaaaaaatggctcttttcatccaattgttattaaactgtttttaaaagtgttaatgtagccagccaccaattacattttattgatttacatttttaattacacattgcatgactaaaagttaatctgatgatgattatccattgagtaaatattggggagtaattaaagattagactttctcctctgtagtggcaggcacggaaggaatattatataccattataaatgtgtaatcgccatacaagactatgaagattgagcagcatttgttagcaagcatacagatcaggccaggtctgtgttttcatcaggaatcctgaacttaaagctggagcttgacatgctgaagaatatagaagaaaacatctgattgataggaattgagaactagtgtaggtaaacctaaaaaaacaggacttgtatttgcctttaagtcaggaaatcctttttgattaaaggcatcgtcttccttaccctttttatctggtaatcatgaagtcagctgaacttgttatttggctcatatttttaagcttattatgcacatgttcacaggaaaaaatggtgcaaatggctctcaacctgcttcaaggggatatttttcctcttgattaaattcagctacctttgcctgagaagaggctgagagacccatttttcttattctctcagctgtgacacaacatttttttttaaatccaagaatgtaatca

SEQ ID NO: 28350 - DNA, 2269 bp, Bovine  19866880703961
  misc_feature (1)..(1): n is a, c, g, or t
ntgctagcctggggctgctctctgatgtaactgctgcaactcttgtttggatctttttgcttgcatattttatacccccaccagccttccttgctggctttctcttccctgtctctttcctgagttctctgttttgttagaagccaggcagccagcttccatcctcttggtgtctccgtgccgggtttgcgtgggagggatgtatgctcattcacgctcatttgcaactgcaggtgctatgcaattatgatttaacaatgagtaattctatcacatccttcagtcttcaaattaaagagcaatgatcataaggtctagatgtccagtgtaaaacaagcaattttcaacattaaggtgtggtctgctatctaagatgatttttgtaacttcacaaatatagttaagacttcgtatatttagttacattgtaaattttttaaattttattttttattggagtgtagttgctgtaccatgttgaactagtttctgctgtgcagttatgtaaatctgctatatgtatacacatatctcctcccttttgagccttcctccaaccccccacagcctatctttctaggtcatcacagagatcaagctgcgctctgtgctatatagcagcttcccattagttacttatttcacacgtggtggtatatatatatcaatcctcatctcccagtttgtcccatcgtctacttccacccttgggtccaagtatctcttctccacatctgcatgtctattcctgccctgaaaataggttcatctgcacgatttctccagattccaagttgtgttagtcgctcagtcgtgtttgactctttgcaaccacatggactgtagcccaccaggctcctctgcccgtggaattctccaggcaagaatactggagtgggtagccattcccttctccaggatgtcttccaacccaggaatcaaacccgggtctcctgcattgtaggtagattctttaccatctgagccatcagggaatccttcatctgtaccatttttatagattccatatacatgcattaatatatgatattgctctttctgactgactgcagcagatgtaaatgtaaacagcaatatccttgttggtttatctatcagtttggccaaaagatttacattatggaaaaacccaaatgaactttttggtcaacccagtgcagaggctcagatgaagttcatgccctaaaatgaaaccttagatgacttgtgcaagagacataccaaggaattcagaactgaaagtgactttattaaatcactgaagacagccaaccgtcttcttttatggtaggggtgagagatgccataggaatgaaaaaacatacctcaggctccagtggaggaggtcaaattcaccagctctcactaaactagtcccacttgccttctcctgactgctacagtaattataccatgagtctccaaatagtcagaaattggctcacgcattttgaaacttcttacattgcttgctcattgtttcatatatgctgacctgtctaacctacttcactgaaaatgtgttgaagataagaactacatcttaaagtttttctatggtgaagattggattcatgctaatcatttagtgggaaaattcaataaatattccttgattgatttaaatatcaaaggattttgtctacatgattctttgtaaaagaatactaggaaattaaaaatgacatctgaatgttttacatttccttctggtatatggcatctagactgtgagtgtcttggggaaaaagttgcagtatagaaatatttacaaagcctggtatgtagtaggtgctgaagagagtgttgctgaataaatgagtgagtgagtaaattaatgaaaaatgtgggcaacacgttaatcaggaaaaatgataacaactgtggacagaagttggggaagatgagtaggtttataggaacaagtgcttgttaggatacccaagatcaccctcacgtgtatcagtcagcgggttcgtaccagggcctgggcctattgaactttctgttgtcttgtagggtcagctcttctgctaactcactgaccttgggcacccgagagggcaagtggtgaataatgtggaggggaagatgaattcttaaaatactgctgctctcaaggtcccatcaacggaggcaattcaaaatatggagtaaaatgcaaatgagataatttggttggtgggaggtgaaagtttatgaacactttgatgtcctaagccttgcgtttatttcatatgttccaaac

SEQ ID NO: 28351 - DNA, 1425 bp, Bovine  19866880710501
  misc_feature (1)..(1): n is a, c, g, or t
ntttttttttcagggagatgctctggttagatgttagctgtttcctgtgtaattaaaagcaccgttgcctttttcatgtctctcttctttgtaattgccttgatcatgatcaagaatccctctgcctaaatgcatctctacctgcactgcattaggacgtgatatgataccattttcaggcatatagacttgttgctcaaggcttcctttcttagctataatcattggtgctggggagggtgtgctagagacagagtctagtttttatttctcactagtaaacaaaatccaagtaaagcaatctctaattcagaggcagagacttttccacttctgactaggtgaacagatacagaaaacttcaaagatcagctggaattaaaaaacaaccaaccaaccaacaaaacaaagaccttcattttgccaggtcaggtctcacacaaagtaactgccagatataaacttgtggaaagcaaagagaaacattaatgagccagcctgcagcccacatgctgttgattgggcttttccttgtggtatctagcttaattgcacacatctggcttgataccggatcccacaggcctctgcaaattaaataaagataatgatttcgtttaatcataaataactaaatatgcaaataattgaggaaggatccttgatggtgatggaggttaaatcaccggaaaatcaggaaagactgagcagtaagtgaatgatttacaagaattgaacatttatctagtgaaatttaaaatgtggcttaagacacaattgactttcttcactagagaggaaatatccacagacaaaggggaagaaataatcatttcaaatgtgaaggcaaagtgaaggctattttatgtgtggggatatttcgttgaaattaagcatttgacttggggtaagcattggagaaggcaatggcaccccactacagtactcttgcctggaaatcccatggacggaggagcctggtaggatgcagtccatggggtcattaagagtcggacacgactgatcgacttcactttcactcttcactttcatgtgttggaaaaggaaatggcaacccactccagtgttcttgcctggagaatcccagggatggggaagcctggtttgggctgctgtctctggggtcacacagagtcagacaggagtgaagcgacttagcagcagcagcagcagttgtaactattatagagaaagcccgccagcagccttgaagaccaaatgagcaggtctagtctgttccctcagagggggtcagtggcttagactgagggctttggaatccactgcacttgaatctgaatcccactttagtaatcataagtgaccaaaggcaaatgtacccctcattggtaaattgtggatgatagtgcctacttcccagagttgtaaggagtacatgaggga

SEQ ID NO: 28352 - DNA, 1683 bp, Bovine  19866880716631
  misc_feature (1)..(1): n is a, c, g, or t
nccttgtttagagaatcaggcccctttttaattcctgccagaagtctttaggatttctatattctgatttgattctacattcaatgtataattgcagaacaagattgaaaatgctgtttacaatgtaattctaaagtagtttatactcacataattgaaatggcttgcttgaaacagctcaccgcacccaaatatgcctacttagctaagcaggcagacttccaaatccattctttacaaaatgctacagcaactaggtgaactataccctgttgctggctaagattttctaaactagtgtacgtttattaaggttttcagtctaaagtgatcagtccatcctgttcattaatatagtactgtagggagctacatctattattttattatcgaaagccagtccttgattgaagacatctgtgaaaatacatcaaatattttaaagttttccaaatgcaaattttagttttcattcctcaagacaacaccaacagctgatattgcctatttaatgtttatgatctttgttgtaatgaattctccaaattttttcagggtacactttgtaggaataaatgatatgaacattctgtagtcttctctagtttcctttctctttaaaattaatttctatgaagcttcagcctctaagcttcagtcagaaaatattttttggtcacctaagatttacaaaccaggctgagcactgggtaaaatatggaagaagtgaaaaacatggtccctgcacacaaatcactgctgctgctgctgataagtcacttcagtcatgtccgactctgtgcaaccccatagacatcagcccaccaggctcccctgtccctgggattctccaggcaagaacactggagtgggttgccatttccttctctaaagcaggaaagtgaaaagtgaaagggaaatcactcagtcatgtccgactcttagcgaccccatggactgcagcctaccaggctcttccatccatgggattttccaggcaagactactggagtggggtgccattgccttctctgccactaatcactagtatatgttatttgggaagatgacatgacatacatgagagacatacaaaagttcaaagtctagcactaatatgtactagtgataggaatttcaataagatatttgacatttctaggcctcagtttcgtcaataaaatgagccttactgacatttattttgaaagtttttatgaagttgaaatcagaaaatttatgtaaaagtgagcaccatatttgacacagagtagagcttctatttgctggtaatgatagtgattatatataggtatatacacacatatatgcagtactcaccttcatatatgtatttatacatataaaaagaaaaaataagtaatatacattttcaatgtcaaattaaaaattaattattagctaatttcaagttatgattatttatatattgttttttcagtcactaagtcgtgtccaactctttgcaaccccatggactaaaacacatctggcctccctgtccctcaccatctcctggagtttgcccaaattcatgtccattgcatcggtgatgccatccagccatctcatcctctgatgtcctctactccttctgccctaaatctttcccagcattgggatcatttccaatgagttggctgttcacatcagatgaccaaa

SEQ ID NO: 28353 - DNA, 800 bp, Bovine  19866880827992
  misc_feature (1)..(1): n is a, c, g, or t
ntggaatggggagctcttccaggaggccttgaagtatggataagacatggtgatatgatagggccataatggccttgtttcaaataaattacaaagggaggaacttcagaaaaatgggtaagtccctggaaatcatttcccagaaagataagagctattctctgtccttcaaattcacaacttctggggattgttgaccgtggctgccatcctatagcattgcctccctgaccccaaacagcagatggtgactactggattaagaacatggatttcacattgccctatctctgtgggccaatgtcagtttgacttgatttatgtttcccttaactttataagaaactctgtatagtacaagagaaagaacatgctgtgctatagaatctagtcaaggtcagagaaacaaatgaatatccttatagtctatagagaggagcaggaactttgaagttttaaattgttcacaattggtacatacaccgatgatcttccagaattattagttatcttctagaaataacaacttccattggaatgcctttacctcctacccattaaaaataaatatttttagaacttaagcaacatatagaatttttgctttgcagtatggggaatttttattttatttaacttgcacagctagagaatgctgctgctaagtcgcttcagtcgtgtccaattctgtgccaccccagagacggcagcccaccaggctccctcgtccctgggattcttcaggcaagaacacggagtgggttgccatttccttctccaagcagaaagggaaaggaaag

SEQ ID NO: 28354 - DNA, 1665 bp, Bovine  19866880830841
  misc_feature (1)..(1): n is a, c, g, or t
nggggcaggaggagaaggggacgacagaggatgagatggctggatggcatcactgacttgatggacgtgagtctgagtgaactctgggagttggtgatggacagggaggcctggtgtgctgcgattcatggggtctcgaagagtcggacatgactgagcgactgatctgatctgatctgatctgaaggatgtgagcagctctatttctgatgccctgatgtgccttgtcacagttctgtattttctagcaaaggcagttcgtacattttgtttgctccaaagcatccattgtccagcaatggtagcattggtgtgattgagagaatttattcttttaatctatttgctgatcccaaatctccccttatcaaccctcatctctgcctattgttcccagggtagccatttgacaggtggtatgtttttgcttgacattgattaaagttcccactccattgctcaaaatgaagtgtatgctaaatgttgaaccagcaaagatgcctgcaattttggctgaaagacagcatttcagatacgtttatgaaaaactcagtctgtatttgttttcttgtcagaaaggtcctaggcaggttggagcttggaggaaggaaaggacaaaagtagaatttgtaataacattgaccttgatcagtcattaaaatactggactcttagacatcaagttattagcattttcatcttatgaattctcaaacttttgtatctgtaattgacaattgtgaagatggtccttaaaatgagaattccctcaaatgagtttctttgtaattaaacaaaagtatgcaaacaagaaattatagagctttttcccttgcagggatgagcatgagaatgaaatatttcaggcacagggtattttatatctttgtgttctttttaaaaactattcctgtgggctttacctaattatgtcttgggtgatttccctgatttgggatttctgtatttacgtaagactttctccatggaaaagtctgatcctgattcagatttgttttctgtaagtttcatttctgtcaccccttggaacctcaagtaagacctttctaaattattcttgtgaaattcatgagatgtctccttcctgttgctgcagatggcgcataaacaatgtggactttttatgttccctgtaaccttcttggagaagatggatgttagtccaggcatttaaaatacaattgtatgtttatcaggtattttacagatcatgaaattgctagcgtgttaaatagacgttttttgatttaaccagatgaaccattcattaaacccatctgaggtcgacagactagctcgcaaaaatgagtagcttggtttgggactttgggtctgagttaatggtgtgcggtgtgtgcgtgcgtgtgtgtatgtgtgtgattgagtgagagagagaatcaatgtgtcgatgtagctgggaataacctaagatttgtttcagtggaagtgggtagaatagacttgtaagaaaattcatttcattaaatggtattgagcgtttgttgtgtaccagggagtctgctaggtactggggagacagcctggcgtgctgcgattcatggggtcgcaaagagtcagacacgactgagcaactgaactgaactggagagacaacagtaccaaaacaggcacactcttcattct

SEQ ID NO: 28355 - DNA, 1596 bp, Bovine  19866880837456
  misc_feature (1)..(1): n is a, c, g, or t
nctgcatggtggaaacataactcttgtatgcactgggaaaaccaaagcatctgtgtgacttgcctcatggaaagttttgctttattgtggtggtttggaagcagacttctgatatttctgaggtatgcctagagtgtgatgagtgtggtcatagagatatatgcaaggtgctatgagagcacataagaagggaaatcagacagttccctctaggggaaattgtgtttccagaaggggagagaagagagagagcaaaaagaagaaaggcaaagtaggagacagaaggggagggccctatgagagctaccatcacaagccacttacctgcccattacctgatactcacagcttttactcaactctcatttcttattttgcctgtaattattgttgaactcattttacctatacaaccttgccctgatgatgtttatctataaggagggattttcaagatttaaggacagcacctgatttttctatgaagtggtttttttgggggaacaaactctttacattgattaatgagcctgattagacacctcatcgtagttgactctgtgattgccgagattttttatttttgttaagctacttttcagcccaattgctgctcttcaaagccttcctgttctgtgttcccctccgccagtctctctgagagcacggttcatcattgtgtcctttccagcacccttcttgttcccttcatctctctcccatgcctccgtgatagtgaacaggatctctggaaacacatcattttttcttccttggtgatcagcaccagagtgaactccctgctctaataccatcttgattcctccttctggaaataaccttggaattcatttgacattaatgtgtcatgctcctccatcttctttgattctattgccaatggcatcatctcctcccctcttggccctgaagctgcccataggcttgtctctgcctgagatcagtcgtaacgtacctcttctgtctcacggtagcagaggcatgctcatggcttgaaaagtcaccacactcctctggttcaggtaaataaacaaatcgccaccacagcattccgaatgagaattaccttatcacccttccacctgatactttcatcttctttttctgagaaatcacttttctacaaaagagactgtcaaactcttgatcttctccagtgagtctattccctgaccatttagagcactccagaaacgggcaactgaggctctagtgttacttgaccatggttattgtttttatccagattgacagatcctttttatagactccggctgaatttcattggaaaagagcttaaaatgcacaggaggaggaaagtacttctctcccaggatccccactgagctgataccagtctatgggaagtcatctatttaaacagaaataaacatgccttgggatgccagcagcctattttcagctttattaagctattttcagctttattaagaaatctgtgtttaatttttccaaacatcttcagttttgttcatttagcttttctctatgtgtggatcaattagaacccttgatgagaatgcagacttggcattctgctccttatagaacata

SEQ ID NO: 28356 - DNA, 856 bp, Bovine  19866880860745
  misc_feature (1)..(1): n is a, c, g, or t
natagtttacaaagtttctactgtaaatgaaaacaattcaacaaagtattataatcatttacatagcttccctttactatggagaaaacagtaacatctgctacttgcgttctttttgaagacagccaatctgacaggtgtgaggtagtatctcattgtatggttttggtttgcatttccctgatgattagcaatgttgagtatcttcatgttacattgatcaatttcattcaagtgaaataaaaatatacatcatgttctcaattttgcttcttgatctacaaaaactaaaatttactaaccagccctttacaagaaaagtttgccagctcctcttctagattatcatgggttccaaattttgcagagaaaattgaagtactcagttttctaattacaattctattcacagtttgaaagaaatagacttataaatcttctacaggaccgggggtgtttagaaggtggattaaaccactgtctgcttgtaatcacccacaattaaatatcttctgcctcacaaatgcccattttacataataatgttttgaggacagagctcaatgcggctgctagataatgtacagctaaaaagacaaaaatgatattctgtgaaaaaaaagaatgagaacaaaaagggcaccatcaactccaggatatgaagaaccacagtcacctgaagctgagtggcatgtttcttggtccaaaaatttggtagcaagctaaaatatatttaacagtatttgagatcaagctgctccagacaatatgaaataatagcttctacatgccacaagctgggaaagcaaataattgcctgcgtttcacatttccactatacttctgatgtgaaaag

SEQ ID NO: 28357 - DNA, 1187 bp, Bovine  19866880917814
  misc_feature (1)..(1): n is a, c, g, or t
naatgtggttttgtttttcctagtcttctaagtccaagaagcccaccttggtctcagtctgggtgagcacccctcttctgtgctccaaagaaaccctttaaacactactgcagtctttataatctcctgctgcagttgcctgttgactcatctcttgatgtggaggtcattgctgtgcatctctgtttaatcagcatttagcacagagctaagcatgttatacggctcaagagcttcttgatgaataaacacatgaagatgccttcctattggaacatgcacttgtttgtctagaagattttacaaggaagtgaaagtccgacctaggacacagcttctagagccttaccccaagcttgaggaaatcattgctcccacaggtagatgtgcaaactgactttaatgttgagtctgattgctaatggatgactgactttcaaagaaaatctttgcagtaaaattcatttcactgtagaagttcctgcagcataggtgaattcttaaggcacttcagaatgtcacggtactccaaactcatttattatgagcatgcttgcattgaggtgcatgtgcagaggagctgcttctagaaatttctgtttgaggggatgctggatcgattgtataagaaagatacagttgggagcagaaggccagtgaagttttgatatagacagaaaggttagtatgacccttcatattaaagatctaaatgaagtcctgaattaataaataatagacatatctcacatgcacaaagatgctttcagagactcgaaggcaacatgagagggaaggagagggagaataaaagagttgttttaataacatatcactgaagataataaaaattagtcaactgctaggctgtgaatcagagaagtgatattcaaagattttgaaggaaaatagcaaggggactaggaaagcctttggcaaaagtacttagagtactctagacagagttttgaaatgtggttaacagaatgaggaggaattcaggaagatctcagtcttagaagtctgccttcagatgtgcagacaaaatgctggcaagaatggtgcgaggcaagattgaatgattttgtgggatggtttgacccatttagacccaaggctatttgtaaaaacacattcatattgataaattgataagggttgtgagtatatttctgagttatttgaag

SEQ ID NO: 28358 - DNA, 1818 bp, Bovine  19866881016828
  misc_feature (1)..(1): n is a, c, g, or t
ntagtcttttttgtatgaattgttttgttcagcatagtttctttgagatttatccatattatgcatgtatcaatagttctttcttttttacaactaagtagtattccatcacgaagctaaactatgatttatccattcaccagttgattggaaatgtttccactttggggctattgcagataaaactactatggatgttttcatacagctttgatttctcttgggtaaattcctagaagcagactggctgggtcatatggtaagtgtgttgaactttttaagacgctgccaaaccattttccacagaggttaaaccattttacattctcaccatcagtgtatgagaattctggttgcttaccgtgttcatcaacacctggcaaattcagtcttttttcactttaactattctagaagtgtgtatcagtgtctacttgcggggcttattttgtattttcctaatgactaaagaccggagaaggcaatggcaccccactccaatactcttgcctggagaatcccatggacggaggagcctggtgggctgcagcccatggggtcgctgggagtcggactcgactgagggacttcactttcacttttcactttcatgcattggagaaggaaatggcaacccactccagtgttcttgcctggagaatcccagggatgggggagcctgttgggctgccgtttatggggtcgcacagagtcggacacgacttagcagcgacttaggagcagcagcagcagcagggtgggaaaattcctcatgaaaagtgtgctggatgggaaaatgcaggcagctttactggaaagtgagcaggatataagagaaatccagaagattaatagtgagaagagatgtctagagtgactgactgctttagcatctccgtatctgccctatctttgaaactaatcagaattccttgagcttctggtaaatgagattttgaggtaagaagaattctgtttgaaataaaagtgaggtggtttgaattgaaacttaatcacattcaggaaagtcaagtatcccttctgggagagatcaagcagattatgaaatgattttagagaattggtaacaagaatgttctttctaactttcaaatctatatttggccaagtaaaacacatggaaggaaaaattgttttggtcccttgggtaaaagacctaaggaatatttctttttcactcctactgaaatcactcattcagtttttagagctcacttcacccactaaaatggtatcggtgattgtggagaaatttcttcatgacagagtggaatctcttctattattctagtcatagtaattccaccattatttaacactgtatgagaaatatcacaggtcatgttacaacataaaactttgaaaggcataaaatattaagagcataaatctagtttttgacatgggtagaaattacactggcctctctgaaaacaacacctgaatcaaagtctcaaagatgagaacctgaaaaaataataataaaaaaagaaacagcaatcctcaaaatcaaccaactatgagaatatattgattagaggagtaaagataacactagctgagatgacttctagtctagagagaccaggtcaattctcacagaccttaagtatcttttcagcaccctcttcaattctaggagaatattgttgcaagttttggcagaagcagttttcactcgcatgtacctgatgatgaaaatgtcttcagcaggtaaatgaagttttgccccagtgcttgtcatcaaagcatcagtaattaacaagccataccctttgaccttgcttttcacctgta

SEQ ID NO: 28359 - DNA, 2263 bp, Bovine  19866881108254
  misc_feature (1)..(1): n is a, c, g, or t
nactgagacgactgaactgaactgaatggagaagaaaatggcaacccattccagtattttgcctggagaatcccatgaacagaggagcctggcacaggctacatgtagtccatggggtcacaaagaatcaagcatgacttagtgactaaacaatacttaaataaaagggttaaggttattgttgaaataaattgtattacacaggactcatggatccctgaaggcatccgtgttgttctaatatccatggaccctttttcagggcactgggtcatactgcttctgaatccgcagggaagacagtttctgggaggaaataaaaaggggctgtgaatattcacagatattattgagccttgaaatactgtggtgcagtattcattaagagactcaacaatgttgctcttcccaatggtctgtactggcaaggcttagcctcaacacagaggactcagcagtctcagcaccaggggcctgaaatggaaacccactctggggacagcagtttcctcactgtagctgcctgtctttccctctcttcctggtgagagccagtcctttcccaggttggcctggggacttgcaggtgataatgcttgagaacatctgacgagaggtgaatgggtggtcaggggaattgttgctgacacaaatccccagcccttgtgttcttagcaccactggaaactgaattttactacatttggttttttctctgttgccatagctgaatacacagatcatgctttggtgaggttttatttcattgtaatgcctacttttccatttttggtacataaatcttttggtaaatcaaggacccagaataattagtaattatggagcagtgcattgaagtagcatttggaattgttacaagcacactgagaattgcttatggtgctactaacaatgcccaaagatgaaaataggaaacggctatgacaaaattatcttttcagagtaggtaaagatgagtgaaagaaaatatggtagctgtatttggggtaaaaggggcatgtgggcaaggagagtacttctgttcattcagtaacttcaaaaatacttaccgtgaatctacaatggccaagcacctatactcattgcaagcaatacagcaattaagaggttgctgctgctgctgctgctaagccgcttcagtcatgtctgactctgtgcgaccccatagacggcagcccaccaggctcccccgtccctgggattctccaggcaagtgcactgtagtgggttgccatttccttctccaatgcatgaaagtgaaaagtgaaagtgaagtcgctcagtcatgtccgactcttagcgaccccatggactatagcccaccaggctcctccatccatgggatttcccagacaagagtactgtagtggggtgtcattgccttctccaattaagaggttgacagggtctaattctgaagtaatgaaagttatattctggatactaaagagatattaaatgagaaaatggaatggccaaaagttttaataaattctagaaattgagaccttaagtttgggaaaatatagtgtgttctagcaaatgtggtttttgcttagagaaatagtgagaaagaggcacaccatgacgtttatgaggctggcagagttcacaagttgaagagcctgagggctgtattaaggaattttaagttttttctaagtgtaagcattcattactaaagatactaagcaaggacagaatgtgtgatatagattttcatatgctccaatgactgattgatgaagaatgtgatggacaaggtcacatggaaaccaggtctccagagaggccttctcaggggaacaaggatggtaaatagatgaagaagaagatgaagtgaagatggaggaaagtggatggacttgacatggaattactgaaatatatttaaatggacaatactcaagaatagattgaatagagtgaagtgaaagagaaggggtcagggagaaccagaaagttcctgaatttaataattgtgtggatggtgatgtcactttgtgagagggaaattcaagaattccatttgggacatgttctatttgagatcaattcagtcactcagtcatgttcatctctatgtgaccccatttgactgcagcatgccaggcttccctgtccatcaccaactcctggagcttgctcaaactcatgtccatcgagttggtaatgccatccaaccatttcatcctctatcatccccttctcctcctgccttcaatctttcccagcatcaggg

SEQ ID NO: 28360 - DNA, 2164 bp, Bovine  19866881174367
  misc_feature (1)..(1): n is a, c, g, or t
ntaagtaatagtcactgtggttaaattgaagagagctgcccagagccaagaaaaaaatggctggatggtaccaaagttcttaagatctctgatttggagagccacaaagtttacaaaatcatatgttgttctctttgaaggcagttgcatgtgttggtgtgggaaattaagggaaagttgaactaattgcaggttatagtctactagggagattcaatgaaagaagaggatttgaggatgttgacaataggttagggtgaatgtggaatctaagcttaatagtgaatacaagatttttagaagaaggtgaacaaagaggttacaagagaagggtggtaggagggaatgcagtatttgaagggggccagggagaccgagaaaagggcagaagtggaaggttgatgcaatttgttggcatcaagaaggctgaggacttcgaagttttatggttaagtggttagaagagttgcccaaaattatgtgaaaaaagtgaatccttacatcatctctgtgatggtagaaatcagcagtggagaaagagagggaggcatgttctgaagtgcttagcagatgaaatggaatgaccagaagatgctggaaatgtgggatagagcagaggtgggaaagtggaatgatatgaggctcagaggatgaaaggaatgtgctgagggtcagtgaaataaagacgcagagtcaacagagaatgctatgagagtgaccctggcctttacagcattggggtacagggagaggggttttcttggagagaaagctatagtcatacttaggacattggctgatgcacaaggaatgctgaatgtcaactcattctcactttgttgacagaagactgaatgtaaaatgtatgggtttatatcaggaggtggagggattctgggaagggctgaggatgtcatggaatgggggctaattaccacagaaaagggctttccaggaccacattggaaagcatttgtaaagaagaccacaagtgaatgaagggacatgatgggagaagtacaagctaatgtgtgcacatgagtcatataggggttttttcattgaagaggctggtgttctagctcaggctgaggccggcaggcatggagtggctgccattgactgtgctgaggtctctaagactgggacgatggaagcctgggtagactgaggagctaacagtgataaaaaccagtagtctttgctccatactcgaatagcaagatgtggccaagctttcatattttttaaagataattctgttttggctgttggaaatgatttgcttctctttaaactgctctattcctagaggaatcattcattggtttgaggtagctatggaatattttatttatttatttttttcctcaaagaattaggtattatggagcagcttggatgaaactacccttaatagagctctttttacatggctggggataaacttggctattttctccagggcgtgatatagaggtagaccttggttgctaaaagcctaccgcctcaagttctgctactagcccgagttctgtttttctgctcacaccatttggtgagagcctctcttctatagcttacgtgtctgcaggatgcatataaaaagatgatatatgtgttagtcttgaggcaaatggatgaactagatgaatcatttggggagggtaacacccacagccccctcacattgtcactgaagtaatataattttctaaaggaagaattatcgacatctagtgagatgtgaaatcaatatgtgtattatttactgaacacatgctgggcattttttaccagactcattggtaaacatgctcagacataaattttccaaattcttggatggatttgtgctttaattaacattcttagctggaaactagaggcagatgggaagcgttaataattccataattgataacaatcacttctgaaacatagaaacagctcacagctcactaattatttcggagaacaaaatacttcaaattgttggggagaagtgctcagtggcgtgggaagtgggaatagtccggtgaatgaagactagatcagaagcagaaggtctggctttgaattcagtgccgcatcccatctatcttttcttaagctgtattttcctcatctgtcaagtcagaataattcttgtcttcacatgtag

SEQ ID NO: 28361 - DNA, 907 bp, Bovine  19866881186388
  misc_feature (1)..(1): n is a, c, g, or t
nttctctgaacttaattgtgttccctgcacaaattactcatatgttcatataccaacctccactgtgacagcatttggagatggagcccttgcagagaaagtatgtttagatgaggtcatgaaagtggtgccctcctgatgagattagtatccctttaagaaaagatatgaaaaagcagggatggcatcaccaactcaacggacatgaacttgggtaaactccaggagatggtgagggacagggaagcctggcatgcagcagtccatggggtcacagagagttgtacacgacttggcgactgaacaacaacatgaaaaagcatgcccttctgctccagcagatgatgccacagggagaaagcagccatccgcaagtcagaaagagccctcggcagaacccaaccctgatctcagacttccagcctccggaactgtgaataaatttccattgtttaagccatccagtcaatgacattttgttatgacagcccccatggactgataatttaataaccctttaaatatctctgttgcctggtgagatgaatttttacatcatcttctaagatatgtgtcaaacaaacatgcttcctgccagatcaaatatttgcatgttaaaaattcaaatacccttttggtcatcccatgcacggtaatgaactcttctcatacaaggttaaatacatcataagctagaagttagatcattgcattttctgacattttaaaggtgttttccatatatacctatgtcagatatttgcaaattcatgctaagatgttttttttcccctgctgggttcaatttcagaattaaatactgtcataaagtaacacatctctttgtgccacggggaatcacagcataccaatttttagctgacatcagaaaaacactgtaagatac

SEQ ID NO: 28362 - DNA, 1208 bp, Bovine  19866881264895
  misc_feature (1)..(1): n is a, c, g, or t
ntagaattaatgagcctcttaagtagcaaaaatagagacatttgctgattcccagatgagagttcttcctgctattcaatgctattccaaacgttaaaaacagatactaaggttttcagagtaaaaccaactacaaagtagaaaaccaacacaattttctagataactcccttccttgcttcattaaaacaaattatccctgaacatcttttatgcctcaattttctagataaatcagttgcctctgactcactggtcctaatgaggatgtggattcccaaatgtgcttacatggggagaccacacttccaagggcctgaaattcctgcctaataaactcccacacttccaaatgcagctgctgccagcttggcaagatggctcactccagagtgacagttgtgctaaatacactgctgtcaaacctgccatctgctccttggcccaggctaggacataaagacaagacctcccttctaattttgcaccttgccaccctcacgatgctatgatcacacctgctgacctgtctgaagacacccacctgatttctcttgtcctctaattgacactcaccccagagcttcgatctgaacacaggagtgtcttacagttcacattcaaaccacacacaggaacacattcacccctcagacctacagatctagtgtaaacactaagtgtccactgaacttcgtgtcttcacgtacacatgtgtgtgcctgctaagtcatgtatgactctttgccactccacggactgtagcctgccaggctccaaagtccgtgggattttccaggcaagaatactggagtgggttgccatttccttttccaggggatcttcctgacccagggatcaagcccaagtctcctgcctggcaggcatttctttaccattgagccaccatcctcacatatagaggctgcaaaagccatcaacacgatggctggtgtgcctcagccattcacaaccttggcaccgaaacaagatgtgtacctgattatgacatcaaaaagtacctatagaattatcttaggacagttcagcatcaccactgaggccatgagaatttcccctgctttctcatctttgcccacttctctgacagtcaccctccttcccctgctgtatccctaacaccagtcctcactatccaacctcttgacctaccgccaaaaggcttattttttatgtctgaggaaatt

SEQ ID NO: 28363 - DNA, 2406 bp, Bovine  19866881279457
  misc_feature (1)..(1): n is a, c, g, or t
ntcaatggattgtatgtaaaagtgaaataggtattattatatttatttgttttttgtatactgaaaccttttacatgtgtcaccaaatgatatgtattccctgtgtaacaaagaattgtttcaataaccctgctgtttactatcagagaaggcaatggcaactcactccaatactcttgcctggcaaatcccatggatggaggagcctggtaggctgcagtctatggagtcgctaggagtcggacacgactgagtgacttcactttcactttcatgcactggagaaggaaatggcatcccactccattgttcttgcctggagaatcccagggacgggggagcctggtgggctatcgtctctggggtcgcacagagtcggacatgattgaagcgacttgggcagcagcagcagctatttactatgaatttccttattgctgttttatctaagagaaatctctctctctctctctctctcttttttttttgtgtgacagcattctgcgaagaaggctgcagatacggtggaacatgcatggctcccaacaaatgtatctgtccttctgggttcacaggaagccactgcgagaaaggtaaggaagctctttctctaggactgtagtactgtggattgacctgatacattgcattgtgttggtggatgtggctctcccaaagctgagtaccttttgattactgtgtcatagacatcctccctctgaaaacagaacttaatctgccctctctccactgtgtctaatttagcaaagtcgaatcttttccctgctaccatttgcagtgtgcattttagcactaattagatataaagcctggagaaggaaatggcaacccactttcagtgttctcacctggagaatcccagggacaggggaacctggtgggctgccatctctgggggctgcacagagtcagacacgactgaaatgacttagcagcagcagcagcagcaaagcctttatagaaggtggttttgttgttgtttagttgctaagtcatgtctgactcttttgcgacctcatggcctgccaggatcctctgtccatgggatttcccaagcatgaatactagagtgggttgccatttccgtctccagggtatcctcctgacccagggatcagacccacgtctcctgcattgcaggcaagctctttaccactaacctgccagggaagcccatagaaggtggtggtggttgttgctcaatctctaagtcgtgtccaaccctccctctgtcctttggtatctcctggagtttgctcaaactcatgtccagaaaggtggttggggagttctatgtgcaaaggcttcctggtgaatctgagaccgggggccccacgggggccaccccagaggccaagagaagaactgcaggctactaaacaaaattcaaccaggaataaacttgtaacagctaaagaatgattacttcagtgcattgccttgctacaaaccaattttccttgtcaccatttcaaaagatctcctcaactttaaatctcagcaggaacccaggaattgctgcttttttgaagtctgcagaagatttgacatcctggcctggcaaaggtttatggaatatctcatctcctgtaataaaaattcccctgtatgttgacccgaaattctacctgtactaaccctggtgtaaacaataagattcttcacctggagtagaatctcctcatggggctgccctacagctgcaaacagatcctggagggcatttgtctggcagaatgattgtgtctgtacaaaccaattgctcaatgcctgttctccagcagagctcaggaaaagaatcaataaaaaaaaattcccatccagtacattcccaatctgattaattcaaatcaattcaacttgaaaaatgggaatggcgacacaattaataaaccgtgactgggtgagggacagctttgatcctggcctctctgaaagtctccaggcaaatcaatgaccttcctggggtcctggttcccttactgtgatgtggggccagggtatccaggaatgaaatctgaatgcaatctgacagcagaacatttaagaagacagactttctgataagaagctaataacagaagcagaaatttttcctgcttcggaaaaattttttaaaagatacaaaaatttcagaacaaagcaggcagacagtgaccaggtgacacactactgctctcatcacctggcctttcaggagccaactggacatattaacaaagacatattaacatattaaacaaaggaggggaagggtttgtgggctctggagtcaagaaccatctgggtttaaaacccagctatcccatttcctggcttccctgatggcataatggtaaagaatatgtctgccagtttaggagacgtggggttcgatccctgggt

SEQ ID NO: 28364 - DNA, 1740 bp, Bovine  19866881320682
  misc_feature (1)..(1): n is a, c, g, or t
ntttcctgcagaggtgggttgtggggatgaggaatagagtaccaatggttattgactgctttctctgttgtagaccttgtctggccatacctgtatgacctcagttagttacatttcaccttcagagaatgctaattaaatagtaatgtaatcatccctctgtagcctgtttctaagaccctctgtggatataccaaactccacggatgctcaactcccttatataaaatgacagagtgtagttggcccttcatatatcccatggatcaggcatctgcaggtacaaagggttgactgtgttacccctagtgtataaatgaggcaaggatactcagaaagaccaagcaacatgtgtgtcacatagtttacaagtgagtgaaatgagatcaaaacttagaacttttttttgtttcctcaagattttcgctcattcatgcaacagatgtttttaggggcttgcttactatgtcactgtgttagatggtggagtatttcacttaagtataccatgtcccatggagaagacaaacttatcctcttccttagctccaacccagaataggcggtcccagtgataagcaccaaaaggaggtggcagttccacacacctcatcttcctagggagcattgtgattctccttattccctagaatgagtagctccatccagtagctctttagaaggaaacctttgaaaactcatctcccccgtagtgtcctgtacaccagagtgtgttaagcccaccctttggtgaggtgagatggctaggacaggggatataagccaatgtctcattacagaaattatcctgatagtttcagtgtcaaaaaatcttcctataaaagaggcattcatttctcaggtgacttctcaggcttttaatatatatcgtgtagaaactgcctcctggatccaagaatcacacctgtgttttggttccagaactaaaattcttatggtgttttcaggctaaaactgtggtgttctttattttaaatatgaatggtcacttcataggcaaagtaaaaggtaaaactgtcaagcttttttctggttcctggtgcatccttaggaatagtgcaataaactgttgctgatgaaacagcagaggatggaatcatttgcttggtgttttgcacataaacctctagtgttagtcactgcctgtcagagacacagaacacaagctgcagaattcttcacttcaaaacagcatccatttgagaaagcagttggccagtagtgataggcttatctgaatctactgattgtcgtagattttcattatcaaggtggttgcctaccgctcaatttccctttgatgcgtactaagctgattatgctgtcactatttcagagggtaaagaaaaaaacaagcttaggtgaatcacagtgcttcagaggtttggttgttctgacagtttcgaaatagctgaactctcagggagaattctgatcccaaagccattcacagttagaactattctctcagactgtgtctctgtgtctggtgaatttaggtctgaaacctttcccttacctggacttcactgtctccttaacagctgagctgtcacggggaagtgaaattgattattatttttttttctgccacagctgttgttttctacctcagctggttcccataattccacagatggtaagcatatgtttataggcacatagaaaaagaagctatactgaattcctcccatctctaattcttattttttcctttca

SEQ ID NO: 28365 - DNA, 1410 bp, Bovine  19866881382047
  misc_feature (1)..(1): n is a, c, g, or t
ncaaacaggcgcagacaccacataagctcagggatgcgcctcggagggcttgctgtttcttttctcttttcaaagtatggatgattaaaaatgtgtgaaaggacagatcagggaagcagctcacatgtagtttcaggtaacaggagccagggtgcagaagaggcctcttaaagaatcccagtgtgtgttagtcgctcagttgtgtctgactcttcgcaaccccgtggactgtagcccaccaggctccactgtccatgggattctctaggcaagaattctggagtgggttgccattgccttctccaggggaagaatccctacagtctggcaaagccatacctttacaaggggggaaaggtgcaacaaagtaccttccctaacacctcctctgacacctcccctaagtgatccactagagaccactaatccgctaacttactctagaaattgtcccaggtagtcttgacactgggagaaccacacacctgctgagctaggtacacagtgattgggtcaggctgtgtcctgatcttgcctcctacttgtgctgtaatcccagtctcccttcaagctcaagaagaaaagatgctgaagatgggtaatttcttgattacttctgtctaaatctttgacaaatctacttatggaaatcaagcagcacttggggtggcatttcagcttgtaacatatctaattttgagattttcattggttccaggagctcaatagtgatttttcaattacgtttaaaggtttaatacaatagatctctttttttacctttcatatagcaaatgccaaataaataatatttcaaaggaaaggaaaaaaagcaatctattgcatgactaatgtacctagtttcattcattgacctcttactgtgaaaaaggcctctgctgcctgtctttgaatgtgtagaattaagaataaatgattcgctccatgtttgcttagataaatgcttgaacaaaggtaaaacagaaagagatgcagatttgataccgtatctattttggatctgcaggcattccttgagaaaatggcaggtagtgtagaaatagcttttgaaaatgaatttgtagaaattcagcacgctaatgccagtgacagaaaatgtaattcatttttttttttattcagagttattttttcttttattgttgcttcaggatttagcaggggggaaaaggaaggcaagattacatattaagtgcctttgaaaaattagctttttgctttactgtgttcctttgtttttgaaagtctatctgatgcattcttattattacagagattagggcttttcattgttttcagagaaggctaagtatattaaaaatgaaaaaaagctcagaagggaaacaaaaccggccttcggaatagcttccattgtattagaggctcttc

SEQ ID NO: 28366 - DNA, 1288 bp, Bovine  19866881384478
  misc_feature (1)..(1): n is a, c, g, or t
nttaaggcaagaattacaaaggcaccctgcaagtttcttcaattatgcacaaaaattggagtcagatggtaaaagatgctgtgtaagtagaagaaagtaaacaggccttgtgatcaaaagacataagttccaattcctgcccccatttactcatctttctgagcttctgcctctacagccaagaatatgaaataagaatccctgcatggcgctgatatgaggattgaatgagataatggatgtgagtgcacctgtaaactacaaagcccttgacaaatacgaggtattattatgacggtattatcacaataaaagttaaatgcgcttgggagaaggcaccctagcttccaattattctgtcaaaatatttattggatacctacatgccagcctgctgctctgagccctggagaacaaatgagtgctctgctctcacaaagatttcatggagccagcattctcatgaaagagagatagtaacaagttattcgtggattcaggatgcttttcacaagagaaaaatcctcattgaggatgcagctaagtaggtcctggatccagcactaggcagggaaacaattcaccctacccagtgatgtcacaatatttattacgtcaaagttgcatgcatgcatgctcagttgctaagtcacgttaggctctttgtaaccccatggactgtagcctaccaagctcctctgttcatggaattttgctggcaagaatactgaagtgggttgccatttccagaggatctttctctggaaagatccattctccagaggatcttcctgacccagggctcaacctgcatctcctgcattgcaggtggattctttaccactgagccacctgggaagtccatatcaaagttggaatcaaggaaaaaatggaggtgaagagggctggaggatcaattactgggtatcaaaaaacagaaagagaagccagtgtcacagtcatgaaacagaattcaaaattaaggactaaattgggcaggtaaagtactagtatatgaggactcagaggaactgaggcaaagtctgagacattatttgcagggtctaactgaggatgaggttccctggtggctctgccgtaaagaatccaattgcaatgtaggagacatgggttcaacccctgggttgggaagatcccctggagaagaaaatggcaacttgctccagtattcttgcctgggaaatcccatgggcagaggagcctggtgggctatagttcatggagcacaagagttggagacgatatagggacggacaacaacaacaac

SEQ ID NO: 28367 - DNA, 1960 bp, Bovine  19866881408542
  misc_feature (1)..(1): n is a, c, g, or t
ntgaaagtgaagtcgctcagttgtatctgaccctcagcgaccccatggactgcagcccaccaggctcctccatccatgggattttccatgcaggagtactggagtggggtgccattgccttctgcctgccttccctattagcctgttaaactcacctttccaaaggcaatctctctagtgcattgatatagcattgtactggcttgtgtttcctacttttctgagcttcttgggaacagataagctgaagacatgtgctttgtatgattacacagggggaaagtgtgttcttctgcgttgtgagtgaagtcctgatgaatggaatgtatgtgagttccttttcacccagtcattcattttatggctggagtagctgaatcaaagctactgcttttgtactccatggtgataacagccacttcttccttgttttaacactgacctcagcaattcattctgtagtcttttagcaactgcaacaaggaaatagttatataatcttggtgtgaaggactcatggcaaacataatcaagatgacagtctgataggggattcagcagttattcccatactatttccatgtcttactctagacatgcacagagactttgtgttgcttagagtatttatgttctatggaatctactggagttggacagtgccttggaggtcattttgttacatagtatgactatctgacctgcttttctgttttattacagcaaaatgtatctatggaggaaaagtccttgcagaaggccagcggattttaagcaagagttgtcaggaatgcagagtaagtttcaatcttacggttcccattacttgttgggaaggagatgtgggctttaggtagggttctgaagtggagcatattggcccaaggtggggaaagactctcattgggctgaagtccaggatggggagttctcagccacggtcactgtgtgattagcttgtggtcagctgtggatcacgtagtcttgggaaagacggtcagggaaggaagtgagaaggggaagggagctagcagctaccgtgagtcagggagcttgtcagctgaccctggggaaaggttttgattaggtattggggcaattagtctgtgatttgagctgtggatagtgccacctctagttctcaatgtctgagacagtgttagaaaatgcctgtctcctgcctgccccgtctcatgtattcctccaggttagatttgtgggaccatagatctcattcagtaaatcattcagcaaacatgcattgagcaagtgctacttattggcatgctgttagattctgggtgaacaacagtgaacagaacaaagccctgtctttagagaatttgcagtctggtggggagataggcagtaaggtacaaacaaatagatatacaagacagctgagccttgaacaacacatgtttgagctgtgcaggtccacttacacgtggattttttttccaatagtaactactgtgatgctgcactctctgtgcttgattgaattcctggatgcagaaccatcgatacacagatacagagagctgactataaattatgtgccaattttagatggtgtgaagggccggtgtccctaacccctgcattgctcaagggtcaactctgatgtcattctataaagatacagagcaggttaaagggagagagagctttgaggtgggcgtgagtgatctgggaagacctctctgaggaggtcctgattgagcacagtgctggatgagggtgggagctagccaggcagttacgtgggtgagatgttgtcctggatcgtgggagtgagagacagagggaaagatgggagagaggggagcagatacaaggtggtgccttctagagcagccacagccccacagcgaggcatggctggttctgtgggcatcttcagggaggctggctggaactacatgtctcagaacagacccgctttccaagcatttca

SEQ ID NO: 28368 - DNA, 1355 bp, Bovine  19866881463319
  misc_feature (1)..(1): n is a, c, g, or t
ntgctttctaagaatcctgaatggtgatgtgtaatggtatcctcatctgtaaatgggaaaactgagaggagagaggcagataacttgctccagtgaaacttaattgggaagcagggatgaagaattccaggttctgtgattccaacacagcatcaggtacctgagaagtgatgtccatgtcactcagtgggagaaaactagtttggggatttaaaagtcgaggcgaggagagaaggtagaaatacaagaagaaggaaggatgaaagaataaaaagaatacaggaatgaaaaagaattaccttagcagtcagaccctgctgaaaacactgctctccccatccccactcttcgatacctaacccagacagacacctagattatcagatgagaggcttttggaaatgggcccacagatacccatttcacacctgccagtttctagctgtataattttgggctagtcatgaaatatctatcaaatttatcttcctcatgacaaaatggaaagaaaaatagcaacctctttacatggttgttacgaggaataaaagtcaaatacttagtttcaggtactcaaaatattttaattattgacattattattattagttacatacttaaaaagacagtggggaaatccatttgaggacatatacatttgatgtggggaaccaaggggtaaatgacaccccctgactcacagggctatctggccacaattgtgtttcattaaaaatgtactatttttcattccaggcttgaaggtctcaaccaatgaatccagagttagagttattaataatcatgttgcaaaatgcaaaggaattctaaagagtgctgcttattggaggatttaaaacatatatttgacctttccttggctgccttcaaagtcaaaacccaaggttctcttaagtgagcttgtctgattaatagctgctttcatgttcatacatgcctgccgggtctccagcctccaccaccgcctggttatctgtctttctagatgtttagctatatctcatctacaacatgagctgccctcattcttgagccaatgttatttttgaaatatttaggctcaaatccctcagaatgtatttctaatttataggcagaatggtacaggggaaaagaacacagtccctagaccagagaaacctggattaaatcactagctgtgtgaccttcagccaaattactcaccttgtctgagcctctgtgtgcccacttgtgaaatgaagacataaatacctcttcttcaggtctgtgtcagataactgacaggatatacaccaaagtaagggcacagagcctgatacattgccttcctctccagatttgtcccttgccac

SEQ ID NO: 28369 - DNA, 1236 bp, Bovine  19866881479059
  misc_feature (1)..(1): n is a, c, g, or t
ntatttcctcattatattttaaatttatggagagaaagatcttatcagtcttattccatgctgcatccttagcttgtagaaaaatgtctaagaacataattggtgtttaataagtgtttataaagtaataagtgaatgagctcctaaagccataaaaatctctggactggaaggaaattaaaaagttatttctgacaaaagaccatccaatctctgccttaacaaccctggtgccatggaatttactaactcctcaggtatttcattccaactttggatgtctctgggcttccgtggtggctcagacagtaaagaatcctcctgcactttgggagacctgggttcgatccctgggtcaggaagatcccttggagaagagcatgaccacccactccagtgttcttgcctggagaatcgcatggacagaggagtctggtgggctacagttcatggggtcacaaagagtcagacgtgactgagtgactaacacacacagttgaatgtctctgacccattacaatgctccttctttagatgctgacttaacatgtatcatctgagctaggtatgctgaggctagttctattcctttgagttaggtggtatatgataaattcttgcaaggtgttgaatatagctgccacctcctcctctctcccctgtcttattttctttagatttccctaatgttttcatctaggtctcatctaacaggatttctttaccatcctggtgacccctccattagcatgctctagtttttctcctttcacctctgcccattggtacccacagtatttttcattgtccatcgagaggaacatttccctgccttgttttagatgctgtaactctcttaagtcgacctaaggtctccgagctactgattccagttaaacctgtgggcaattcaagctcctaagtgtttttcaagtgctgctgtcaaacctgcggccatgaacttgtaaaatcaggcatgtttttcaatgattcaatgacttccttttttttttatttgaaacagaagattgttttctgaggaacatttttctgggtcaggtgactgttcaggcctttgcattggcttaactcttaagtccaaaaaaaaaaaaaaaaacaacaacaacaaccaaaaaacctcttaagtcgtgctgaaagacttcattggtgccttcttcctatatacttgtcaaaacctatgagttaattctgtattggtgatgcagtatatctgct

SEQ ID NO: 28370 - DNA, 679 bp, Bovine  19866881753373
  misc_feature (1)..(1): n is a, c, g, or t
nccctgcgtaatcttaagggaaatagtcctgaatattcttggaaggactgatgctgaagctgaagctccagtactttggccacctgatgcaaagaactgactcattgtaaaagaccctgatgctggaaaagaatgaaggcaggagaaggggacgacagggggtgagatggttggatggcatcactgctcgatggatgtgagtttgagcaagctctgggagttggtgatagacaggaaagccaggcatgctgcagtccatggggtcacaaagagtcagacatgactgagcgactgaactgattcaagcaagggtgcctagacaatattaaaagtgaaatgccactgtgagttaatgagatatcggaaagcttttaacctcaggactgcaaaactgcaccattaatgctgacgctcataaacaccgtctttatcgagaagagaggagattggaaatacacgctactcattcataaagacaagggccaagaggcagcaaaatgccagcgatcaggcagcggtaccccagcgcaatgacgtgggctcgaaataccaccagtgtgatgatccatccatactccttcccgagcaactctttgcaagagttcagttcagtgggaatgtgacctgggacaaaaccacactaaccctggtgcagcagacttcctgctcccaatatcag

SEQ ID NO: 28371 - DNA, 834 bp, Bovine  19866881802777
  misc_feature (1)..(1): n is a, c, g, or t
ncatatctgccgtgtaaagacacccagtcctctaagagctcaccttgcttccggccctcctttcaggtttgccttggaatatcagcatagttaagaggttaagaacatggctttgaaattagtgtcttggtattaaatcctgcccactcattcactgtgtactcagcaaatttttagcctcagttttatcattcacaaaatgtaaataatattccctacacagtaattttattgtgaagatgaagtaaataaattaatcaagatatatgtgttctataggaaggagattgaatttggtttgaacattgctataaacctgatacccatagcagatactgagcacacacatacatcttaaatgtctgtgtagggtttcttctctgtctgatggctcagtgtatctcacaatgatcaggtactcatcatgctgcccaattggtagaagttcatgagaagcaaaggaaatggggagccatgctcctctcattatcaggggaatagggatatcttctcatatatgcagaagagaatgaatttaaactagccatgaaggtatcctttatgaaggcttagtctattaagttgtttgtcttggtattattaatagaagccatcagtgtctctaatgtagcaggtgaacttctagagagctgatgcagctaatagccagatgtcatacaacagtcaagtcaataaatgtgaaaattattaaacgcaagtgtaatggcctggaatagaaacactgagtgcttgtaaattactccattgttatttgaaggaaagaacaatacaagttgaaatattgaaacttcgtatgtcaccgtgtctcactat

SEQ ID NO: 28372 - DNA, 970 bp, Bovine  19866880126061
  misc_feature (1)..(1): n is a, c, g, or t
nagaaactccccaggtcagtaggtgcccaatatgctactggagatcagtggagaaattactccagaaagaatgaagggatggagccaaagcaaaaagaatatccagctgtggatgtgactggtgatagaagcaaggtccgatgctgtaaagagcaatattgcataggaacctggaatgtcaggtccatgaatcaaggcatattggaagtggtcaaacaagagatggcaagagtgaatgtggacattctagtaatcagctaactgaaatggactggaatgggtgaatttaactcagatgaccattatatctactattgcgggcaggaatccctcagaagaaatggagtggccatcatggtcaacaaaagagtccgaaatgcagtacttggatgcaatctcacaaatgacagaatgatcgctgttcattcagggcaaagactaatagagttttgccaagaaaatgcactggtcataacaaacaccctcttccaacaacataagagaagactctatacatggacatcacccgatggtcaacaacgaaaatcagactgattatattctttgcagccaaagatggagaagctctatacagtcagcaaaaacaagaccaggagctgactgcggctcagatcattaactacttattgccaaattcagacttaaattgaagaaagtagggaaaaccactagaccattcaggtcatatcaggcctataaagaaaaactgcctatggaaactaggaagaaatttcttaaaaggcatctaatgtaaggatttttattttccttttctttttactctctggaatgcagttgtgatatcaagagctcagctagccacctgatcatgaggtagaagccgtgtattgaacttgatagagaacttgataaaagaagcctgtgtctctgataaagaaatagccaaaacatctctagaatacgactttatttagaaataaataaatat

SEQ ID NO: 28373 - DNA, 1385 bp, Bovine  19866880392759
  misc_feature (1)..(1): n is a, c, g, or t
nacataaaaggaagttacctttaattatgaattatatgctaccaaccacagtattccatctcttcaaaagaaagaaaaacctttctataatactggaaaacctttcttttgtttctagaatgtctgtaatcatatgtctatcctatcgctgtagaaatgacacattactgcctttccattgtgggcacccaaatgctacttgtcctataataaattgaaacatttccattccagggaacataggcttacccaataagaaagcttcccatggtatcatcaactcactggactcaacacttgacatgtgatacgtgtttctttttttaaaatataaatttatttattttaattggaggctaattactttacagtattgtattggttttgccatacatcaacatgagatatgtgtttcttaaacatgattcacaatcttattgtgatgaacatggcatcagtccttccaataatatttagggttgatttcctttaggactgactggttcgatctccttgcagtccaagggattctcaggtggttagatagcatcactgactcaatggacatgaatttgagcaatagcggaggtgatagcggaggacagaggagcctggtgtgctgcagtccatgggctcacagagtgggacactacttagcgaaagaacaacaacttagcattcactaagtccctcattcaggtttgtacgtgtggcctatgtactttgcccagtcattctcaaaacctcagtataacttcagcaacaagatgacagatttgcttgctttagcaattttatgccagatggtgatgactaatgctgaatatggagagaaatattatttcctgagctatccatatttgttttttgtaaataattctttcatccaatcactgcaaatccctttgtggctattaagcacttttgcaatcttccagggactgcttaaggtagaatagagccacagaggcgcggcatagaaatcactcaacaccttagacttgatatgatctggtgcggctacttaacttgcagtctgcattttgagcatcttcactatttacgcgccatgcacacctttggaatttttataaaatacatgggttccttttctgaatagagttctaaaatgcataaaataaatatataggattaaaacaaaaacattaataccaaagttcagttaaaagtgtattagaaactaaaatcctggtatgctttgttaacaacaaattagctaagataatatctaggattgggttctcttgagtacctagatcacaaagtagaaatgagtttaaatgctatatgagtgcaactaccataatgctatataatataacacagaagggtagcaatactaccgtgtatgctgtttaaattta

SEQ ID NO: 28374 - DNA, 954 bp, Bovine  19866880399972
  misc_feature (1)..(1): n is a, c, g, or t
nctgatgtttatagtattttataaaatgttacatatgctaagaaagtagtcaaatcctctctattcacattatccaatttatcagaactttgctgtagttagagaaaatatgctaatttcaaggcttctcagacattcagaaggggatacatcacttgtgaaataggatataagaataaatgtcaagaggaaattacttccatttcaggaaattcttaattatggaaattaagtgaatattatttccaacccttcatagataactttgcaacttcttacatgttttaaatgaaagacaattgttttgaaaaacttaatgaatttacagtgtatacatgttgaatttttttttaatatagcaattatgctttaggctttaaaaattacatgaatttgatatcaaataccagaaataccagaagatatcactgtaaatatgctaataataaaagaatgtaatttagaaaattactataaacttttatttatgaaaatagggtactttattaaggattgacatagtcctagagtaaagtgcctattgatttctcaaagaattttattatttttgtgtaaagagtccaaataccttcaaaatcacctaaatgaaaagtaagattattttatttcaaaacagttgaaaggaggtgattttttaaatcaggtagcaaattttggcactatatactgaagcattttaagccaaactttgcataaattaataaatcactttatagactattctttttttaattctgtctccttgttatttcccacattattcagtgcccagtttcaggatctatatccattgttttaaatattactaaaaatatgtctgaatgcaaaatgctcatatacgtttcagaaacacaaacatatgctatgctatgctaagtcacttcagtcgtgtccgactctgtgcgaccccatagatggcagcccaccaggctc

SEQ ID NO: 28375 - DNA, 1297 bp, Bovine  19866880429602
  misc_feature (1)..(1): n is a, c, g, or t
ntgaggccaagttcctcttcctactctcaggtcatctggtgcttccaggcttgtcaccaggagcaactggaaaggccagacccaggactatggcctatcctggtggctgccaactgatgggccttatgtgcttacagcatgcaagcctcacgcgtgagctcagaaaatcctcctccagactgagaattctgaaatttgaacttggaagctctccagtttttctctgtttcatgaggttctgtggtagctgttttttgtgtgcgtagatgatgcactttatactcctatctaaatgggaagtgctcccacttcctccatcatctgaataaatgcattcaatgaggatatctctcgtttataaagctttcccagtggtagctctaatcattagccagattggggaacaacagatctattctaaaacagaggtactcaaaggagctagggttctccgcttcctccaacgttaagttgatataaggacagaaattgagagtacagatttagaaatttaacagcaatttgatgagtacttgtataacttttgaatctaataataggtagcactttatggttctttatttttccattaatctttttaactgcatttgaaaaatgtattgggcaaaagtaaaaatagagcataggctggggtggagaaaggatacacgagcgatattgtcctgagttctaccatattgaatgaatttttataaaaataataaaataatttcaagtgattttgaaactatcaagtcagtatgttaactattttgcacataaaatatgttttagctatatagagagatactagccaattcagtcactgaccaatgaaagctgttatcatttctgtatttagtgaagcagagtcaatcccattcaagaaagtcagtcaaaaaagtcaacatattattttgatgaatttgattatattttgatcaacttatctactatagtggtcaaaagttgcctgtgtagacacagatatcctcccaggaagcagctttcttgggtacaaatactcttgtagttggcctgctaacaaagtgtataaaatttgagcattactccatatatgaatatttatctaagactttggcatcatccaaatgtctgaggctctaattaagaaaaaaatgtaatgtcactcccaaattttgacatgttttaaaaacacagtcaaaactaatatatatcaacaaggtgtgacaaaacagttgctataaatggtgcttctcacaccagctggagaatatttaaataactatattaggacatgaagcttaaagcctat

SEQ ID NO: 28376 - DNA, 1261 bp, Bovine  19866880512516
  misc_feature (1)..(1): n is a, c, g, or t
ncaaaagcaaaattaatgtttttgttcatcaaaacctggtataaatataattagagagtatttacaatacatgtcggagaaggcaatggcaccccactccagtactcttgcctggaaaatcccatggatggaggagcctggtgggctgtagtccatggggttgctaagagtcagacacaactatgtgacttccctttcacttttcactttcatgcattggagaaggaaatggcaacccactccagtgttcttgcctgaagaatcccagggacagaggagcctggtgggcttccatctatggggtcgcacagagtcggacacgactgaagcgacttagcagcagcagcagcaaactatcttgactttaagtcttttttctggtttctaataaatggcctataattatttgaagaagacaagtgagatattagctcccttcccacttacagtaaggatttcagattcttaggtgtggggtaaggaaatttgaattcagcctgccttaatcctatttctctggttagtgaggaaggctttctcaaaagtacccttagagtggtggttatactgagggtgtatgtgcttccttttgaccttcttaatttaacaatcctgccatccggttatattgactcatattcaaagaaaaaaatttgataagtacaataaatgtaaaggtgaatttttcactttttaaacaaaattgaaggcaactttttcattatcacaatatcaagtggctaatattgaaacattcaattacactgatctaatgactaacattcctgaaatatgattgaaataatctttaagtcccctcacaatattgctatattcatgtacaatattttttgaagaagggtgagcaaagaaggcttggagaagatgctaacagtctccaaaacagtatttgcaaaggccatctaaagacgtgaagactaaagaagttgagatgatagcacatctcaacttggatatattttgtgtcaaagttatgtaaaatcccaatcttcattattactaagcttttcaatttctttactttataatacattttactagagaactaaaaatgctcatatctgcaaagagaatagtatatccagtctatgtaagtggtccatgagtgttgtattttgtactgagaattccagatgttatctttttattcagttctgttaaaataaaaattttttcaaagaagaaaaatttattgtagaaatataattgaggccattatatatttcatgttttctgtaac

SEQ ID NO: 28377 - DNA, 996 bp, Bovine  19866880549668
  misc_feature (1)..(1): n is a, c, g, or t
ntatgcatggaaatgaaatggaagatgtatagcttgttccattattaatgtaaggactttcagggaccaaagcgaaagtgaaattcgctcagtcgtgtccgactctttgtgacccatggactactatagtccatggaattccccaggtcaaaatactatagtgggtagctttccccttttccacgggatcttcccaatgcagggatcgaacccaggtctcctgcattgcaggcagattctttaccagctgaaccaaaagggaagggactaaaagcatttgtcttaagtgttttcttgtgaaaagaaacattaccaaaatttaaaaaaatacattgttgtaatattgactatagaaagcatagcaataattaattaaactccaaccacattttctatcagttctgtttttcctttcaatagtaattacaagacatggatggcaaagacagggaaaattcctgaagctgtagcagctgggtctttgttgaatacctgttggcttctaaattgcttctaggtctgtccctgctggtggagtgcctaagtttagttgttcttcagaaaactctgctcaagatgtctacagggaattttttgtaaatttaaagaacagtgtccttctttggaaacatgcaataattttagaatcttgtgatattatattgtaagacataagccaacagtttacacatccctgtccaggaagctgaataataagtaatcctgggaatttaaacttctattttaagcctctgtaaaggtactctcatttcttttgtataaattcaaaaaaatcagagtctgatctttgactcatttcaaaagtatccctatactaggatagaaaaatgaacaagtgcaagtggaaagagccctattcagattgagtgaacttatttccagttttttttgtaattacttttgtggaaggttatggataacatgggacattatttattttccaaatacatttttttgtgtgtgctacttgtcaag

SEQ ID NO: 28378 - DNA, 985 bp, Bovine  19866880572009
  misc_feature (1)..(1): n is a, c, g, or t
nttccccttcagcaggctctgctaaaatgactgaattctgacagtatacttccccaagggaaagctacaagagccccattccttcatttctttttaattcattcattcaacaaatatttaatgagcatatactgctaaggtactgatgtggaaccttgctttcccactaagagctttgtggaggcaagacttcccttgtttgatctcaaagaaataagtctctctggggaaggtgtgctgggtaggaatataaaggcaggctggaaggggggccattctggaggatgctgggctttcagattctcctaactcaccccacatagaaactgatcacaccattttaaactgaggaagactcctgctcacctccctagtagcagtgcctctaattagttcatccagtcaggaataagtttctaccttctccttccataccttcccctccacctaacactgtgatttgggacagtttcattctgacacaaaatttcacactatgaaaaagtcacaagtaaagtagacttccacagaagagaaagcttgattattctgaatgggtctccagactcctcctctggttcctgaactagggggcaattacccaggtaaacacatgctctattggaaatcctaccggtcatttctctcagcagtttctcggaagcacccaggtgctgactagaggaggcatcttttctttatagcaccgaggaagcatttttaaggtcataacattggaacagctgcttcaatacagaaatgtggaaactgagtccccaagaatttaggcctcttggtcactgtcacacttatttgtgacagaatctgaggccagagctctgtttgaaatactgctgcctccttccatccttgaaaaggctgtatctaaaaatccgtaggacgcataaaggtgaacaaagctgactgcctcacattcttaatgtattactcaagtctcaagtcagtattcacgtttcgtcaatca

SEQ ID NO: 28379 - DNA, 2320 bp, Bovine  19866880589559
  misc_feature (1)..(1): n is a, c, g, or t
nattttgcaggaagctacctaaggataatttctgtcaaaacaaggaaatgaacaaagatagaactgtgaccaaggaaataggagatctcatatagcagacagatgaaaaaaattcccaagactatggcaaaaaaggaagtatccatatgatagttgtataagaggcctagagaacacaaagactctgttttagtagaaggtcagatgtctcagcaagtcaggtgttcagaagataaaatatgcttgaaaatgagataaaaaaaatcatgatcatatgaaaaaattattgaggcattttatagagcttttctggggtgatattcataggttgaaagtaaaccaaatcaaaagagggcaatttttaactccagtttaaatacaagaaaagcagaggaaggaaatgtaatcagataatcttctagactcagcaatgaacactatttaaaaagttatgatggaaaacctaaatgtttttaaataaaaattgaggcataattatattgataggaaaatagagggtaaaattgagtcaaaatgataaaaccttacaaaagaagctgacagttaaggtttaaactgatacaacagtatattcatattctgttgacctgtggagataattaccaaataaaatagctaaatattaaatgtgtttgctcttgaggtataggacaagtcttaaattgtcaagaaataattttttaaaagaatagtaatttcagggataggtcttttaaccagttttatctaataacacatttatttcaaataaatattaattttaaaagcaatctggctcatatttctgattattaaaaatgtgttccatagttatacacactaacaagtcacttgaggttttctaatatgtttctgttgaaaatataataattgcttttagtatgacaatttttgctatattaactctaatttttttttttttagcttcatgttagtatagttcatttgccttcagctcacatggtaaattaattggaattgtcttaagaatcattttaatactatcattaagattacccttttgagatcaaattatgttaaaaataaaatggtttctgagttctaatttatctctggtttatggccactgggaaacttattcatctaatgatggccatcttgaactgctaggccatgggtggtaaagggcatctaatcaatttttagaatattgttatttctaaagattctagttatgagatgtaaaaaataagttgatgattcattaaaaaactatagcaaaattaagttaaaaatctactctaatgaaaagtcttttaaatgtttgataattcactttgagtccaagtgatataaaaatgtaatgaaagattatcattagaattgagtttgtatttctacattaagaaactaaatattacccagattggaccctgggatttacattcaatttagtacacaaatcctttcttttttggctattcaaactaatccttatattaaatatgtttttacttattaaaaaatctttatatttgtgacaacacatatattgctgtttggttctaaagttatggtcatatgaagatatacataaaggtgcttttagtattgcacttaaatccaacataaatctgtagtttggcaccatggttaaggaatgagggggtttatgtatagcagcgcccatagagataaatgttgaggagaatataaatcatgcaaacttcagagagcgtgggccacctaagagtataataaaaagaggaaaaggtgagcagttcaacatgtagagcaaggggcataaaataggagtggcacacctgaggccactccaaggtaaagaacatttcaaaaatgtatccctgaacatctcattttatgtacacactttatgtacacatatctttctcttttaaaaatgcttcttttaattcagataaattcaaaacattttataaattagaaaaactaacagtttagtagtggacactgagatttgagccatcgaatgattatcattgattttgaaattaatatttgctaagataaatggattgagtttcattttaagactgtccaattagacaattagaagagctaagtgaatatcttaatatttaagatatttatttcaggctcattttacccttgaaaaaagatgagcatctaaaaaataatttggagcagtacagtagctggcagacaaaagaaacttacagaaaatttttaaaaaattttcacatagatgcatcaataatccatacaaataaaggcataaatatatttatctgatagaattaaaatatgattctggttaaatattaaaagaaacatg

SEQ ID NO: 28380 - DNA, 1757 bp, Bovine  19866880609338
  misc_feature (1)..(1): n is a, c, g, or t
ntagaacacactctttatttaacagaggcccaacgcttccagatcccaccttgatgaatgcaagtttatacatacatgcataattgtcatttatcaacactaacgctaacagtgaacttcataagtggccattaaaaactctcagtaaggcctgatttttcattacaaaaatactacagaagtaccttcatggatttatgttccagatggtagtaccatctgggagctaagtttcattgtctaatggttttttgctacatttacatatattaggcatcaacacccacttctggttacaatcgttccctttccagagtcagtgcttagtagaaggtgttctgtgtagcttattatgaaaatgatctcaggtgacaagaggaagtaaacagattgaaaatttcatattgctaatgatagaaggcacagccataatgcaacctccattgaccatctcagatcagtagcatttgggccctaacacatttgcatggaatgtgtatcctaagcaggttgggtctgccacccagcttccttgggaatgtagacttgcagatggttctgatgaaacttcattttcttgagaggctgcatttaaaaaatacctgatggcctccaaatgcaccagaagctaaactgctaaattttctagtagattgataaaaatgagaatgaaatggagtgaacattagctaccaccatgggatttattaccccttcctttagggcatgggttctattctggaacaatctttgggagtcaagcaacagatggataggctgatctcttttatttcacatatcatgaccaaggtttgatttactttcagagaaaatataattcttcctcctccattccctgtatctaacctacagtaattcttatcatagcttcacagtctttctttcactaaagagtaggaccacccaaatatgtccacatcttaacacttggcaactcttagtatgttaccttacatggcaaaaaggaatttggagatgtgataaagttaaagaccttgagatgagaagattatcctagattatctacttggacccagtgtaatcacaaagatccttctaagacagaggaacaaaagtcaaagtcataagagatgggatgatggaagcagaggttgaagtgatgcactttaaagacagacaagggatcatgagccaagagatgtaggcctactctggaagctggaaaagacaagggaacaaattgtgccctagagccttcagaagagcacagcacattgattttaaccgcatattgctcatttcagactttaggccttgaaaactgtaagaaagtaaatttgcattgttttaaacactaaattcagagaaggcaatggcagcccactccagtacttttgcctggaaaatcccttggacggaggagcctggtaggctgtagtccatggggtcgctaagagtcggacatgactgagcggcttcactttcacttttcactttcatgcattggagaaggaaatggcaacccactccagtgttcttgccttgagaatccgagggacgtggaagcctggtgggctgccatctatggggtcgcacagaatcggacacaactgaagcgacttagcagtagcagcaaacactaaatttggggtaatttgttacagcagcaataagaaagtaatgcacattaccttttgtgtctgtgagttcaagagcttttttcacagaatcttgaattatttttattacagaaataatccatagagagggacaat

SEQ ID NO: 28381 - DNA, 2289 bp, Bovine  19866880628236
  misc_feature (1)..(1): n is a, c, g, or t
ncagtttaccttccctactactagttatttgacaaatgtcaataatttccacaccaacgtgcttagtgtacatgttctggattaatatcaattttatcaattaattatcaattaaaaattaatatcaattttttctaagtcacattttgtatatctgtgaaataaaagtaaggcctatgttgtagaatcacatgtaatgagaaacaatgtatgtaaaacagaactgattgcagcgcctgacctggggtaatgactcattaaatgagagcttctgtcatggtgataatgatgatggtctccattttttatccctcggaatgaatctgatcaaataaggaaagctgcatgtgtctgacccttctcctctttctatctcagttgacttaataggctcattattgatgatcttcctaggaagtaaagggaaaaatcaccagaaatctgaatgaacctcagctgctggtcaaacagaaccagaatagcccgtgggtgctggaacaattcaattaggatttttaatatactctctgcttctcttctcccagccctaccggattctaagtatctatctgcactagatggatgccttcaggtacaatgatatggataaacacttccagggaggcggactcctttatagcttttccagaagaacactgtctattgtgtgttctgtttcatttttataatataattaaacagacacatggagaagtttgagccatgtagctaggtaacactcaaacaatgcatttttattagctcacagaatgaaatttagcaaggattctaaaaatctggtagaatttatgctcaagtagtaaatagtataaggaaagagaagaaagaaaggttttatagcatttcaagtaaaaataaaagacctgttattttaccacaagatcgatacaagtcattgcattaaggccctcttcagagatacacagtattagtgtcactgcaggtcatgatctcaatgtgctttcttccagtcagatcagctttagaggatttgagatcaaggcaatgagagggtccagaaatcacataacatgacaaagtttgaatgacttaagaaagttcaccccagcagagaaaagcctatggaggaactgatatcactcttcagtgatatcaagcatagccctggaaagaatgtgaaaaagaaacatattctggggacttccctgatggtacagtggataagaatgtgactgccaatgcaggagacacagggttcgtaaccctggtccagaaagattccaagcactgcagagcaactaagcctctacgccgtaactactgagcccgcccctagagcctgtgtccacaagaggagccactgactgcagccagaacctcgtgcaccacaaccagagaggagcccccactcctgcaactagggaaaaccacatgcagcaaggaagaccaagggcaaccaaaaatatataaattataaggggaaaaaaaagaaaacatactctgttcaatctctaaaacctaatttgactaaatggatgatacagaaaggtgtcccatgtcagctcagtttttaaaacttgataaaacatgagctgtgctgcaaagaatgcgggtggtcttaaacttccaaatacacagaatattccaaaaatttcatagaagtccatataaatagaatatattaagaagaggggctttcgactggtagaagttagagccagatgacctacaaggaagtttttagcttcaagattctataagaacataaataagtactattcgacaactctcacttaactcgaaccaagggagtaaaagcactaagaaaatcaagaagtaatatttaaatgaattgccctcttatcaaagaaatgggtccttcaaaatacaactagaacatttaaagacatttaatatatttcagcatacttatctcttaagcaacatacttagagagcaaatattataacattctcaatggtgatactgaattatttatcaatttgtgtttagcattgtgatacagaattaagtggcttcccagttggcgctagcagtaaagaacccgcctgccaatgcaggagactgaacagactcaggttcaatctctgggttgggaagatctcctggaggagggcacaacaatccactcttgtaatcttgcctggagaatcccatggaaaggggacactggcaggctgtggttcatagggttgcacagagtctgatatgactgagcgacttagcaagcacacactgaattatttatcaatttatggtttgcattatttaaaactaccagggaca

SEQ ID NO: 28382 - DNA, 1433 bp, Bovine  19866880696812
  misc_feature (1)..(1): n is a, c, g, or t
naatttgattacacattttctaaagaaatgttctaagaggtcagtaataactatatcactgagccattacttagctcctgaatgaaagcttttacatccttgagatctctccatgatttaatatttggcttctatattgtaatgactggttcttaaacaactctttgggcttaaaaatctaaaaaaaattgaaagtgtaacaatttatataaaataatcctataaacagtatatatgcttttacatttgttttcatttatcaattcctaatagctaaattcaaattctttttgctaaggataatttcaagtacctattcatttttggtcatcatacttctgtggatacaacattacacataaaataagtaacaaaatcttcttgagtatctcctcaatgagaatttatgtctccttataataattttattctcagaaggaaggagagaagtaaaaattagagaagatgtaagaaaaataaatgtattgcagaataggtgggaaggaggaagaacaaagtaaatgagggagaaagtacagtgacttggattctttttttgctttgttttataatttctgtaaagtcaaggcagtattagacataggatagcttattaataaacatatttgcattaactttaaaagtgcaaaagtatccaaatgctcatcttgatgagtaaaaacttagagcaaaattttgtccatataaaaagtcatgattgaagataattttgagtgggcaaagactgttatagacacatgagttgggtgtgagtacacttttgtgtgtgtgtgtgtgtctgtgtgtgtgtgtgtagagagagagattgtgtccatgcatatttaattctcaagaaatggcatttaaagaaagggcatgaaaaattttgagtactgctagcaggtataattcaataaacataggttaaaggttaaagtatgattcatttgtatctctttcatttctttggtaaaggctatttctggttaattgattttcacagctcattgattcatgctcaccagctaaatgtcaccttatttttttcagtgatggtttgcacttgaatggtttatgtcaccatattaagcttagtttgtatcagtgctaattgtaattcctattgaaggtgtaactattccagatttactatgtttacctttccttgaaacattaacacatctctatctttgctgggtcaaccaagctttcctggtcatgattacttggtatcaaattgagtacagaaaaccctctggaggtatacagcttcatcaaatctgaaatatacaagaacttttaaaagaaaactagctaaaaaattctaagatgttttgcatcacctaatgttatgcttaaagtaccatgatttgcatcaatcttggtaacaaggcaaaatttcatctcttggatggtgtaacgactaatataaa

SEQ ID NO: 28383 - DNA, 2603 bp, Bovine  19866880698450
  misc_feature (1)..(1): n is a, c, g, or t
ntgtttaaatgtagtaaaactctatgggaccatagtttgctgttagtagtaataataacttgaataaatcaatctaaaattagatgttatgataaaactcttcattataatattataataaatgtgaaagcgtgtacatgcaaatatttgagaacaaaaattaactcttacatatatagatggaattcaaaggtacacttctcttttgtgtataatattgaataaaggtgaatatgcccacacgaatcatagactagggattctgtgttataacatatcacatggcagtttatcactcaaagataacgttataaaaattaaggttgagtttgactcagttattttcagtatacatttatcccatatttatgatcaaagaaatccgtgtcacagatggtcaaacacagcatgatccccaccctggaggattctatgtgataataaatataacaaaaagaataaaagctagaacagaaggtataagtaatacaaaaaaagagcaaagaaagagaaataaattctgtcctaggtgggaaaatgaagacaagcataatgatgtattagcatgtgagtgaccctaacaagatgagtcatttttagataatgaggtggaaaactttgatgagaaaaaaaaaaaagcatttcttcctgaggtaagaatgtagcttttggctgtatgagaaaatttaattgaatagggaaagtaagaatctgaactgaagtacttatagtgtctctgtatcgaatcaataaaaagtttactagctactttggtaagtaaagtaaagtgcttataacaaagtataaaattactctcaagtccttgcatgcattctatttcattgctattctttctataaactcttcttttccgtgtggcccaaggccgtggtctcctaactggcctaaagaacccttgccccctgtaatggaggcatggagttttaaccactgaatcgccagggagattctaacaaattttccctccacccaaagtctacagtggcttcctaggttgcgcagtggtaaagaatcctcctgccaacacagaggatgcaagagatgcaggtttgatccctgagttgggaatatccctggagcaggaaatgacaacctactccagtattcttgcctggaaaattccacggacagaggagcatggagagctatagtccacggggccacaaagagtgggacatgactgaacatgcatacacaaggtctgcagtgcacagtgatctgctggaaattagaaaaatgaaacaagacatttacttcccttgtctgctgaactttgaagagatcattatccaggtcatacagttaccatagtccaggcaatggttccatttcatttcctgacatctgtgcgtgcccctccccataaccctgaacgaccaccaacacagacatatgttgtcagaatgtttgccatttccagatttcctttgtattcctttgttgttgtttctggatcctctgctgtaagtgccattcctctccttttctatctggtaatttcttactcaggtatgtcatcaaaaccattagctgcaagcttcctcctctttattccaatagaaccttatatctctatgatagtatttaccctgttttaaattcttcaaggatggaataggattcaatttatttaatatctttgcctctcacttgatagacccacagtaggtgctgtcttctgcccataaagagagctttttttaatgctctccactccttatcactccttgagaaaagaaaaccatgagaaccattaagtgactaaacataatttaacacaagctaagttacaaaaaggtagtaaaatgtcgtcttaaaagaactttgactttatcaatcattttaaagacatgtttataggcatagatattaatgaaagatttcagaattgattgaggaaactaaatggcactataaaaatagttcaccagcttaatttttaaacattccttgtatatgaatttctgctgtataattagctatattacctggaattggaattagggatggtgatgctatacttttccaaattcatcagattgttatgtacttctctttcctcactactctggtggcattattcttatatacatgaatattgttagtggattgacgcttgtgatcaagaaatatattttatggaaggaaagggatttgactttcaagtaacaagctacaaagtatctagactctacatagatctattatttcatcaatttcaatttataaaacatgctcattattgaatttttatatccgggcaaagttttatagtctttagagggattacattaagctgttgagcctattcatatatatagccaatagggatatctctagctacatacaattttatacttatttgaataaaataaaaattctgcaatttataatacccaaaatgacaatgttggagtttgaataattaaacaaatggatgttatactaagtcataaatgtaaatgtttaaaatatataacaagaaaatcatgattaatgtttaatttaccaaagatttttaattggatgtgtaaacaaatacagaagattgtaagccataaagtccaacaaggtcactttaa

SEQ ID NO: 28384 - DNA, 1831 bp, Bovine  19866880704118
  misc_feature (1)..(1): n is a, c, g, or t
nagactttactttcactttcatgcattggagaaggaaatggcaacccactccagtgttcttgcctggagaatcccagggacgggggagcctggttggctgccgtctatgaggtcacacagagtcgaacacgactgaagcgacttagcagcagcagcagcaacagcagccatcccaaagagtaaatcatttggaattgttccaggctaagtcagcagagtgtcacggacatttaacataaaaaacacttcttgaccctgaggatataaatcaggaaactattagctgaggcataccaatcgactctgtgaagccctaaacagagcttcacataatatcctcaacaataaggaggaaaaccaattgatcttataattaatttgaccaatacagaatgtacatttaggtcaaagagtaaatattgggtttgacactgaccaacttagctatgtacatggatcaaattaaacaagtaattgcttgcatgtggccagatcagactatggacttgaacctattaatctgactatatttggaagttcagctattaaatctgggtaaactatttacctcaatgtatggctgaacttctggaacttgctctgttggaagttgtaagtgaacataaaaagtacacccaagtaaaataggcaacttacatacatagagtacaaattctgtgcaactgtggttagggaggaaaaaaaaatacaatttctatgtcactggaaaatctaattatttaataatccaagccaatgttaagtttctaccttaaatattaaatgagaagtcaaagaactggagccattttactagttaacatttacttatattgagtaaccttgagtttgaaattaaatattagaacagttactgaaaactgtctcaaatatgtttgccctgtacaatgtaaaactgtaactaaagaatgcggaataatttttttgagttcaccatacattaaagatttttaaaaaatacaaacaaagccaaattcttgcagaaataatgtgaccttgcagtaatatatgaaactagaaatctttaggataaaatcccacatagctaagcaccaaagtttgaggacttagaagtaagagagtttcattaatggagaatataaacagcatccttaatttgaatgacataagacagcatatttctgacaatcaagtagccaaagaagaatctatctgcttccaataaagctaaaagaaactactttccttctcattcagtcaaaggcaggtcaaagcaacattaatcgtaagacatatatgaacatttcatttgatttagatggtttaagtggtgagttgacagcaggaagatctaacagatagtcactagagtctctttcattcctggttatttttcctcctacaaattcattatagcatatacttagaatgattatttatgtcctaaaacagaatatattatctgcctatattaatttatcatatttgtttcccttatgaaatcatacatttttacaagtaacgtgaaaagttgcttcccttccagaaatttcaccattttgaagtttatggtgattggagaattttggaaatttttggtataatctgtggattactaaacacagtggagttgtaagaaattctaagaataaattgcatgcattaaaaatagaaaagaatacaccttaatcaccctgtgatttaatggctttatctggagatatttcaatgaggtgctgacaaaatcatcacatgaaaaaaaaatttaagtaacttaagtaccaaaacaaagtaattgggtctgaaatatcaaaatcttatattctcacaaatttccataatcaaatct

SEQ ID NO: 28385 - DNA, 999 bp, Bovine  19866880717567
  misc_feature (1)..(1): n is a, c, g, or t
ntagattataattgagcataaggaaagttttatgtaaaaattcagagaatgactgatttgatgttgagctttttaattggcttttcatggctgctggcctgtccaaaataactttatgttctttcctggtaaatataggaaagtatgtaataaaccttttcacatgaggtgtggatgcaaagagaacatacttatgaaagattgattgagaattcctatgacaaggaactgaaattttcttcctgccttggagggtgcttggctatgaatacaggatttcttgttattaactttagttaaaagaggaaacttttggtcaaaccttatgattcagtgataaaagtcttgataattgtaaactcatggaaacttgaaagtcactttgtcaggattaagagactggcttgacatttcaaaatcttaattggaagtgagattagttagatggtgcaggtttattccaagtcaggtaaataggaaagacagtcttataaaccctccataatgacacttttcctatacagaatagatgtgggaagagagagaaagggaaggagagagagggagaatatgaatgaatgaatgagtgagtgtgtaaggagataatttgattcctgtaatggggcaagggaaagtctagatttattgacaggaatgataagtgaaaataagtaattatttaattaagtgtgagagaggaaaccaaaataaggcctctcctttaaaaacatgtttaattcaaatggctataactagtatctaaaaaaaaattaagcaaattattttagttaaaataggaaactggaaccgaaaacaatagaatatatttgagaaataggtctgaattttgatatgaagttcttttaggagaatatcagaatatattcaacagaaattcatgttccgaatcaggtatcccagtaaaaggatctttggcttctaggaagatttgagccagacataaatatcaaccaaatatcacacatgtcatccttcaaa

SEQ ID NO: 28386 - DNA, 1221 bp, Bovine  19866880776189
  misc_feature (1)..(1): n is a, c, g, or t
ntaggtaaacactgcagccctgtgttgtacatttaacttctttacatttctattatatatactgtatctatgtacatagatatgtaaacatgcagacatatatataaaacatatttgaaaggcatctatgtttatttatcttatgctttctcttctgtattaataacttttagaggtcaggacttgtatctaacttaatttgatctaatatgttcttttgctgatttttatgttggttttgattaaaatatgcagtatattatttataaagggaaattatctcagtttggagataatgattttcaatatgtagcactaagaattcatattgacgccaaggaagcaaactcaataaaatatcagtttagttcagtgttggctgcaagaatattaaaatgttctgtttcagtaactattagaaaatatcaagattctattctttcctttattcagcaagcattttaatgcctactctggacatgctcttactaagtgttaaggatacaaagatgaatgaggcataggttctgccttgaagacatatgctatagtgtaatttgtctctctcacaatacacacacacacacacacacacacacgtgcttatattacagtgtgaatggaataaagggaataacaataaagttatgccagggaattgtaggagacttggagagggacagctgatctagctgggagtctcagagacagctgcttatagtgagttttgaataaaatatataagaaggaatatgaactcttaaatgaggatggagaatgggaagatcattatagatgatggggataacaaaagcaaaagtctagagcattttagcagtaatacaaatattagatatcataagttcagtaggagaaggcaatggcaccccactccagtacccttgcctgggaaatcccgtagacggaggagcctggtgggctgcagtccatggggtcgcgaagagtcggacacgactgagcgacttcactttcacttttcactttcatgcattggaaaaggaaatggcaacccactccagtgttcttgcctggagaatcccagggacggggggggagcctggtgggctcccgtctatggggtcacacagagtcgggcacaactcaagcaacttagcagcagcagcagcagcagttactgtgctaatggttttacatggattctctagtttttgtcttaccataactctatagagatttgca

SEQ ID NO: 28387 - DNA, 2691 bp, Bovine  19866880805054
  misc_feature (1)..(1): n is a, c, g, or t
nagaatgatttccacacctaaatgtgaatacaaataaaatgactggagataattctcaacttcttttttaaaatatgcaacccactatgccaaatatgacaccagcatttcacaactcaaaaagtgcattagacctttcaggacaagatgatgtacttccaaactcataggcagcaatcttttcaaacatcagctctgcggctacctcatgaaggcttacatcatcctgatttcctgcagtctgaacactgtcattgcaggactgttctgaaagtagcctgaggtgccaaagcgaagaaagacatgctaggcctttgctatgtttggagagaatgaggttaatgttttccctcagcaatgaagatctgcaggctcgtgacattgatacagagactgccagggagaggaaagcagtgctgggaattacttctccccttttccctctgtgaacagtgaaaggaatctgtctgaaggggtaagacgatttagcttggaaataggatataagattaaatttcttactcttttactcccctttgcagattaaaacccatctactacctctaaggcaacagcttgtctttgagattcaattctttattttctctggggaaacgcaaacactaacttgatctttatttagcagtaatctctaaaatgcagcacagctacacgattacaatgactttgtaacagctttctaaggttccctcagcacctacagacaatactataaatgctgatatcaaactggtcaggttactctcatatccctttatttgttcacacagtagctcattcagttcagtccgtctttagaattttcgttcagcaagaatcaactacctgtcagaaatgtaggtatctgggaaaagtgtataggtaatgtatggtccataacttttcagagtttagtgcagggaaaaggtaaccatgtgaacaaaaaatggtaacatgactcacaagtagaatgtttagagtatgaaaaaatagagcctaaggcacagatttctaaatccttaaattccatccttcatagttcacttatgttacataaatgtatgcatacaatttttatattttatatgtgtgtgtgtatatatatatatatatatgacaaagtgaaaaaaatgcaaatagtttctacttgcactttactgactagtatgttttttgagtaaaatcttaagataggttcaggtggtgaacattggaaactatagagaccatctctcgtgtggggttagtgtttccattaggccaaagaaacaaagtaagctttggtttattgtaaaaaaaattacacttggactttagccctttgtatttcaacacacgataaaaaaacatctgtgcagaaagaacataccatgtagaaataaaatgcaaagctaagagagccgagaagctttgctctttcctcgcacagtgctggcttccagtcactgccctggactacaggacagaaggatggagaaccagccccagtcttgtgtacttaggcttcatagaaggaagggtttaggtgacacagagtcaggagagcaagaggccaggagtggggataggggttgcttgaatggctatgcccatttcaccagccttctaggaacaagaaaacacaagtcatttaagataccatttggaaggccaagcatggcacttgcacagttcacactcctacatactctggagtagaatgagatagggagagaggcgagagagagagaaagagagagagataacagaaaaagataagttcccctaaaagcccacaggttataacagagagatttgcaaatcactgtgatgatagagcagaaaggaattataaattaactttgtgcatggggatcaagaagatttcaacaaggaaggggtatttcataatcaaccttcctaatacttctaaagatctcctgaaacagctctcattatctcaacaattggattctgttaactagaaacatccctatgaacctacttagtagttggtttatcagttcatttcagttcagtagttagttgtgtctgactgtttgcgacccccatggactgcagtatgccaggcttccctgtccatcagcaactcctagagcttactcaaactcatacccattgagttggtgatgccatccaatcatctcatccttttcatccccttttcttaccaccttcaatctttcccagtatcagggtcttttacaatgagtcagttcttcgcatactgtagtgtataataactttgattctaaatgtgattttgcccctcctaccatcttgctgaggcttctcctttgctcttggacttgggtatcttttttggtgggatccaacattctcctgtcaacggttgttcagcagccagttgtaattttggagttcttgcagaagttaagcacacgtttctactcccccatcttgtgtctctgaagggcttttcccccagtctctataataacttttgtactactttaagatacgctaattttgcaaacagctttactattaataaataactaaagccacagcaatttgaactggaaagtagtgaataatgtcacatagctgaaatgtgctctttccttgaatcaatattttatttatttgcatcttaattaatctccacactattgcttaagaataggtatgtatactgctacatagagtcctaatagttacacaaaactg

SEQ ID NO: 28388 - DNA, 1669 bp, Bovine  19866880815633
  misc_feature (1)..(1): n is a, c, g, or t
ntcggggcggcggccgagaagagctaccccaggtccgaggtcaaacaaagatatatgatattgtctgcacaaatgttttaaacaaatcttacctgttgcttacacagattaggctcaaaaataacacaaagtggaaaaagaaaaagcaaaatgaacacattgttttaagtcttcgatgaagtaaaatggataaaaagcgatttccattttttgaaaattgtgaatttacttaaatgccccattcattgtttccttgtatccaaaatgtaagtcttgttaaattgaaatatatgcaatgacagcatcaatatttagtgtaagcaccaaatcacatttcctttaatgaagaaaggacatggggaaaaaagagttaatgagacagggaaaagaaattaagcttcaggctgtcccaaattatctaaatcagattcttaattaaaaatttatttagagccactcagtctactttcaaagtgaatgtcaaataaagctaaataatattagtacaaaggcatcatcttttaacagagcttgggtatactctgttaaatttctgtaacatttaagttgatagccttccaaagcttccatatcagagattaaagtatgatatgatgtgacaagagtgtagaacatatagtaaaataaagggtgggtggagaagactttgataaactttatctctactagaatgtctttggaaatcttttttccgaaaaattattagactaaagacaaccttatatagtttcttgaaatcaagacaggtacccctttgtcctctccctgcaagacctatcagagatctaatacataataaaggtcagtaaaatatattgtattgaactgacacagggaaatgagctagctggtgtgagaaatcattaccatcttcctcagtagcctaaaccagaattctgcatggggagttatactgcccccaaaggaaaaggccatattaacataatttccacacttacattctctggttaaaatcttttctgagcagaacttgttcccaaattaagcactttcattatcaaaggagaagttcttaaagtctgcttcccttatttatcagttcagtaagtcgctcagtcatgtctgactctttgtgatcccatggactggagcacaccagccttcctagtccataaccgactcccagagcttgctcagcctcgtgtccatcaagtcagtgatgccatccaaacatctcatcctctgtcattcccttcttctatctttaatctttcctagcatcagtctcttccaatgagtccattctttgcatcaggtggccaaagtattggagtttcagcttcaacatcagtccttccaatgaatattcaggactgatttcctttaggatggactggttggatctctttggagtccaatggactcttgagagtcttctccagcaccacagttcaaaaacattaattttttggtgctcagctttctttataagtccaactctcacatccacacatgactactggaaaaaaccacagttttgactagacggatgtttgttgacaaagtaatgtctctgctttaatatgctgtctaggttggttccttatttatactggccattatttttaggaaaagacaagggaaacaatgagaagaaaatttaccttgccatttatacaaaatagat

SEQ ID NO: 28389 - DNA, 1135 bp, Bovine  19866880820801
  misc_feature (1)..(1): n is a, c, g, or t
naaccctttccaatggatcaaataaagctctcctgtccacatgcacttatatatccttcttcatgatcaatttcttggcatgggtattagtaaaggtctcagtcaaaacagacatggagacatagttttaaacttgaaataacagaattgtcccttagaacaaagagaacagaaagctaatctattagccagtaggttgtccatgattactccacatttcatgaaatcttttatgctctacattctttttggtaattattttgaatctttttatttttattcatttacacttattttacatgttttatatattgtactgagccaggtaaaattatggaagtatggaaatacctttgtagtatacatctgtattttccaatatgagatttttattccaaccaattcagcatgtatattagcagctcagtgtgtatcagaaaatattgttggagattggaatacagcaaatgacaaaatggatgaagacctgcttccaaaacaataaatataaaaagagttatgcattgtgtcagaaactgaattgaaaagagaaacatgtatttgctccttttcactctggagtttttaatatctgtagaaaacttatggatattatgaattcatagagtaaaatgcaaatccatatggcaactgtgacctgcgtgctgggattgcagactaccaggctgtattgggaattaaggcctggcagatgatggatggcgacggtgctgtttcacttaatgaagccgctattgaagcttaaaaggggaaagatgacaagagggaactgagtgctttagtctttgtaaaaagtaaaagctttgcaagattataccaagaagaactcaactcactactttttgaacttcattaatcttttctataaaaatctatctcactgtcaagtggctcaatagctactttgggaaaatgctttgcttctttgtaatggaaccagtgccttaattgtcctgaggccccaaggatgttccacctcacagaaacactaaagaggtgtgcaatgctctggagaagccagtgtgaagatgccaaaatggtccagtcagcccagtcaaaacttatgacccatggggcaacttttctgtattaatttgtttctagaacaataaca

SEQ ID NO: 28390 - DNA, 742 bp, Bovine  19866880844549
  misc_feature (1)..(1): n is a, c, g, or t
ntttgtgagtaagactgagtgaatgactctaataccatcaatgattattaccctgtgtaaagcatcacagtcatatgtattatactatattctatttcacaataatgagggtctatattttccctaattattctgccacatttttaagccgcagtaaaaggaaaatattatatcagtaaatggggcttattttcacacagaagaaaacatgattcttaaaagcaatttataggcaatgctctcagtatatctaaccaatgttttgatttacaaaagtacaaggcgctttcaggtttacactattttacatatctcaagtgtttctgatgaacaatgattctaccagtgtctatgtaatatccttttaaacatatgttaggggtataatattgtgcaaaatagtgtttttagaattactattaataatcatactaattacaatgatttataatacagttacataagactgcaattgaagacaatttaactgtgagaaattcatattttaaagttaacttgctttattttctatgtcaataaaatatggacctttgaaaaatgtgaattaatttatatacttatttatttctgtataatttgtgtttaaaataccttactcatttaattcttttttttttttttttttttttagaaagcaaattaaatacaggctggcaattttgtgcactgttttgttctaatgtgaattcaaaccattgagtcataaactcctgaaaaactg

SEQ ID NO: 28391 - DNA, 1579 bp, Bovine  19866880850958
  misc_feature (1)..(1): n is a, c, g, or t
ngacttgtggtcattgaaactatttatctatgatatagaatttccattacagtgtattaagattttatatttataaagaaagagcttactatttgctcttatccttaaagcagctactctcagcagtgtaattatagtttgtatgatattaatggcatacctctgggagcacacattatttcatggctttataaaaaaatgttataattatataatcaccagggatggcattctatctgctcagggagcatataacatctcagtagttttccattagagtatcactgatttggagttggcatatagaattaggcgccctccctcagttcaaggttaacacataggaattacagaattcatactcccattgagacgaatttgtcctttcttataacttttcctcatctaaatgagttatttgatatatagcagctcttacctctaaaatgtaacattttaaaagctccttactataataatttaaaaaacaaaaacaagttctccaagtacctaagtacaaattaattatgcagattttctcaagcaataagaaatattttcatttattataagaaaattttcatggaggatttagaaatattatcaagtatgtttctcaaaattataaataactatataaattgataaagctatggcttctgctgtatgaatttcttattagaagacacatgtgagcttccatacacaatgaagcaaagaagatgttgtttagatggataaggtttaagaagaatgattaaatttatcaggatactgacttgaagaattctttatttctttcaaaaatatggctcaatattattcatttgaatatattttagatacatgctgctgctaagtcgcatcagtcatgtccgactctgtgtgaccccatagacggcagcccaccaggctcccccatccctgggattctccaggcaagaacactggagtggggtgccattgccttctcctttggatacatatataagctaaagagtattgcagtttacaaaatttatatctaatatataaaatgttatgagttctgtctacaatatatttaaagttaccaaagcaaaataaaaattcccttaaagtatatgtgcctatatcaaataagcatctccttagtcacatgatttttatgtgtatggacacatttctgcaatggaagtcatatgcaaagggacacaagattatctaaaagaaacctcagggaatggcgagtggctgagctatatcttttctgttagaactgagagtgaaaccacttctaaatcaaccaatacactctaactttttaatttaaactttttattactttaaaaaagcaataataaactcattatctgctcacataaataacatctttatcattaaaaataactatactttctcaaataaattaaaagagtggctcttggtttttcattctggcaaatctctttactgactagattaacagaagagagctggattttcctgtctgcttttgtttccaatctgttaatatgttctcttggttgaaatatatgaagacaattctgcctaaaaaaaggtatttatttgggaaaag

SEQ ID NO: 28392 - DNA, 1623 bp, Bovine  19866880856770
  misc_feature (1)..(1): n is a, c, g, or t
ncttattttgcttctttacaaggaaaaaaattacaaagctgagaagtattgacagggctgaagaggagtaattatattactaaagatagtaatatcttatgtctgtgttgtggggacaagtctggtgttataaatctcaagagcctgcagcagttttactccttactattatcattctaaggaacgataaggaacggccctcatttgggacatgtctgtgttataaataatggcaaagagaatatgccaggccataggctgcctcttaagtctgttaggtaacagacacacatggcctctgcccacctttcattggccattgcaagtcacatcaccactcctgagctcaacagagctgtgctatatacacatcccacaggaacaggtcccatagaatgtgacaagaaatagtgaggagattgtaatctaccacagtggcactgacttatttgaatcatgcttacatactttgtagctgctaacctgctggcattttctaaggctggaccaacctatatataaagtagtacacagcacaactaatggattccttgggttaggagatctcttagtctatttaaatcagtgcctaggcagaaaaccattgtgaagaagagcggaagttttcctgatcagggctcagtggaggaaaggatgggagacgtgttcttctggatttttctcagcaagtggattgtaagattccatgaaatcagtttcttctaaggaaaataaaaatagcatactctaaaaggttgggagacaggtaatctgagttgcatccagctgtatatatctcatgaagggagagaattagttggacctaaaataaacttttattcactatcttatcttctgctttcattagaagatacatatagtatcataatgtatcaatttgcacatttcttccatgaaatgtttgctcctaaaaacaaagccttggtagtcagtcagaattcatgaaatgaagaagtgaatgaatgaatgaaatgactaacttgaagccaggtgactttatttgatcaaggttgtcctaaaagcaagtgatatgccaatggttctaataatttaatttttgcttttgatgcttcacttcatagaatctttctaagattttttttatagaatgcaagattctttaacttctgtggtactttacaattttcaaaaatttcatacatggatttcatataattttataatacacctttttaccctatccctgtgctgcccctcctgccttccttctcttcacttgtaaccactagtttgctctctgtatctgtgagtctgcttctgtctttggtttattcactagtttgtagtattttttagatttcacatgtaagtgattatggtatttgtctttctctgtctctacacttagtataatgcctttcaagtctatccacattgctgcaaatggaaaaatgcatatatatctatatatatatagatatgccacatgttctttattcactcatgtgttgatggacacttaggttgtctctgtatcttggcaattgccgatagtgctgttatgtatgtcgggctgcatgtatcttttagaattcatgtttttggtatttttggatgtataccaaggtgtaaaattgctgg

SEQ ID NO: 28393 - DNA, 902 bp, Bovine  19866880906737
  misc_feature (1)..(1): n is a, c, g, or t
naatctgcctgcaatgcgggagtcctggatttgaacctgagttgggaagatcccctggagaagggaaaggctacccactccagattctggcctggagaattctacggactgtatagcctatggggtcacaaagagtcggacacaactgagcaactttcacctcatgttttaataagatatctataatgctaagaaattttatgtaacagtagaaattttattataaatctttggccttttaaatcacatctaatcaaaattttaaatctatagtgctatgtaaaatagctgttgcaatttcatgctctcaagcaggaaactgtcttcattataccttacagaagttgcttgcagacatcggtattttcttgaccacattatttcatggccatcaatcaaataagcaattcacttctctagatcttggaacatttcagttccccactatacttatgagactctactaaaaagtaagatatacacgcagatagaaaattatatattatacatagtaactaaattatgacataatgtgcgatttagaaagaaagtcttaaggtaggtgaatttcttgaagtacgttatagataagccacatcaaaatttgctagcatctctctactaaaacattgttataaatacacacatatatatgcatatacacatatgtatataaatgtgcttagaaagaagcctgttcccttcccacagctttcctatcccatcatgctataagcatcctatagagtaattagtatttttcgtaatgatttaagaagaaattttagcaaaagaaacatgtcctctgcaaaagaaagcaaatatatatttgaaccacaatgagatcattggggatttaacagtaaagaaggagtaatccttcttttcaaggaatttaaagt

SEQ ID NO: 28394 - DNA, 1307 bp, Bovine  19866880923746
  misc_feature (1)..(1): n is a, c, g, or t
ncaagagtattggagtggggtgccattgccttctccatctttaccactgagccgcctggtattgaaatttaattgagcatgagtgaatatgaatcttgaaaatgagaactcatccccactgcaagcatctacaaacatcactctgtgtgaacaggcatgttcaataatatattaagtacgattaaaaataagaacaaagttgggcacattttgtagagaggattctaaaggataaactgattaaaacctgtatcaaaatcatctgaggttctcattaaaatgcaaattcctcagccctgaactacagtactgaatcagaatttctagcagtaggagtattaattatatattttattataaatcttagtttaggtaataattagacactgaaaattgagaatcagatgttttaggccttacacaactacaaaaggactactagagataagcttgacatttctcatgctttatcaaaaatacatttgttcctttgatttttacatgttttcctaaatgcatgtaaaacttcctgagttaaaattttcaaccacaagcaattctatagagaaaaccccaaagagttaaattaattctgatgagtttgaggttaaatctaattctattatactctattaagaactgtatggcagaagtatatgcatttatatccttgttgaataacatctttattaatcaaacagctctaatttattgatgcaaactcttagtaaccagttattaatccatgggctactgttgtggttttctccaaggaatcctttgatggatgggctgtcaaaatgtggatgggagagcccagatctgcaaatggagaagaatatagagtgctgtctcaaggcgatcatagaagcagctgtatccatggcatcagtttcacagaggaccagtaacaagaacaacaacaacaaaatgcaataatatagcacacattagatatctgccttattattattaatgagttctcgcttaagtatcccttttgatcttttcagtgatcctgtgcttttatggataagcaaaacagaggcttacagagagaaagttacttgttcacatattttcatattacacaaaaatgagggttttagaaaattttcatttactcacttttttcctggtaatatatatctaaaagtatagaagaaatgctgtctatccttaagttagctacaagtagaaacataaatatataaacaggcaattttaatgtggttttacaaatgttctaaggggctaattatgggctgcatggagagtatataagagatacttaattcacctttggg

SEQ ID NO: 28395 - DNA, 700 bp, Bovine  19866881005793
  misc_feature (1)..(1): n is a, c, g, or t
nattataaagtagtagctatgcttatatttatattctgtaaaaacatataagaatttgtcatgttaaaagaaaaaatgccagcataataaattatcttgtggttcttcagaagtaagtgaaagaacccacagaacccaagagccatgctgatatttgcctgcatttaagtaccacattctgagattttagaatacctagattttataccattctttctagccacaggcatttctttgcttttttttttttttttttcttcttttaaaatgtcttttgtatcccattctcctgctttattttagtaactttactccattataagcaatacctgctgcagtgttattaggaaagtataaagtagtaaacaagttaataccagaggcaattatcttccaccaaattaaaacaagaataaaataatgataaaatagtaaaacaataataaaaaaataatgaaataataatttaaagtatcagagaaaggcaaatatccacttgtggaatcatgttaaaatgttcctaactttaagccaattattacagcttatcaaaactgatttttcagcacttcctaatgtgagacataaggcagtttgccaaatatattttattcatgcttaaaaatcaatgatacatttacaaagcaagtttgaggggactgattatgtggagtaagaaaaagtagatgtggctgacatt

SEQ ID NO: 28396 - DNA, 2528 bp, Bovine  19866881058283
  misc_feature (1)..(1): n is a, c, g, or t
nctttagagaccttgggaaatcccaggattattagaggcgattatctgttaagatagtagaaaggacggagaagaggaagcaaacatgcttgtctagactatgagtattagaataacacagtaaacacgattatgctataatgaggttattaacatgggaaagctgaaaacatttctaaaggagaaatcagacaggatcatgtgcacagaaatgaatataagaagtctcagtttggctttgctgaggtagtatgggtcaatagggcacttatgataggttttcattttttcacttttcattttttcactcattaatttacaattatgataggttttcattttttcactcattaatttacaaaatgattactgaatggataaatggctttacacaaggcccatggtgtttacttgcattcgtgagtaaagactgtataatgttaatgttgcaagattaatataaagggtgtagagagatttgtgagtcaattcaaatgttgcaaaatcttaaactctccaagtgtgcgtgcccccctgggaaaaagactaggatttcctgccagatacttaattgtgccctcagaattggaagcaggaattttgaagttatttaacttacaccagcttctattatgctgatttaagactaaacagtcatagcattcaaatacaagctagtgccctaaaaataaaataaaaaaacattcccagaaagtaaggtaagaattcagaaactaattaaaattctggggactcaaagtgggtaagtctcatgcctgggtacattttatgacttaggtttggaatctaaaaatctcagtttccattctggatgtctaaactttaaaacttattccccaaatcatagtttatagatataattttaaggttttcttcaagtgatagcttgaatttgtacagaagagcagataaacatttagggaaatatttaggaagtatcccaaattctgggaatttatcctataaaactaatgctaataccaatggtaagtaacaaaagataaatgccctttagcctaaaacatagttcaagataaattataagtatacctcattaagttagaatgaccaaagaagagttcagaaataaatgaagtgttaggtattttttaaaaaatgcaagttctaagtcatactagactggtgaggtcctcaaagacaggttatagtatgtaacagctttgctatcctaatgttgaatacactcccaagaaaatactattatttatctcttagcataatttgcggagaaggcaatggcaacccactccagtactcttgcctggaaaatcccatggatggaggagcctggtaggctgcagtccatggggtccctaagagtcggacatgactgaagtgacttagctgcagcagcagcataatttgaaatcctaggctagctaaaccgaagcaatttgttggcaagaaagcatctcttatattttaagaatactcatcaggatattggctggtcccagtaatattagagggctttccaggtggcacagtgcaaagaatccacctgccaatgcaggagacacaggagatgtgggtttgacccttgggtcagaaatatcccctggattaggaaatggcaacccacttcaatattcttgcctggagaaaccacggacagacgagtctggtggctatatatagtccatggggttgcagagttggacacgactgagcacacacgcatatgcacagtattatcagaataattaagagctatactaaacttgtcaagctaaatgaataaagtacatcctcagatgaagtacccatgacttttattatatttgttcatatacttagtaatttgcaaaaattcagcaattgtctccctgtcattagtttgaattaacaaagccctactggaatagcagttaggatggtaattatggaaaatgaagttacatttctaaataaatggaggttatattcatatttagtaaagcctgaagactaagcttcaaagtaaaagcattttagaaaatattttaaaagctagtatggtactgaaacaaaaactgaaaaagcaatgtaatttttacatgttttattatttactatcaggctcaactcctgtttctcagctcctactgtcttattgttttagtacattttgttagttccctctgagtttgcccttctggacattagctgacactttaatttttataatttcaaaaatattgattttcaacaatttttaaattaaatttctatattttttctatttcagggctcttgatacaacaatatctttttcttttttgggggcttaccaagaatatcagtgtctgcttcctgttgatatgtctcagaatgttgaattggtataatctggcatatgataatttttatgtaaaaataatgtcagcttaaaaaaatctctatatatcttaagctgtttgtccatgtaaagatacataaacatacatatacagattactacctaccaagagaaagtcattagtattttaaatatttattactcaaca

SEQ ID NO: 28397 - DNA, 1582 bp, Bovine  19866881190628
  misc_feature (1)..(1): n is a, c, g, or t
naaagctaactttaaaaaatcgattgcaatatatttctgttctctgggtatatgagatttccaatcagaaatgagtatttaacattatctgaaactctaaacaagaactctattttttttaataacatcccaaaatgaagtgatagattttgaagagttcccactcaaaggaagttgccagaaagatggtttcaaggaaggtagcagtagatataattcttgcattcattcagccctctggctgccatatactacatattcacagtaaggcagaaagaaagaatgtagtgtttaaaaaattaaattctatgtttcaaatgattactctagcagtcttttcctagtggtctttcagaaatgttctaaaaggaagccatggtggtggatgttatctaaactcactgtggtgatcattttacaatgtatacaaatattgactcattatgctatacacctcaaatatgttacatgtcaattaaacctcaataaaaaataaattaaaaaataaaaggaagctgaagtaaaaataaatatgaaaaaacacagatgcctcaagttccacaactgcctattttatctgttttgtcaattgctttaaaaattgttcccaatggtctataaaatcagtgatccaaactatagaaagcttgtgtgccacaggaattgtatatgtgttatgccaactttgtggcatccagcaatactaacaccaaacctaactagatgaatccagttttatcctcttccaaatacatactttcaggttgtaagttaccgtctatgatttatttttttcttccagtagtctcttccaagctcaaactgtttttgcccttctgtttccagagaatggcagtaattaactattaggtgaaatataggatattgataaaatactaaacattgataaaatattagaaataagacgtatatatgatttgcatgtgatgaagtgggaaaacatgaaagagatgtttctgtcaagaagttttcaaatcagcccaagtatgtattaattaacttttcattttacttgtcattatatttataatgtaaaaatattataatcactgtcagcaccaagatgaatcccaagaaaaatggctactaaatgtaatgtggtaacctaaatgggatcctggaacggaaaagagcattaggtaaaaacgaaggaaaactgaataaattatgagctttagttaataacaatgtatgaatagctattttattaattttaacaaatatacaacactaatgaaagatactaataataagggaaattgtggaatatatgtgggaactctctatatgctgcttttcttatgtcaatgtaaagtggttctaaaataaaaagtgcattttaaacatatattaaaatattatgttatctagagataggcattcaaaaagaatctcttgtttagggttggattctcaattcaatttaaaagtgtcacaaatattgaacattttagttcttttggcaacctggagaggttgtatagcttgttgatgttcaaatggcaccttaattttatgtcgtttactgaacgacaggcaggttggcaggttcacccaacat

SEQ ID NO: 28398 - DNA, 4318 bp, Bovine  19866881255085
  misc_feature (1)..(1): n is a, c, g, or t
naaaaagtagggcaaaccactagacaattcaggtgtgatctaaatcaaatcccttatgattatacagtgggaagtgacaaatagattcaagggtttagatctgatagagagagtacctgaataactatggacagaggttcctgacattgtacaggaggcagggatcaaaatcatccttaagaaaaagaaatgtaaaaaggtaaaatggttgtctgaggaggccttacaaatagctgagaaaagggagaagctaaaggcaaaggagaaaaggaaagatatacccatttgaatgcacagtttcaaagaattgcaaggagagataagaaagccttccttagtgatcaatgcaaagaaatagtggaaaataatagaatgagagaaactgtatacatgcagcaaaaacaagacctggaaatgaccgtggcccagaacaccagctccttattgcaaaattcttgcttaaattgaagaaagcagggaaaaccactaggctattcagatatcccttatacttatacattggaggtgatgaatagattcatggtgttagatctggtacacagaatgtctgaagaaccatggacagaggtttgtaacactgtaaccaaaaccatcccaaagaaaaagaaatgcaatatgtcaaggtagttttctgaggaggctttacaagtagctgaggaaagaaaagaagcaaaaagcaatggagaaagaaaaagatatacccaaattaatgcaaagttccagaagtagcaggaaagatgagaaagccttcttaaataaacaaggcagagaagtatagggaaacaacagaaagggaaagactagagatcttatcaagaaaattggagatatcaagtgaacatttcatgcaagaatgtgcaggatagaggacagaaatgaaaagacctaagagaagcagaagagattaagaagaggtaagaatacacagaagaactatacaaaaaagtcttaatgaactggataaccacaatgccatggtcactcacctagagcaggacgtcctggagtgtgatgtcaagttggctttaggaatcattactacaaataaagctgacagaattctagctgagctatgagctatttcaaatcctaagacatgatgctgttaagtgatgaactcaatataacagcaaatttggaaaattcagcagtggtcacaggactggaaaaggtcagttttccttccaatcccaaagaagggttcaagtgccaaagaatattcaaattgaggctaaaataagtactcatttcctatgatagtaaggttatgctcaaaattcttcaagctaggcttcatcagtatatgaaccaagaaattcttgaggtacaatctggatttagaaaaggcagaggaagaagaggtcaaattgccaacattcgttggaccatggagtgaaaagtgaagtcgctcagtcgtgtccgactctttgtgaccacatggactgtacaggctcttccgtccgggattttccaggcaagaatactggagtgggttgccatttccttctccaagggatcttcctgacccagggattgaacctgggtctcccacattcaaggcagatgctttaccatctgagccacccaggaagccaggaatcatggagtaagcaagggaattacagaaaaacatctacttctgcttcattgactacgctaattgctatgactgagtggatcacaacaaactgtggaaaatacttaaaatgttaggcatcccagaccaccttacatgtcccctgagaaacctgtatgtgggtcaagaagcaacagtgaaaacaaatatggaacaatggtcttgttcaaaattgggaaaggctgtatattgttaccatgcttatttcacttagatacagagtacatcatgcaaaatgctagacttgattaatcacaatctggaatcaaaattgaggacagaaatatcaacagtctcagatatgcagatcatataactctaatgacaaagagtgaagaggaagggtctattgatgagggtgaaagagaggagtgaaaaagatgtcttgaaactcaacattaaaaaaactaagatcatggcatccagtcccatcacttcatggtaaatagaagggggaaaagtggaagctatgacagatcttattttcttggactcccttgagctccaaaaatcactgcagactgtgactgcagccaggaaattaaaagatgcttactgttggaaggaaagctatgagaaacctagactgtgtattaaaaagcagagacatcactttgccaacaaagatctgtacagtcaaagctctggtttttccagtagtcatgtaaggatgtgagagttggtgcatgaagaaggctgagcgcaaagaattgatgcttttcaaactgtggtgcttaagaaggctcttgggaggccttggacagcaaggagatcaaagcagtcaaacataaaggaaatcaaccctggatattcgttggaagctgaagctccaatactttggccacctgatgcaaagagctgactcattggaaaagtctgtgatgctgggaaaaacggcagcaggagaagaggatgacacaggatgagatggttggatagaatcagcaactcaatggacatgagtttgagcaaactccaggagacagtgaaagacagaggagcctggaattctgcagtccatgggtttgcacagagtctgctgtgattagtgactgaacaacaacgacatatcatgcacttaaaggaaacaaaaggatttctataatactcgagatgagcattatataagtgtgacaaaggtccctagtaaaattttagaattttgttctgttcattattcaacacaattaagtccctctgatatgacactctttggacaaggaagaaaatggtgaaaaaacagcctacctggtctcatacaaaagagtataaaggatatataaaaagagaatgaatggaatgcaatatgacaagtgccacacacaaaaaatcaacaaaatgctgcgttatcataaatgggccatcccttttctgatattcatctgacatcacttaaaggttttatgggtcagaggactttaactgctcatattcaaatatggacaagatatcaactggccactccaaaagtgaaaaatcaattggacataaataaacgccttgccagtccttgtgctcaatggcaaactctatgctatgttggaagaaagccaacttgaagttttaaaataacagcatgtagtgtggtaggggatttgccctcttgttaaagcagcattgtataatttgatattgtaattcattatttaaaaataattacattgagaatagatttatttcagtataaagtagaaattgctttatttaatatgaaagatattccatattttttttctttttaagcaataggttgaattttcattagaaataaatctgctgttatataaaaaaaatcacagaaatgtttccagaaaattaaggctacagactttcaacttctttaattcataggccagatgtcattcttattgacagaattggaaaagtttaatggactacaccttgccaattagaaaaactactgagttccagtgctctgatttctgttctctagtgcttttccagaacatagcaatgaagtttatgatatatatgaggtgagatctaaaacaaatggtgacacatccctctgagctgatcatgactgctttcttatcccaattagtattatggcaattaggagacttacaaggagatcagttcagttcggttcagttcagtcactcagttgtgtctgattctttgtgaccccatgaatcgcagcacgccaggcctccctgtccatcaccaactcccggagtttactcaaactcatgtccatcaagtcagtgatgccatccagccatctcatcctctgtcatccccttctcctccagcccccaatccctcccagcatcagggtcttttccaatgagtcaactctttgcatgaggtggccaaagtactggagtttcagctttagcatcagtccttccaatgaacacccaggattgatctcctttagaatggacaggagatcagcgatgctcaaaatggaccacagatttcaagtctggcatggctacacctttcttggatgttactaaacttgtatattgctttcctaccttcctttactcagcaacagtatacacacacacacacacacacacacacatacatcagtgtgactatctcctatttggacatagggactattaagagatactcaagtttatgtgatgtcctaaggggaggcctttatccagtagggccagtgtc

SEQ ID NO: 28399 - DNA, 694 bp, Bovine  19866881293474
  misc_feature (1)..(1): n is a, c, g, or t
nggaagcccaaaaatactggcgagggtaacctatcccttctccaggggatattcctgacccaggaattgaactggagtctcctgcattgcaggtggattcttaaccaactgagctatgaaggaagccactttttagactgtaaggttagctaaataatatgagatctatttcctccataatttcttgtcaatatttacaggctacaaggcaaaatgtctgatttcctgaaagataacatcagctactcttaaaaagtcatgtcaatattaatttaagaggttttttgcacaaatgttagcattgataaattgattttgctcttctcattcatttagtttacagactatataacatacttccatttaaattatgtatgtgaacacttgtgttcccaatagttatcaatcacttacaagatgaatgtaaatgacagtttcacaatgcatgctatagatctccagaacaaagagatagaataaaatataatctaggtgactaaaaggtttctgaaccaaaaataccattaaatatttatatgcttttgagcagaatgtacttatttcccagagcaactattgatctgtgtactgcttttcccaataaatgatttcacattaaactcaacttggttcatgattttctcacacagaacagttattcccttcatctaaacgactggaattcatattctta

SEQ ID NO: 28400 - DNA, 1024 bp, Bovine  19866881301717
  misc_feature (1)..(1): n is a, c, g, or t
ngggctgtggtaactgttatatggactttgggttttactctgcttcaatgggaagctacagtacatctctgaaacaaaactcaggttttgacaagagaactctggccactgaaaatggggcaagggttgagcagagattctggttaagtggctggtgtgatgatggagataaatgatgacaatggctctgaccagtgtggtagcaatgtgaagtggttgttttctggatacatttagaacaaaaagtcgtagataaccggtgggatgtgagaaagcttggaatcaaggatgcctccaagatgtttcacctggaaattggaaggatgtgatatctatcacctgagatagctaagatgcaactaaaggagattttgtgtagaatatcagaagtttcagtttgggcatatgcagttaaagaaatttactaggcactcaaggatttataccagagtcaccctaaaagacaactctcttccctcctttcacccctccccctctatgtcccaattaataatttattgggaaaatattccactcggatgtttcctgattctgtacaccattggtccaacttatggaagtactcaatcaaaaggcagaaaatatagtgtgtagttttcaaagataagatatatttccttgttgaactggtcctgataggaagccataatatatatagcctatgtcagagaattaaagacctttaggaaacttacgcagaatctacagcaacctcttattttatacttgaggaagctgaagcccagggaggataaatgactttcaaaaggtcagccatctagttattacggagttagagctagaacccagagatcctgtaagctattagagcacacagcttcttccgttgttttcctgcttttgccattattcatatgctgcaacattcacagtcgatttacatatttttatttggaaatacaattaaataccagaccattagcatagggtcaccactttgctggccttgaaaacaaaactttttcttttccttccttttcta

SEQ ID NO: 28401 - DNA, 716 bp, Bovine  19866881895525
  misc_feature (1)..(1): n is a, c, g, or t
ntcatttctccttttccaattattatgtttaaataataatttaaaattgctgttcaaaatgttttctatcttaattaactgctaaaataaaccattgactggaagagtggatagacagcatccttgactctgttcagaattcactgggaactttctcagttgctgtaagatatttgcagaatccatgaattgctgcttcacaagtacttctcctctgcatggaaagcaaatatatcagtgcttttctttggttattttaaatagtgagcagtattctctacctttcatggaagttgcctgatacatcagctaaatatatattgttcaaagtaaaataacttgcctgttgctggactttgttagtaaaaaacagctaccagccctgagctgtcacaaaattctgagggttaaaatacctgtgatgtcatgattaatgtcagagagaaattctaattatgctggaatggcacagcaatacacagtgataaaatgaaaatgatgtatatagaatcttgctgttctagcaaccaagaatggaaactatgaaggtgtttattttatttatggaaagtgttacagctcacagttttctttagtactaatgactgaaactatagtaaagctaaaaagcactggattatgtaatccttagtatttgagaaatatgtgagagcatttaaagacatagaaccaaaaattctttaatagttaagaaa

SEQ ID NO: 28402 - DNA, 1748 bp, Bovine  19866880081373
  misc_feature (1)..(1): n is a, c, g, or t
ncatctctagggagaaggcaatggcaacccactccagtactcttgcctggaaaatcccatggacggaagagcctggtaggctgcagtccgtggggtcgctaagagtcggacatgactgagcgacttcactttcacttttcactttcatgcattggagaaggaaatggcaacccactccagtgttcttgcctggagaatcccagggacgggggagcctggtgggctgccctctatggggtcgcacagagttggacacgactgaagcgacttagcagcagcagcagcgtctctagaccaggaatttagagaacaggcctgtatctacacagtgacctgccttctgaaaccctttagcttcagctactggaagacacagtttttacatgttaactttaatatctgggccagtcttgggcatttttacttttaggtccggacctcaatttacaggattgtttaccttatatcataggaaggctgccttataacataggtgggctgatctctggagggtgcctttttctgttagtgggatttggcagggttcagccagtgggaggatggagggcagttgaagggagaagccgaggtgggggctctggcagctcttacatgctcccataggtctgcggtggtccaccccagcacccagactcccataagaacacttcctccttccctctgtcgctagtcaccaggctacttcaccatcccctgaggattctgagctgttgctgtgtaaccagtctcttgtatttcattctctctgttttaagtccccaggatggtctgtgttcctggttggacttgacggatacagtgccgctgaaacaccttctccagctctagggacataaagatgacaaatcacatgattcctctgatcgtatagattgaagagaatagtattcttcactctgttgccaaagactggcttccatccatatggaaaagttggcctcaattgcaagtgacaagcagacagtgttaatactgctctgtgaccttaagcacatagtctctgggtctgcatgtcttcatctgtaaaataaatggtataataatattgacctcatagaattatgaggattaaatgaatgaatacatataaagtgcttacaacactgcttggcacatagagagctctatataagtgttaactattattatttaactaaaaagagctcattatcttttcttgccagttattttaattctgaaaatggtgaagtacaaagctaatttgttgtaggattttcatgactttattagatctgtaacttgtcttcctgaatcagccaaagacaaatggaagccattaactttgcagagtttaatatttggcctgagctttatcatcattggaaatgctatcagaattagccacataaatttgttactgaatttggaaaacagtttggaagcattatatcttctatgaaattctcccttttgaatgattccttttagcattcagtccaaaaaagccttgttttccttatgaacctgtcaaagccttctcttttttcatcatggtaattatgtaaatggccataaatcctttttggttttggttgctggagagcgcagaactaaatttaaagtttagttgtataatttgtgcttggttgcccctgccccatatttgtttctacttaatttggccttggttttatcattcaattgattttttgattgattccattatatttcaccatttctgttagtgttatgggttacagcaaatt

SEQ ID NO: 28403 - DNA, 1984 bp, Bovine  19866880475420
  misc_feature (1)..(1): n is a, c, g, or t
nttctaagatacatctcaatttcagaggtgttaaaattaattttaagttgataaaatgtcatatgtgtatactttacttctatttcagcacataatagttatattccatttatcatagtaatataaagtttctcctttgaatgaatgtaattgaacaacatttgatttagcgtaaaatattgtataagttggagtagaggtggtatgtgagcatgctgtcttgttttattctttgcgactccatggactgtagcccgccaggctcctctgtccatgggatttttcaggcaagaatactggagcaggttgccattccccttttcaggggattttcccaacccaggattgaacctttccatctttgcatctcctgcgttgcaggagaattctttacctgctgactcattgggaagccagaggtggtacatagtacgacaaaatcctggaggtggtagccaagtgactgtgccttagacaggagtctagtcccagattctgtcccttgttcacccctgccagctcagaccaacccggccaccctctagccctgtgcccagatccacatgagggagagcctgactcttccactgagagtgggagaggagtctgagcccatgctcaggagtctgagatgcccatgctcaggttgaggaatgtgactatcattcattgaagttatttgatgagagtgaaaagaaatttccaggaaatagactcattataggcattggaataacctggtgtgtgtgtgtgtgtgtgagtttctcagtcgtgtctgaatctttgcaaccacatggactgtagcctaccaggctcctctgtctatggaattctccaggcaagaatacgggagtgagtagccattcccttctccaagggatcttcccgacccagggattaaacctgggtctcctgcattgcaggcagattctttaccatctgggaatcccagggattcccaggagcaatctggacttgcctctatttaaataacagcatactcagaggtttctcttttgttttcttttgaacacaagaaataagtgaggagaggaaaagagcatttgagtctctgctgatgagcaatttattcactgaaaatggctgaaaagtgaaagtgactcagttgttgtcgactctttgtgaccccatggactgtacatgggattctccagtcagaatactggagtgggtagcctttcccttctccagggatctttccaacccagggatcgaaccaggtctcccacattgtgggcagattctttaccagctgagccacaagggaagtccaagaatattggagtggatagcctatcccttcttcaggggatcttcctgacccaggaatcgaaccagggtctcctgcattgcaggcagattctttaccaactgagttaatggctacctgagcactaaacactcagtttcagtgattatcaaaccaaagaatggtcgactttgttcttcataatagatttgtcagttgagagtaactatgaataacctgaagcaaaatgtatttcattgagaaagtagagaagcagctgatttccttcttccagaataagaaaagtaaaatcactttagaggaaagagtgaaaaagttacgttactattggtgaaactctgtgcttttgtataccatctccctggatgttgcaggggatttgtgttcctcatgcttccagctctcaccttgctctggatccagcctttggactgcagtgcacacttccctgggagccacacacagaaccctccgattaattcagtgcttattcttgaaggttattgtcatcattaaccagatgcaatagtgcaggagatcacaagccatataggctctgttgctttgtctgtttttgcaaacttgatttgggaaggttttaatggtaggtgtaattggagaagataaattgaatacatatgcatattctaataaaggtattcttccaagtcagccaataatcacatcatatta

SEQ ID NO: 28404 - DNA, 1730 bp, Bovine  19866880480380
  misc_feature (1)..(1): n is a, c, g, or t
ncccatctcccccagggtgggtgcacactccccatctcatccatcagcaatcagcatctgtcttccacatgctctcaccaccacccttcattccctcactgtgcttgctgtgccctctgtcagatggtctgtctgcaggccacactgtcaggtggtcttgtgaccctggtcacttgcatccctggcatatagctcatggaaggcctggcacaaaagaggcagtgaggcgactttcactggataaatacattctattttgcgctgggttgggtgccatgctcttggtaatcctccacttctcatggatgagaaagctgaggctacaaaggctaagtcattgcccaggttcaagcacaagtctgtggacctgagcctacttcctttgcactgtgccacgtggtggcacctggcacctcctcttccaggttagcaccttggcagctcacttgtgtttgatctctccccacagcactcacatgaaagttaccttacctcagcaagaaagaatgctaccaggagcatatggaatgtttgctgttactcaggagtgtgagtgttgctttgaacaccagagcaaaggaatgtaggtcaaatgattgccctgcccagtatctccgtctattacccaacttttctcatcccatgtgtgaggccacaagtggaagatagctaaatggaaaattctagaagctttgcaactatcatgaaaacaaaaactcattaaatcaagggagggattttaaaatcactttctgtttcagcttatgattattctaatgcagaggttcagatttattcatttgttaagagtcaagcaggtatacaaaatcacagcagacccctaaaaacataagtcctatttagctattatgaaaataaagtaaatatgatgataaagaaaaatacataacgataattatgggtcaggtatacacatcacaagttaatcctctaacagccctgaagttatacactatcaatgtctgcatctgtaaaatctgcaaagcacagagaggtcaagtaatttgctcaaggtcacacagctagatgggacagaaaggaatagatctagcccagctgcctccaaaacctgtgctaggcaatagcaactttctagtttgcataatatgaatataaattacagtctctaatacctagttttatatttttaagaaaaatgtagtacagaattagtctaacaacatttcaatactaattgtatcttacaaatgtgttgtctataataagaaacttcataaagttgatgtttaatttcttttaagggaaggaagagaaaatcctttggaggaaaaatttcaaagaaagtcttaagaaataagcagttgtaggagtttcgcattttaacctaagagaaatgtaaagacatctaataaaaccaaattttacaatgacttgctggttagtgttaccagtggggcaaaataaatatccagggtcaaaagcacgtgatgaccttactactctatcaattctatgttgcagacatgggagcaaccattccctcccatcaatttagacaaattaaaataatagattttcaagtcaatagtttttaagagtgtggggttgaactagcagctgtgaatctcctgagcagcagaaatccaaacaccaaacaaaagagaagacagtcatggaaaaatgggtaattcagtcactgatcatataagtccttgttctaactgaatgacatcatcgaaagcaaaaca

SEQ ID NO: 28405 - DNA, 1100 bp, Bovine  19866880491650
  misc_feature (1)..(1): n is a, c, g, or t
ncaactttacttacacctcaagactcaattaagcatcactccttctggaagacttccctgggcggtccacattgagttaaatgccctgttccaatactttttttcactggactctttgtctacacccaccctaatattttgaaacccaactgtaatcactgctgttcatttcctttctacgctgtgaactgtttgacctctttcaactctttctttccagaacccagcacagtgcctggcacatggtagatatttcaattaatgaacagagaaatggaaaaatgaatgctgttgtcttctgaaggtagcacctccctactccagggccttctccagaagtctaggtcctggacagttcctgcaggacttttgcctcctgattgccttcttcgccccacctgacccacctggttctagctgtaacccaactgtccccatttccgctgagtactttctacttggtgttccatcaagatgagtgttgcccaaagtgtgatacacagtaatttttaggtgatactcagacaaatgtcttttgacagtcttgtttttacattcatatatattttgcagaagggaatgcacgcataaaacctgtaatttcacagagaatattgcttaggatgagacaaatgtagtactgtcctgggaatcaagcttacttagacctcataaatcaggggtgcggtgctcaggcataatcataagtgttccaagccctcaataatggaaccctcagcagtgcccattagaagcatagacaaccaagagggaaggactcccacatactgaattttacaagtacctctgtgttttattaagtgatatgttgaaatatcacttcctaaagttgctgagtatatatatgtacacttaaatatagcagattaaatagttgaatatttttgagctgtcttaaccacatccttggtcttcctaggtggtgctcgaggtaaagaatccacctgccaatgcagaagacataagagacgcaggttcaatccctgggtcaggaagatcccctggagaagagcatggcaaccactccagtatttttgccggagaatcccaggatagagaaaccggcaggctacagtcca

SEQ ID NO: 28406 - DNA, 1684 bp, Bovine  19866880498126
  misc_feature (1)..(1): n is a, c, g, or t
ntgagcaaaatagttccattttggaaaagttaaatgtaaatgtaaattagtagcagaaacacaggtacaacttttctcttttcccagatcttttttctactagaagacttctactaggcaactatccttccaaatacctgagttcttctctaacccagatactatcatgaattatccatgttgtcattgttcatattaattagcaatgttatgttcaatttattgcccaagaaatattttagggaagtaaagttagatctttattagtcatacatttacatatctatgtgtaatttttctaatttattctgttttttctctttaggaacaaacaaaaaatgcccagttcataataatttctcttcgaaataatatgtttgagatttcagatagacttattggaatttacaagacatacaatataacaaaaagcgttgcagtaaacccaaaagaaattgcatctaaaggactttgctaaacttgcttaatctgaagatttttcatatcttaccatagactcaacatgttgtatttctctatgtaaagggttataaattatataaaatacctattcttaaattgtatcatatagtttctattttatgctgttaattaagagatgttacaagtttaataaaatattctctatgcctgtttctaagagattgtaagaatctgacagttttgtaagtggcaactatggagaaaataagatgcctggactatcagataacttccccttatgcagagttaaaagtatattactttgatgaaccagtacagttgtaaactaaaccatgttaaaccagtgattctgaattgcaagaatgagaattttaatattatacattcttaaactcagtgtacttgactgtttaaaacatttgtgaaagggccagcaaatgtctgaataacttgagtgggtatatataccactatagttgcttcagaaaaagaatgatttaagtgtataagggttaatttctttagtataaatggaaattaggatgcagtactgtttgtccattaagttgtcaaaggctttcttgttactgtgttacactgcattaactcagaaatatactactggaaataagctggcaaccacttcattttcagaaaaatcctggtattgaatcagaagtctggtctaagctatttggtttctagatagagagcctgaggaattaaaatttaaaattaccttgttattcatagtgcattgtttaggtactaaaacccaacaaagacagtctgtatcataatcagtaagatgtaaatacatgagcatgaacttaaataaagtaagatctaaaattcaagtatggtcatttgttttaagattatacaaaggaaaggtaactagaaaaaagtatcagtataatccaagtcttttcattggtgagaacagagatggatttattattttttatgttttcataaccaatagaaaagtgtagtgcttttaaaaagttaaagtagataatgcccatagcccatatgaaaattccacatcaaccactcctgagtttcagcaccttattaaccactcaatgcaaagatccaaatgagtttattacaatgtaaacttttgttatacataaaaacttagaaatgaagattcaagattatatacttcaaattttacaatctcaccctcaaaaatacaaaagggaagagcagt

SEQ ID NO: 28407 - DNA, 2735 bp, Bovine  19866880548623
  misc_feature (1)..(1): n is a, c, g, or t
nttgtctttctgacttatttacttacctgataatctctaggtccctaataagcttttaactataaaataaacaaagaggaggaaagtagaagtgagaaatattcagttataactgtatttctcaaagtttgatcttgcatctgaattatcaaggatgcttgttaaaattcatatttctgagccccatctcaaacctattgattcaggatttctggaagtaggaattaagattttgaatttaaaaaagctacctaggtattcacatgaacattgaagttcagagcctcacagctcatacttaggttactacaactgtctgttagctgatgtcctgcccttgtgttttccttcaatcatttttggaatactcctaaagatctacatttgataaatgtggcatggttcctttgaatcacctcattatatttaaattttcccttgatgacaaaaggctttcttcctgccttttcaatgccttctcactggccttgtccccagctcctccccagaccaattgtctatctgggctaaaataagctgccttcagactactcagagaagctctctcgtggttccattgagaactcaaggggctgtcactggggaaaacagattggctctagagctctccatcttcattccaaccagatcttcacttgtactacctcataaaatttatctggggaaaaaactcttgtggatacaataaattaaaagcaacaacatcaatagcaacaacactgtcctagattaaacttcctgcatcactttcctatctgcaaacacttccattttctttgtgtgaaacccctgcccatctctcccacttcgaggcttccatatcaacaatccatagtctgtgcatcaaatttaaaaaccttccttgagatgcagctggatctcatctaaccctccatcctcagggttgtttgtgtcattcagagctcagatcagctcatggcaagtgggtttaacaatttctcattgttaaattataactatctcagttatatccttcatacaacacacatttatcaagccactgctccagaccagggtctgcactcagccctggaaatagagtaatgaacagacaaaagttcctgccccttgtggagcttacatttttatgtacatgtcccctgcctcaaagaaattctacgttctacaataggaacctgatcttctccttgttttatatcctttcaaatttcatggtagaaataattaattaactccattataggaaacatgacccaaaattcatgacaaagctatttcatgtcttaatgtaaaaactttgggtttttattttctggttgctgctgctaagtcgcttcagtcgtgtctgactctgtgcaaccacatagacggcagcccaccaggctctgccatccctgggattctgcaggcaagaatactggagtgggttgccatttccttccccaattttgcggttacttgaaaattaattttgaacaataatttgtctgcttcatacttatgtttcagattgtgtttagaatcagagacccaaaatttaaggggaaaaagtaaatgacggttatttgcaattttttaattctgtaatcagcacgtcaccattcaatttttctcacactttttccttaagtggctctactatccttacaaaaagaacttgtttaaattcccaaacttacccaaacaatttgctttatttgccaaaactatgaaaagcttttaagaaggggaagttctcccagttcttcttatgcattccagagtcgagaacagtttttttcttacctgatcatagatttagtgagcatgaacttcacacccatataactcaagcttgacttctgatgtccagcaatgctgagctaatttattcaggccaattctcctattgaaaatcactaaaagtactgaataaaatatgctttcatcttcactaaaaagcatcagtaagccaaaacattagcaaggcattaccaggctcagaatagatgacaacaaagaaaagtaggccaagcacttgaggctgcttttgttccaagggcatttgcctttttggactatgaaactgagctgtggcctcaatggaatcctggggtgagaggaatggaaatcagatcccagggcccgttgatgtggagagtataataggagaaccccatattacagtgaaacacaatgggctcccccagaggtcagttcatcccctcccagccctatcagagagctatgaaaatggttgttttagcccagcacagatcagagcacaaagaaaaggaatcccacccagaccccaaaagactataaccacaggaatatttgaagcctcaaatgtgcagcccaaatttgtatcactgcccaaagtctagtttagaatgataccagaccgtctacccaagcccccaaaagaagcaagtgcaaacctcctctagaggaagttagcatcatgttatcgagcctttgagagtcctcaacatatacttgctcaagtggtatgaacagcagagaatcaaaggtaaataacacacacaaaaaaaaacaaggcagcaggaagaacaactagtagaaagaacatgggacttccctggtggcgcaatggataagaatccgcctgcccatgcaggggacatggatttgatccctgatccaggaagatcccacatgctgtggagcaactaagcccgtgtgtcacagctactgagcctgcactctagagcccatagccacaagcccca

SEQ ID NO: 28408 - DNA, 668 bp, Bovine  19866880588572
  misc_feature (1)..(1): n is a, c, g, or t
nttgaagatgtgtaggtaggaacataacattggcccttttccccaatgctgggtgatggatattcctaaatttccacataaggaatccattacagggctacctcttccttcactcacttctgtgggttattgttttaggaaggagaaaccagaaaccaactctatttcctttttctccaacatttatctgagcaaatgattagatcattttagttaatcttcctaaccttttcttccttttgcaacctgaagcaattttctctcataatacaaggaattatttgttattcttcttctgcatctttttcatatttgtggatagaatagctgccctttgaacaagacaattattccctaaaagacagaaatgcgcttacttcccctatggttctgaagtaattatataaacaaaattttagaatgcaagtgagaatagcaaaatagaaagagcggttggcagagttaattggctgatcttcttatgtagatctaatttgggatgtcaattgaatttttggaaatcattgcttatttcctttgagaattatttattgctctgtgtaatctgaatgtataatacatagtttgttcacttctgcattatagcttgattgagaaaatctatttctatcagggagagataaaaaatattttgaatcactttttta

SEQ ID NO: 28409 - DNA, 1184 bp, Bovine  19866880589602
  misc_feature (1)..(1): n is a, c, g, or t
naactgtgtttatacaacttgattttcttggttactggtctccattttgtaaattagttcaaaccaataaatcaaactccatttcgtgccaggagagagctgcaacctaggctagcaagccctgtgtggagatctttgtacaagaataagatagtaaaggttgcaatcttaatgcccattttatatgcatgacttgagttgagcccttatgcataattcatgcggtcatttacaggcttttacacgactccccctttaaaagttaactaacaaagggcaatatcagccatggcaacaaggatattatgtaaatctatctcggtaccaacataagagggggtgggttgattaattaaaaagacagaggaggacaggaggcaaggtgcacatgcctcttgatgttactcatcatttattaatgtatttaattgaaaagaattttgaagcgtaaatatgtgtttgtatattgccactggctgggagagcactgcttaaccctgtgagcaaccatttgaatcagtggaaaacacccgatttcattcatttcatttcctctcctttcaaggaacagcatcatgagaaggtgaactaagtcttgggtttgatatcagctttagcccattatactaaccgaggtacttaactcctttgaggctcagtttcttgcatatagaatatacactaaaatacccatttatttacctggtacagagtgggaggggactatccaagggtatggataggaggaggcaggaaatattgggggtcatctggaaggcaagcaaccagatgtcagaagcagagaccaaggtgattctcctaaaatcactgggacgatacagagccaagtcaactgtacaggttgttcaactgctgttcattgaattgctggagggaaccaaagtagaaccctctatcttaccaaatggaattttgaaattttcatttccaaaagctgatctgaaagcagtgatgggggacttccctggtggtccagtggtaagaatctgccttccagtgcaggggacacaagttcaatccctggtcagggaactaagattgtgtgtgctgcagggcagctaagcctgcataccacaatgaagacccagcacagccaaaaataaataaatgtttgaaaaattaaagcactggtaatgtctgacccatgagtatttaaaatattt

SEQ ID NO: 28410 - DNA, 5577 bp, Bovine  19866880592179
  misc_feature (1)..(1): n is a, c, g, or t
nctggcaggctacattccatagggttgcaaagagttggacatgactgaggcccagcacagcacaaaaatttccacctaattgcagcttacccctttacacactcctgtcctatttgagtgtgatatacacaactttcggagaaggcaatggcaccccactgcagtactcttgcctggaaaatcccatggatggaggagcctggtagcctgcagtccatggggtcgctaagagtcggatatgactgactgacttcactttcacttttcactttcatgcattggagaaggaaatggcaacccactctggtattcttgcctggagaatcccagggacctcgggagcccggtgggctgccgtctatggggtcgcacagagtcggacacaactgaagtgacttagcagatacacaactttgcaaaccctcttttggtgctgaccactgcatgatttgcttgaatttaggatgtttgctgagacttcagtcaacttcaggtgctgaaggtctcatcatcagatgaatgtgacagggttgcatgtttattttattttttaaaaatatcatgaggatttattacataactatttaaaaaatatttatttctttatttattggctgcgctgtgtcttattactatgtgtagggtactctctagtcgtggagagtgggggctactctttacttgtggtgcacaggcttctcattgtggtggcttctcttgttgaggtgcacgggctctggggctcacaggctttagtagttgtggtgcaatggggccaggtgccccacgacacgtggaatcctcctggaccagggatcgaacctgtgtgctctgcattggctgatggattcttaaccattagaccaccagggaagtcctgcatgtttatttttaaattcaaagtttccggaaggtggcatactggggtgtatgcacataaaaaggaaaaccaaaacaagtgagagtctggagagagtctggaagtctgtccgcctgagaccgttcaaaagtcaaggcttagaggctgtgactggcagaaatcctgcccacagtaaaaaggcagtgacgaaagtacaatgaggaatttaaccagaaggtgacagggtacactcaattcctcctctgttgtcataaaaaaagctttccttgaaaagatgttttaatccactcagttgctcaccctagggtcacaggagttaaatctgatctaatcagtagtaagaaggtgttttttttttttttttatagtaatccatgaggaaaacgagctgaattgtaggcactttttaaaaagtcagccacagaagtacagatatgggctaacaccaaaacggacgcacaaaagtggaaaaattactttaaacgtggcaaagtgcttcttagtgtgactttctttccctggaaacaagatgcagttcagtgtccacgttgctttgtgtgaccctttaaggtattagactctgctactcttactggtcaaacccattgcttgattttctctctaaacctcaccagccaggcacgacaatctttcttaatccacaaagaaatttttttttttttaacttgagtatgggttgtattttccatgttcatgggctgctgtcagcttagttttatccatcatagatatttaattccttcacttggggcacacataatctactgaatgcttcagataaagcagtcatattgacagcggcaaggaatagagatgaaataatacagaacctccttctcaaagtgcagacaggtacacaaacagacaagtatactatacatcacagatttattctatttatacataatttatgtcataggttagggtacctatccaagtctagagaaaggaggggtcagggaaggttttctgtagttggtgatggctgagctaagtttcagcaatgagtgggaattaactgggcaagtaaaggacagagtaaacaggatggagaaaacatttcagggagaggtacagcagaagcaaaggcctggaagctagaaacagtgtgaaccaggcaggtcagagagattgctttctcagagcacaagggagtcgcataaaatgaggccagagacgagaaggactcatatgggaggtctttatgccacatttagattaggctttgggctgccctggtggctcagacagtaaagaaactgcctacaatgcaggagaggtgagttggatccctagattgggaagatcccttagaagaagggcatggcaacccattccagtattctttgcctgcggagttctgtggacagaggagcctgatgggctatagtccatggggtcccaaagagctggacatgactgacagattaacactttcactttttcactttttcctgaggaagtcattaaaggatctaagaaggagacccacctgaacaggtaagacaggtagactaggggagggacttaaagagtgcaaggctggaggcagggagaccaggtgggagaagctatagcagctagattgagaattagtagcatttgcaagattgggtcagtagctgcaatggggaggggaatgatttgagacacatttagaagggaaaactggcaagacttggtgactgatttagtctaggaaacgaagagcggggaggaatcacgtgtatgttggtggtggccactgccattatctgagatgaaaagtactggcatagacacaagttagaggagaagatgatgacgagttagtctgaacatgttacatttaagatagtttgtatactttatttattctccccctgtcttcaaaaagtaaaggagtgttgaacatctctagaggttcagtgattaagactctgtgcttccaatgcagggggtgcaggttcaatccctgggcagggaactaagactccataggctatgcgatgcaataataaaaaaatttttttaaaaatttaagtattgcaaaaaaagtaaaagagtgtataagctaaacttaactttgatctaaaataaaggtaacaaatgctgtgttaatggacaacatcactgatccatcagagcaccctgttcacacagcccaggcacagctccagcatccttctcagcacactgcgctgtccccacagggcagccaccatgcttcatacaacatggcggccactaacagtccaatggagagtgcgtgcattggaagcccatgatgcctcctaatctaaaggcttgagagaatatcattctttaaagttacataccatcatttggaggtacccttgccaaatttaaatatgcaagactacactgatctgcagtagcagggtcatagaagaagtcataacatattcctggggccttccctggtggctcagatggtaaagaatctgcctgcaatgcaggagacccaggttcgatccctaaattgagaagatcccctggagaaaggaatggcaacccactcccagtattcttgcctggaaaattccacagacagaggagcctgtacagtccatggggttgaaaagagtcagacacaactgagtgactctctttttcacacacacacacacacacacacacaacatattactgagagattcctaacttagtttaagccaaggcagtgcagactatggtgatcaatagaatttagtttaatgtttgttaaccgccttctctgtgatgggccagtgcttcttgatatgatttcagtaggtcacaagcctggaaggtgtcaggaatgggcaaagatcttgctgttcaggtgagatgatttgaatttcatccccctctttgagatcgcaaggcacagcagcgtattagagacagagaaatcctacagtaaagaaatccactgaactaattttagcctggtatcatccagagttattctggccagggaagcctcctgtcacatactgcaagtgaaatcaggaatatttcaatcctcatagcatatccattttccaaatgaggagcaaaagctctaaagtcctgaaggaggaaacagaacaggctctatcttgaaagcaggactccatcttgggccggactgtggactttgagctacatgtccagtatctatggaaacgacacaccatctggaaaaccaggcccccagaaggaagagccccagggctctccatcgcctaaaagaataccctaattatctgtgtaaccgaatagaatcatacattctgttatgcttattgcggtatgaccacaagcctattgataattgtccactgttaactacctaggcttaaggcttatgaatcatgggttaactttgattgtatctttctttttcctttgttcagactagattcagggaattttggggaggtgggtttggatacgtccacttagggtatataaggttttcacaaaaagctggttggggtcattggctaagaggaggctctgctttgggccctccagtgtaacaaactgcactccgctatctgcattatccttttgagtgagtttgtttcccggaacgtgtggctacaacattttcagcaaggtcttcggtgattctaaagcagaccggtcattcctggaccgcacgctgagaaacactgcttacaggactaaaggctgtcgttattcttgagatgagggtgaggaaaaaattgtgagtgatttgaggttatgttaagtgtttgtgtcctcactgtatataaagttctgtgcaggaccctgagtgggagacaggaaatagaaactcaggtctgcatcagccatcttttatctttttttttattggcatatagttaatttacaatgttgggccagtctctgctctacagtcaagtgactgttatacacatatgtacattcttttcaaaatattcttttccattatggtctctcccaggagattgggtatagctccctgtactatactgtagggccttatagtctatctctctaaatgtaatagcttgtgtctactaaccccagactctagtacacccctctcccttccctctttctcctgggcaaccacaagtctgatcactgcatccaagtcctccttctgtctttaattgctcctctaaggtttgaaccgggggtaatttatcccacatcacagtatgatcaggtatcctcttttcctatattcgcttccttaggtcttatactagaagtttactgtataaatacacaaacaagccaagaaaataataaatactgtagcagtagtagcagtagtggcacctgaatgagggtccagggctacgcacaatcaagggttttctgtggtctacatggaagtgctgtgatcacactgcgtagggagacctttcttctaaagaagggcggataaggcgtccgtcttcagaacagcatttgtctgcagcctcattgcttccaatggggccagagtctcaggggcccccaccagagttttaggtgaaaaacccagggtactggcaaagctcccattgagagggtcaccttcatgtgctttaaacctctcaaccccttgcatatgtcctcctcccttaattacagtctcatggttgtggatgggtgggatcattcttgatcccttctccgggcaagatattttcctgccctttacttcacctgccaactgaacaactagt

SEQ ID NO: 28411 - DNA, 2204 bp, Bovine  19866880691355
  misc_feature (1)..(1): n is a, c, g, or t
ngatgaaaatggactaaaactggatcgtggtgacagtcacgcaacttgctaacctggatggagccacttcagagaaaacgatgtgcatggcctcatttttgtgacattaaatgatttcctgagacttgccacagaagagaccccaaagcaagcccaaataacaaaactctaaatttgtttctcatttagcaaagtggactatcatcttcttacatactttccctctgcttacgaaaggttaccttggtttgtttactttttatgggaagcttgcaattgtctaaatactagagtttcacttgaagttggctgcagaataatttactttggggtggtcagacacaatatccaaatgttaatccacatagggtcaaacttacttaagccatgacgttcaatcctgtttttctcatttggctaaaaaggaatttgaagggtttccccccccacccccccagtcttacaacacttaggaataaacctttctttccattttacacgtatttgtatttcataaaaattgagagtctcatttcatcctttcctttcatttcatatttcctgcatgaaatatcatgcagatggatgtaggtataaggatttcagccttgtggaaaatattcttttagggaagagaattgggtagctgggagtttaccctgttgttttagtcactaagtggcatctaactcttcttgaaccccgtggaccagaggagcccaccatgctcctctgtcctgggatttcccaggcatgaatattggagtgggttgccatttccttctccaggggaatctctccaacccagggattgaacctacatctcctacttggctggtaaattccttaccactgagccacctgggaagcccttgttctgttagggatggtaacttttcagtatatattctttagcaccattagaatgtttaccatgcatattatcatccattgaaaaaaatttcatgttttacagctttacacttaaatttggtaaaccttaactaagttaataagttttttaaaaatggaattaaaatattctaatcacttttgtccaaatataataacagtgaaatactgtaagaactctgaccaagttttaatgcatagttaaataagaaagttatttgaagtcttcagtctctccatctctaatacaaagctattatgaagattgatggaataacttttgtaagatgcagaatcattgagatggagttttgcagaggtaactcacccttggacagaagtaaaatgaagttcagctgcaaaagcaatagatctctttgtcctggacatttgttacttactcatcattggatcatttaggttgaattggacttgacttatggtgatcaattatgtcattttgtattatgggaccaaattcattcttggatccttggggaccaagtttagcattaaatatgtttgcaacagcaacttcataatccacctgtcaatttattccactgcctagtcattctcttgcctgtacaattactttagctgaagaaatggtaatcaacataccttaaaattgtgatggcacattacagttcacttaccatttctatcaatacatatctcatcacattcgaccctcttagcaaccctgtaggggaggcaagagagacattacaatgtctgcttcaaacagtcatagttaaatcgcccaaccaggaatcagggaactgagattagaatctaggttcccccattctccttccacccagttatacatattttaccatatgtatgtaaaatttcagaaaagggtgtatttgtgtgtaaaatctgttttgttatattagaacacaaagacaatgtgtgtactttatcataatttctcagttgttttttcttttttctgaacggaattcacatgggcattgtttcatctgctttttgaacttactttgacaattatattacctaaattcacatgggtagccaaagagggttcttgtgcaatgcggaccattcattttcatagtctcatttatgactcacggatttgtgtgggcgttgaagagaaacatctaaagaaagaggaatgggaaaagatttctttctatatttaaatataagtaatagaaagaggctgagctaagttataaataacagtaaagtgaaatgttctctggaaaatccatggcaatatcattacggctgcctgggaaatgtgaccacttaaaact

SEQ ID NO: 28412 - DNA, 2115 bp, Bovine  19866880693071
  misc_feature (1)..(1): n is a, c, g, or t
naagttacctaaaataaaaatcacttttcctaattagaaccttccttttctaagtttttttccctctaacgtatttttttttctttctttctttttttttttttgctgtttggtttactaagtagaaaacttagatacttagatgccataaagcagtggtctgcaggcttttttgatctcatatttatcagtaaaatgtttttgaacctaagccattaacatacacgtatcccactcataattacacatgcatgctaggtcacttcagttgtgtccaactctttgagaccctatgaacatagccctccagactcctctgtcaatgggattctccaagctctaagaatactggagtgggttgccacgccctcctctaggggatcttcctgacccagggattgaacttgagtctcttctgtcttctgcattggcaggcagagtctttaccactagcgccacctgggaagccccataactacacatataccgctgtaaaaatccatcttgtgtgtatgaaatttatacactagtcctttggtatccacaggggattggtttcaggatccccacagattctaaaatccccacaaattctaaaatcccaggatggtcaagcacgacatggtatttgcatataacacacacatcctcctatatactttaaataatcttcagattacttatagcacctctctctaacctctgaatgctcagtcatgtctgattctgtgaccccatggactgtagcacaccagacggctctatccatgggatttcccaggcaggaatactagagcaagttggcatttcctccttcaagggatcttcctgacccagagattgaacccacgtctcctgtgtcttctgctttgcaggcagattctttacctactgagccatcaaggaagcctgcttactactacttaatacagtgtaaatgctatgtaaataattgtaaatacaatgtaaaagttatacaaatagctgctggatgcatggcaaattcacattttgctttttggaactttctggaagtatttttccaaatatttttgatctgtggttggttgaatccacagatgcagaatctgtagatgtggaggactgactgtacacaaataggtattttcaaaactaagatgtttaaaatataaccaaaagcaaaagttttagtaatttcttctttcacctccttatattctgaggtcagttgtccaaaacaatttgaaaattggtatatccctgcctgggtacaatagaatttcctataccacttgcactaataaataccgccctgtgtatagggattattttacaagtttgttttaaagtcaggcaaacagccttcaggggaaaggtcattttacagtgactgaaattagtttccacccaggcagaggaaggaaaagagtacgcatctgtttcgtttccttggggaaggtcctgttggtaagaaagatgtttcatttaggacctctggttttttcaggaacagtagtaagactgtactcaatggaaaacgtagctgaatatctagaaaggaaagcgtgcaccttggcagaatccgagggtggaacgttcagtgcattatggccccgccttgctctgagcagcctctggccctttggtcacacagcccattgtcttcaagcacaaaggcacacagggtcagtgtcctgattccttcagctatcactcaccaagagccctcctgggtccctggctttgtgctcggggtcaggatcacaaaagggaggttgggctttccctcagggagcttacagtccacatggggaggtacacacacacataggctgccctgaaattgatgccacctgagagggatgttcagatggccgatgtggacctagaaaaggcacagcccatgccatctcagggcgagggatggatccaaactgtaccagtggaggggaggggtggggaaatcaagaaaatttaacatgaaatacagcagaggactggctcccacttcgtgccagagcagagcaaacacagggaagccggcctggctttctgtccccaggctactcctggcagaaggagccgcagccgcagccgtgtgtggttggaggatgggcaagccggctcgccagg

SEQ ID NO: 28413 - DNA, 1422 bp, Bovine  19866880723085
  misc_feature (1)..(1): n is a, c, g, or t
ntggtgttggagaagactcttgagagtcccttgaactgcaaggagatcaaaccagcccatcctaaaggaaatcagtcctgaacattcattggaaggactgatgctgaagctgaagctccaatagtttggccacctgatgcaaaaactgactcattggaaaagaccctaatgctgggaaagattgaaggcaggaggagaaggagatgacagaggatgagatggtttgatagcatcaccgacacagtggacatgagtttgagcaagatccgagagttggtgatgaacagggaagcctggtgtgctgcagtccatggggtcacaaagagtcagatacaactgagcaactgaactgaattgatagtgaacagaactataatgtgtatcctctttagtatccaacttgttttgctcaacatactgtctctgagttttatccttattgttacatgtaccagtggtttttttccttttccttgctgagtagtactccactgtatgaacctactacaatttgtgtgtccattcaccttgatggccatttgagttgatttccatttgggggcaattatgacgaaaactgctaaacacattcatataatgcgttttttgtaagcacatggcactcagttctcttgagtaaatacccaagagtgaagtcagtgggtcctgcagtgggcttcccaggtgatgctagtggtaaagaacccacctaccagtgcaagagacctaagagacacaggttccatccctggctcaggaggaccccctggagaaggaaatggcaacccactccagtatctttgcctggagaatcccatggacagaggagcctgacaagctacggtccatggggtcgctaagagttgaacgtgactgacttatcatgccccgcagtaggtgtgtgtttagctttagcagatacagggacatttaatgaatgctattcattcccatacataaatgaatggaagaatgacactttcgtgccacagccagctttcatacactaacagaggaatctatgaatttggggttaaaaggagattgtcccaaataaaaccttttagaccggggctgtcagtggtttcagggcagagcatgaggctttcaggggcaggaagggaaagaagctccattgaaagacccccagggagaggcagctcagagccaagcgagataggggctgggaggtgtttcacatagaactgagagcagggatctggcacagacgtgcgacctacacacatctgtgcccacaaagagagcagtagaatatgcttccagggattctctgtcatgtttcctaattggttgccttcaccttgggagtctttagtcataaaacatttagctgcccaaacattatcaattcagccctatggataatggatcagccatataacccacaatgagtgcagctgt

SEQ ID NO: 28414 - DNA, 1357 bp, Bovine  19866880738621
  misc_feature (1)..(1): n is a, c, g, or t
ntatgtgtgtgtgtgtgtgtgtgtgtgtgtgtgtatatggcttcccaggtggtgcagtggtaaagaatctgcctcccaatgcaggagacacaagagactcaggtttgatccctgagtcaggaagacccccccttggagtagaaaatggcaatccactccagcattcttgcctgcacaattccatggacagaggtgtctggtgggctagagtccatggggtcacaaatggttggacaccactgagcatgcatatgcacatatatatatccacacattcacccatatatttcctttatttgctttattcccttgcaaacaattcttatatttctgattattgacccaaaggacaggaacatttacatagaagtcaatattttagagcattcaacttgtgaggattaatgaaattacgaagatatttaagatcccagggtaaagagaattctcactgtgctataaaactaatccatttctctgtgaaacaaagccgtgttcagcttccaggaaaatcaccagaaacaaatagcatttcctttcagctgaagcagttttcctctgcctacagaagctattgtttacataattacgttagtttgggattggctgagccctttaacctggagtggggctattccaggctgacagatgtgctgctgctgtgggtttggattcatgcccgagggccccattagtgtttggtcagcgggttccacgccggcgctcgggtggcacactgcctgctaagctagcaagcccgttagctcgctgggcccaggcctgaagcaaagtgggagtctgggaaggctgacagaaaacagggctgctttggggtcatctcccaaaaacctctggaacagttcacttctcacttctgtgataaaatgggatgctgctgagatagggggaagggtcagaggctgtgctggcggccttgcagctgggagacagatgtccttattaaaatacatgcctgcaccccccttctgtttcagctgcctttttcaaaagaagcaaatatagctgttaccttattagaaaatgaaaggattggcagcctcactgggggaacacaatggtttcactccaagctggctttaccccaggttccagaggtaccaatgaataatgtgtgagacagagttggagactatttacattcactggaatgtggaaagagtaagaaccctagatgcctgtgaataagttttctgctcctcagaaaccctgagcccttttagccaagtactcaggaaaggtagtcctgcatttttgtttgaagttctcgaatcatctcccattatagcctctactataattgggattgacacagttgttgcttctctgcagcacgtgt

SEQ ID NO: 28415 - DNA, 1854 bp, Bovine  19866880766114
  misc_feature (1)..(1): n is a, c, g, or t
ntattggaaaaaattaaaaggaggatgttggaatatagggctgagtctgttgaaaaaaaattgtgtgggtgacttgacatgatatgggaaacatcctacttcatttggtagaggaaatccagtgcttccacccaggatagtgagagagaattgtaaggaatttaagttattaaaaaaaaagggaggacttccctggcagtccattggttaggactccttgcttccaatacagggggcatgggtttagtccttagtcagggaactatgatcccacatgccctatggcacagccaaaatattaaaagaaaaagaaaggaagggaaggtgaaagtagaaagaaagcaactaaggtgttgtaaccctaaacatatgcacccctgggtcacaagttcctctatcactgggcatctaaccactcctccctagtacacatgtttatctttgttcacccttggctttctaatgatttccagtggattccggttagaatcctaacaggtcttatccagtggtcttcagtcaggatcacagtgaaaaacaagccaaaaaccccatttgctctcactctgtttgaagtaccttcacatcagcccaactttccacttatgctactgactagatttctggatgatggacataagaaagaaagtgattctgttatcaagcatcctacatagctttgatatcatccccaagatctgaaactatgtgctgtcccatttgtgagctcattaatctctgttctccagtgggagctgtaaaattacaaagaactgctcagtggaggtctgtaatagctgtccaatggcagcatcaccaaccacaggcatacttgcctgagcagaatgggattgcctattagggggcagggaggtcaggtagcagggggtttgagctcatcgaagtacaggcttgtttagaatttattgacgtgttgttaaatgtgttgcagctttgcctagtatgatggctgtttatttattgatttttcaaaaaagctttcaatattgtggtttgtttatcagggagctttgagctgttaaaagttgacctcaaaattgatgtaattaactgattttagttttctcagtttaattgatgttgaattacagacaaaaaaaatgtgtgggggtgggtgtaattttctagttagttggatgtcgtttttgggttttatagccttctggttactcaacaataactttccaaatgttagctctgctttgattattagctttatgatgattactttgccattatgcctaatcaacagctgtgcagaaactcattttaatcatattttcctgcttagaaattagcagatgaaggataattactgttgaatagctccagagttctgattggctgcttcctgtgtaacactgtcaaaagatggaaacttaaatataaaactctcgttttaactttctaaataaacaataaggtcttggcctctttttgaagccaaaaggctgagaaggagttgctcatttctctaccctgagaccaatcatcttccaaatcagggtaacttaattaactagattaattaaactagattaaaggtgctctttacaagacatgacttaagcagccacagagtcatgaaggatggcaacgttttttaatctccagaatttaagcagtagacttctttccacatatttcacagatgcatcagaagtttcaatgagaccagggctgggatggcttggagagaccatctaatcctgggtttgcctgtggacctggaggtatacatatacatggacatatttctgagaaacagagtccaatcttctagagattccccaagggaccagactgctaagaagtttaaaatcagggacaaac

SEQ ID NO: 28416 - DNA, 1973 bp, Bovine  19866880779435
  misc_feature (1)..(1): n is a, c, g, or t
ntcagggattgaaaccagttgtcccacttgcaggtggattctttaccaacggagccaccagggaagccccaggatacaagagtgggttcccttctccaggagtctcttgtgttgcaagctgattctttaccagctgagctaccaaggaagccctgttaccaacatatacaagtgtaagtttcatcttccatataatgggaatattaatatttattatataggattgctatgaagagtaaatgagatagagcagatgcctaggccaatgcccagcccatggtaaacgcccaaagaatgggagcactggtgttagtgttatcatgtccccatgggcatcatatgtctctagccctttagttttcaccagccatggagacatagtcagtacatcaaaaaatggcatttaatagagaacagatataataaaataatgaggcaaagtcaaatttaataaagtctacatagtttaaagtaataaaatgttcctcagggtataataaaataataaaattatagagatagaagggggtcttaaaataaccaaattcaatccctcactttatgtatgagaccatgagacccagaaaggctgaacagccttctctgagcccctctgctgactgaacagtgcgctgcaatgcgcatccatgcctgcctttcgctgtgatggtttcctctgctatgtatgtactggataatggtgcacttgagatttgtcttctgggcttggtctaatgactgggattatgatacagaaatagaaaataaaaatccctcagttgtgcctcctaggctttccaatgaaatggaagaatccacaggaacaaaaagagacatgcttacaaagtattggggacctagtctttcagtcatggagcccatatctgttccccttaccagcagacagggtttgattccagagtatgtgttcctacatttaaatgttatgttcagtaaaagaacaaaaagactcaaagagttccttgcaaaaataattagaaaattactatgatgatacaaaaaaggagttttgctgtatccttgcattccagaactgtgaggttagaaagtaggaaatggaaaaacaagacaccatgacaggccactgctgaaagtaggcttgggtggtgccaagcgtcaggtttaaaggttgctcgttgttgtttctctttaactattccttcaatctcattgtctcttgctaattattatgcatagacaaatatgattatcaaattttaattgcaccatcacaggcaccttataaatgatgataataaaatagcaattgcaatctgctttggtaatttttggacggtaactgtgccttaatttgtacaaatgaaatacattttgtttgtcttcagagtagttattattatatccaaatctttttttagattacccattccagtactatttttctaaaaactttgtttgtgcatattaataccataataatttttatttttcaatatttatattcaagcagttttgccaattaaacttggttgtattgcacactgtttatttacttattcactcactcactcattcattcattcattcaataaaatgatcagagtacctactctctttcaggcacagtattaaccccctggtgatacagaagtaaataatagcaccatattcattcttttggctttaattgatcacaatccatatgctagtgactttcagatctccatttcaaaacttgtcttcatcttctcctctgagttttaggtccatgcatattcaaatatctactggacaattttacttgtttattttcctcaaaatctatgtgtcccaaactgagattattttctttctcttaaaactgctctttacatgcaaacattcccaattattggaatgatacctatgatcctaatctagaaatttgggattatctctgactgcctctcccacatgtcttggtttctaataagtcaatgaatcctgtcaat

SEQ ID NO: 28417 - DNA, 1029 bp, Bovine  19866880783426
  misc_feature (1)..(1): n is a, c, g, or t
ncgtcccataaagtaatgattcaggagcatagtgttctgggtctgcctgggctccatcctcagaagaccctcagaaagaaatgaggtcttagtgttcaaaagttcccatcagtcttttcccttgaaaggccattgtgaaaagactgatgaaaatttgacatgtaaatataaccatgtgttgattgaacatcctttttcaagcaagaaactagcagttatttttagagacgtatgtgaaataaatattgccccctggaagcacattttctcacctctaacaccacatctcaagtggggtttggagtccacccaggccctggactttgacaggagagtgcctcttgatgcagatggacttgcatggaccagttctggggaagtccggattctaaataagtttggaaaccaagagactctttggtgatcaatgaaaatgataaatgggctggaaaagtgatcattgtgtgggaaggctacagaaattgaggtcgtttttttgtctgaataaatagactgaagaagaaaagcctggggaagctggtggggctttgcggagcagggcacttgataacagtcatcagatatactaaaagttatgtggaagatgtgagtaaggtcttttcagatccacaggggaaaaatgagaaaatacacgtaactagccactcagtcctgtaatccttccccaactgttatcctctgctcccaaagctatgcagagaatctgggagagtgtgtttcaaggccacacatacttttcactgatcctatgactttatctttttagctattatttttcaaaggagctcccaaacaactattgatccctgttgaacagaatatgagatcattagtaaagcacaagatttcatatgagcagccacattctctcagctatcacttctgtccttaaaagtcccctccttccccttggccaaggtcataggtgccttataaaaatgatgataaacaggcctcaacaatttcaagaactgttggcttttctcacattggattcaagccctccca

SEQ ID NO: 28418 - DNA, 1305 bp, Bovine  19866880790706
  misc_feature (1)..(1): n is a, c, g, or t
ngtcccagaatttttttccccagcgtaagatttgaagttctggtttacaatatgagttatcataagacgaggagctccaggttcattggtcattgcaggaggtgggggaggagggatgctattcaaaatctcttctaaacttctattatcaatttcctcacttggagtttctaagtcagtcaaaggaaaggaaaaaaagggggagaggggaagcctgcatcagtgcaatttgttagcctgctaatctttggagacgtcatttatgaaacctaggaatctctatttttcactcaaatacagtattatcttacattcacaaaggataacagtctttaggctttgtcttatgacaaaagaaaatttttgaaagagatgccatcagtcacaaaattctatagaaatataccttttaggagtcaatacactacatcgtaatgcaaatctggaaaatccacaatcacttgagtccttgcctaaacaggtggtcaaatcctacagctctagattcaactctcagtatctgttaagcatctggaaccctaactttggacactggcgagctcccgtgacagttacaggggtttcatgtcactcaattcctggactcacaaaacccacggcgagtgcgggcgtaggtgcaaattatcttctctttgcaatttaagatcaccgaggtgaagttgtacgatcaagcaacttttcatcatattaacaaatagtcacgctgacactgaaaaaagtccactctggctgaccgtgtcgatttccgcggaaacataagacaatgaacagaagttcagaattttagctatttactagcccccatccctccagcaccgttaaccgaaatttcacagtcgaatctgtgaaaatcgctttcttgaccttcgggtgtcaaccccgcagcccttttcgtccgcgccctggaataccaaccgtcccgggttgggtgccaggtctccacgcgcttgccctcggcgtcgcgaagggctactcacctgcggtggccagcgcctggctcctcgcgcggccgggcggcggatccggctccgcgtcgctgctggtgccgtccggggaccgcggcggcccttcctctctgcgatgggcagtggagggctgggtgcctttacggggcatggtcgctggagccgagggaaagccgggagcaagtcagcccgcgggcggccggccgcgccgtcaagttccccgccggcccgccacccgtcccactcgggtaaaactttgtccacccgttttctaaggctccgttgaaaaaccccgcgcaacgccagcgagttctcggga

SEQ ID NO: 28419 - DNA, 1296 bp, Bovine  19866880824048
  misc_feature (1)..(1): n is a, c, g, or t
natttttctaactgggagaaagatacccctagaggagtggccagattccacactcagtggccattgccataatatattcaggaaagctcaatgcacagaatcgaacgcattaagttgggagagtacttccttctgcttttttcagcttgtattcattaatgtattgtagcagtaactagaatgcacatgttgttctcctgaagttgaagaaaacttctcttgtgcttttagtttctagttaggctttttatgaaaggaataaatttttaaattattgacatgttgacagttcacctgcaagaaataaccactagcatgtttaatccatctttctaagtttgaccttttttttcagtttgatctttttaaacaacgaaaactatgaagttttactaagagaagtatgggggtttaaaaaaaaactggtacagtatctgctaattctttgcttgcattttcttttgcaagtcagtaaatatatttttagtatgttttatatgataatcatttcataataacaaccccaagtaaaaatagctttagttatatgggtgaggtcatgaaattaaactaccagtgtatacttgtctgtccacagaaggctaaacactatgtccttcccccttattatttcctgtaagtcaagtgtaggtcacgacacagcacagtatgaaaaatcaggacctggaaagaaagacctctttccctcagaagcagatgacctaaaacagtagaacttgctcctaaatttttaatttgatcaaatgtgtcactttttttccccctagattgagatagaagatctgtcttaatagatctttatatataataatgtaaaatatggcagtttagatcttatatgcataattgtgtatgagtatgggggctgtttaagtatatcctttatttcttagggcagttcaaatagtttcttttctttctcagaaactgaaacttaaatttgtaaaagaggtttaaatgacatacagtgttgctctgtgtgggttttgtcctttgtgatccccaaaaggaaatgagcgcccgaggggataaatgctcagagtcctgaaaccctgacacttctctgatgtcccctcctgccagaagtgggtgtgcaaaagatacttgggatgctcagaagtcagagtcacttacccaacccggtagaacaagtgctcaggtctcacgttgcctctacattcagtgccaaaggactggtcacattttctttgtcacagcgtttctcaaaaaggaaagtgtagggtcagttttcacttaggagaaatgaaagacgta

SEQ ID NO: 28420 - DNA, 768 bp, Bovine  19866880956819
  misc_feature (1)..(1): n is a, c, g, or t
ntgaggatgtaaagaaattttgagaccgggaagttttagaactactgatctaagagcttattatcgtactttttgttttcttttaaaataaatagaagaacagattgatttcagtgtaccagtgatttcagaacataccatcctataaatggcatgctttaaagagtactttcggagaaggcaatggcaccccactccagtactcttgcctggaacaccccatggacggaggagcctggtatgcagtccacagggttgctgagagtcggacacgactgagcgacttcactttcccttttcactttcatgcattggagaaggaaatggcaacccactccagtgttcttgcctggagaaccccagggacgggggagcctggtgggcttccatctatggggtcgggcagagtcagacacgactgaagcgacttagcagcagcagcagcagcaaagaatactttactgcaatttaaaatattttaatcccaaattcaatagtgaaacatgataaataaattacctttctgcttgcagaattaaactaacagttccttccttgagatcaaatataagtggtgtattccagttctttgtactgaaagacaaataaaatggatacttatttacacttaaaatactttttaataagtagatgggtattcattttaaacaaagcatctttagtttcacagtaactctgtatatgattctattatagcacttggtggagttgttctgaaataattcacttacacatctgtatacctga

SEQ ID NO: 28421 - DNA, 1075 bp, Bovine  19866881123570
  misc_feature (1)..(1): n is a, c, g, or t
nttaaacaacaggtaaacctgaaaatcatataagaaaaaattatatccatttaagaaacatataaataaatagtattacatcaatacaacactttcaacttcattctgtcacttaaatctcattaaattagctttagctgaataatttattaattaactaagtaacataaaaagattattttgtaggaatgaaattagaagcaagaatacaacactctgttggttttattgatgacaataaacaatcccacacagtaaaacgttaccttgcatccctttcatataatgttttaggcaaaatgtctctgtccacataaactgtattggggtaataccacactgtaaatcgagtatcttgaagtccacaaaggatattgcacgtatcactccacgccaaagtatgcaccattgttccttattttaaaaagaatgttaatgtattatttccattatataagtattaaaaacatatctttaaaattagctgatgcataagaccccaactaactgctggtaggtatgagtattttatgatagtgaaaacatgtgcaaaaattcacataaaaatttatggaaatatttgagcattttacccagaaccattatattttcaatctacatgtctttttttcaatgccactttagttgcagcagctaaagacttgctatcaaaatggaattaaatagctaagaaatgttaggagaccaaagcattattcacagattcattcaaacaagctatttagtataatataaagagtagatctaagaatactgaaaataataaacaatttaaatgtattacaattattttaccaagtttgataatctgttcttccttcccaaatcgtttcactgaagtgatatagagatctctatttttatcaatgaaagcaatttttctatcattggtgagtcccttttgatccagggcaatttccaaaacttcattctaaaatttttaaagaatgaaaattctggattagttttagtatttacatcagattattttaattgtttacttacaagaacatatgtttatttaaagatcaattaaatatcatttacctactta

SEQ ID NO: 28422 - DNA, 1139 bp, Bovine  19866881128063
  misc_feature (1)..(1): n is a, c, g, or t
ntgctgaagaagactcttgagagtacttggacagcaaggagatcaaaccaattgatcctaaagaaaatcaaccctgaatattcattggaaagactgatgctgaagttgaagttccaatactttggccacctgatgtgaagagccaattcattggaaaagaccctgatgctgggaaaaattaaaggcaaaatgagaaaggcagcagaggatgagacggttagatagcatcacagactaatggacatgaatttgagcaaactccggagatagcaaaggacagaggagcctggagtgctgcagtccatggggttgcaaagagttggacataccttagcaactgaacaacacccagggaggttagagaaacccctcccctcccccaaccatccagcttgagatgattggatctggagccttggttaggagctataggtaattaccatgtctgagcaggaccagtgaatagtatgagctgaggtaaagcttaatcctctctctacccaccaatgaaaagctgttgaactgtcaaatagggtttgcaactttgaagtaaaaatgtttcctgccacatatgatcaagatgaacaagtccacacctgttcatctggtccttggttagtagaaggaatgaaaaagaagaactgtgtgcctttgagctaaggcattttaaatacttattactgtgattcattttccagcattcaccttcattgcagttttcctttcatcttgacactgtaagtaatgcatgaaccttccccatggaacactgcagatctcatttaaatggtaaaaacgtctctagctcaggcccatttgctacgcaagaaataggaggtgtttttgtcaggttacagccaaaggattccttgtaacatggggacctctcattggcttccatcactgtattcctttaaccaatggtttctgttctttcagttatcctaaaaacagatggaaaaataaatggcttcatagcattgtgctgggactgagaaaattgtttatacatctccatccaaaacaaaacttcaaggacttccctggtggtccagtgggtaagactctgccttccaatgcagcggtacaggttcaggtccctattagggggctaagatctcacggcctctcggccaaaa

SEQ ID NO: 28423 - DNA, 1571 bp, Bovine  19866881135413
  misc_feature (1)..(1): n is a, c, g, or t
naaataacttaatggaatttttcactctgatcagatgtcttcagaaccagcttggaatgactgatcacattccaccgccactcgctcatctgccctccactagagcttgttggattatctggtggcaggatttgaatgatgttgtcctatggttggcgtctctatttaactgggatgaatatcttgggacttaaataaattgtttaacataaagagtaaaagtgtctctgtgccttttctctatgttgagagaacagtaagatagaataatggacttcattttagagaaaatcagataaattgatcttttcatttgtgtggatacttggagttttcatactctgaaatagaaagatgagctcaaactcataaccaactaaatgcgttatgccccagaaaaatctctgtggaaaagtgatcttacaggaaatctcagctccactctctccctcctgtgaagagtgtaatctttgttcacaattaaaatgatatgtttatatacagcagttaatagaaagactctctatgaatcctctgtttgtaaaaacagaatatttctttagtacagactctggtgtccaactctctgtgttgggatttgactctgccatttaccctctatgtgactgtagtcaaattacttaacctcgctttgcctcagtttccttctctgtgaaatgggagatacctcataaggtggttgagaatattaaactagtaaattcatataaagtgttaggggacctagcacatgataaatactcagcaaattaactttatcattattgttacagtataatttcctccttctggattattttagtggtctcttcactcttctttttgtttagtctcccttttccagttccttgatttagaaacccattctatatctgattactaagacagtcttcccaatgagcacactatattattttcctatccaaaaattcacattgagaagatcctgctacaaaataaagtggaaagcactttcacatattgtgtttttcacatgtaacaggtaactatatgcttatgaatcaatatacttatgaatcaatatacttatgaatgaataaactatctagatcactattggggcaggggtaggggaggggggcagaaaaaagcacatgaaaattattaattaggaaaattattaatatattttcagaatgagatgggagattaaaagggcaacagactcccacttcataaaataattcattaaattcttgatttggctttctgcccaaaacctgttagtcattccgacctggtcttagaagtctcaaaatattatgatatgtagtcatttgaatacaagtagataaacataaagttaagtagaaaaatttttaagatcatgatatctaataaaaggttttatagaagcacataaccataacaggaggggttgttaaaagcaaactaatgctgtcttacacactatatatttattgacctgaatttatataattaaagtggcaaaataaaaccctcaatacagttatgatttgggatactttgaaataagaatttctgccaaaaactaaataagcttatag

SEQ ID NO: 28424 - DNA, 770 bp, Bovine  19866881149306
  misc_feature (1)..(1): n is a, c, g, or t
ncccatctttcattcactcaggaaaaattttaggataatatgcttgtcttcactctctcatgccagcatctttaccatggccaagtctttacatgatctggctgctacttatctaactttgtgtcttctcctatctcactctgcttagttcatgttgacctagtcctaaagccttgttccttttaaatatcaatcattcccaccattgcatttcttttcctatagtcattgccctgccccagctctagaattctctatgccctcaccctgcattaattttcttcacagcatgtatcattagttgactgtatttgcttgattatttggtttttttaatgcacttttgtatcctcaacttctagaagactacttggcacataggaagcactcaatattatttgttggatacgtgttatgatacagcattgccttaaaaaaagttttactcatactgtggcattccaaaacacctgacatacttaaatttatttataaacagtaatgtggcctaaatttttatatgaaaatcaaaaattatttgtaactttctccttctttagtttaaaaatatgtaagtataaaaaatacatgaatatacataagcaaaataaatagtacaatgaagcacaacatttactatgttactaaataaagaaaaaggaaatactttcaataaacttaaaaattaacatacatttttaggactcacagtcttgaattaaaactataccaacagctacgaatatatagatttacttcttacaactaag

SEQ ID NO: 28425 - DNA, 1328 bp, Bovine  19866881201469
  misc_feature (1)..(1): n is a, c, g, or t
ntttggcatgtgtgtagtgctgcaagagtgcactatccggaccctgcataagcacagagcccacaggtcatggcccatgtgaactgcagcatggatgtcacactgccctgaacgcacaatgcaggcagtggccctgggccccagtggtggttaacttcatgtatatatttgtcttttttacatgactgaaactgccttgagggcctgctttctgtctttacggagagtaaatacccattaccctcctcctcacccctgaaattcagtgcccaaaatattatttttgcaacctcaagtcttgtagctattttatgactatatatttttatcatataaacttgaatttctttaaacctgggggcactaaaggccttcatattttactttagaagaaaagaaagagaaaaggggccatgatgagaaatatgctgttaattatttccaacaaaaaattttttttaccaaaaatttttttcttagtattttatctatggaaagtgaggcttctgtgatcttttcctttttgtaaataacttggagatgagtaagtacagtaactcagaagatgacagtgaattttgggatttattttggaaattttggacatttagggcaaattggcattttaaaaaatcaagttactgcttatgttacagtgaaatcacatttttttggtattgattctcaaaataatattattattatgtttttataagtgaagaaagtgaggctaagcagttataatgatttgtctgggtcatgcatataataattggatacttctgaccacaaattctctcctctttataccataccccaaagctttctttaattgcttctctccttttattttaaaggggcaagcatggctttttaataggctttaaatccattttttaaaaacattcacttcttcatcttatcttaaggttaaaaattaaactacaagccttgaaatgaactgtctctgctaacttggtaatgttttgtttcattagatgttgcttcttgagttctaacataggtgaacaatgttagcattacagagtttggtttcttaaatggaagtcatctattaaataaattaaaaacaaatgcttcttcaagttaaacaaacagaaatgtatcattatcttggcttagacgtagattttctactaacgttttacttgggtctttggaaaatctaatctgaaatcaacctggacatgatttaatgagaatggattgttttatcattactaatgcatttttgtttgattttcttatggatctggaagaaggtggtactagatattattggagagatatagaaaaatgcttaaagt

SEQ ID NO: 28426 - DNA, 4489 bp, Bovine  19866881297859
  misc_feature (1)..(1): n is a, c, g, or t
ncttatctgcaggagacagagtctttcctagttattttaaatggaagaaatggtgatgcttttaattggcaagtgaaaacttgagttacagtgtgtgaaaaaattttccattgcacagagagaaggaaatataagcctgtaggaggcccatcactcaaatgtttggtcaaactttacagcagaacaaaaactataaaaagaataatgagatggctgttgcttttccttgtgttaatgtctcagtctgctggggctgcaatagactgggtagttgaaacagcagaagttacttttcccaccattctggaagctggaagactaagatccgggtacaagcatgttagagttctggggagagctctcttcctgacttgcagacagcaaccttctcttcctgtgttcacttggcctttctcagcatgaattcatggtttttgctgttcagtggctaagtcatctctgagtctttgtgaccccatggactgcagcattccaggcctccctgtccttcactatctcccagagtttgctcaaactcatgtccatcgagtcggtgacgacatccaaccatctcatcttctgtcatccccttctcctcctgccttcaatctttcccagcattatggtcttttccaatgagtcagctctatgcatcaggtggccaaagtattggagtttcagcttcagcatcagtccttccaatgaatattcagggttgatttcctttaggattgactggcttgatctccttgcagtccacagttcaaaaacatcagttcttcagcactcaaccttctttatagtccaactctcacatctatacatgactactggaaaaaccgtagctttgactacatggatctttgtcagcaaagatgtctcagctttttaatatgctgtctaggtttgtcatagcttttctttcaaggagcaagcatcttttaattttgtgactacagtcaccatccacagtgattttggaacccaagaaaataaagtctgtcactgtttccattttatccccatctgtttgctgtaaagtgatggggctggatgccatgatcttagttttttgaatgttgagtgtgttcatggggagagagagaaagaaagtaagaaagttagatagatagatagatagatctttgctatcttataaggccactaatgttattagattaggaccaaatccctatgacctcatttaaccctaactacttcctaaaagccctattgaaactatacatctcagattgggacttttaatggagatcacacacctggtctcaggacttaatgaagctcaggttcttgatatctcatcacaaattcattgaaagacaaagtgataagcaagaagtggatttagttagaaacacacttcacagagtgcgagccatctcagaaggcaaaagcagcaccagggtatggggttgtcatttgtataggggtgggtaatttcataggctaatgagtaagaagagtactccatctatttgggggaaggagtgggaatttccagaaatggggccattgcctactttttgacctttatggtcagccttacaactgtcatggcacttaggtatgtgccatttaacatatgctaatgtattacatatttcctgaagctcaagttctagtggaagtcaactcgtccatccaccatcttggacctatttcgtcctaaccagtttatgtcatgtcctcagttgtatcattcttttaaaggttgtgccctgccccccttcccttctgtttcactatctccaaatatagtcacattgggagttaaagtgtcaacatatgaatctgtggggcaaggaaacaattatctctttgcagctttcttgaggcaatttcagatatgttatttagataacaacagacccagcctcacagtcctactgcacaaggaaaatttattgtttatttcaaaaactcttccctgagattatttggctgatataccagggacttcttggaaaagaataaatttggattttcccaactttcctcacccacatttccatatttctgaggtttctattacccacaaaaaatgctcattagttagcaagaatttgcttttccagggcagctgggttccaaaatgttcccttatttataaactggagccaagactttatcaaactctgccactctttcaaagccagctcaaatccagtctcttttcttaaactgttcttgactgtcttcccttgaactggcctctccatctccaaagttctgaagcagatatagtgtaaacctcggaatttaacacgtaaccacataatacagatcggaactgcccttactcagtaataactcccactcactcttctttggtcaattctatccccatgggatcctaagagggtcaagaattataggaatacacttctactctcatcccctgaacctccaaatttatctttaattgtcctctctgcttctgtctcctgcctcaaaagaagctattgtcatgattcctttgtaggtaaataactccgctagctttcttgatctccttccttctgcctctttcagaatttcagggcatcagttgtgttccttctcatgtttttagtcccttcttctccactgcatctccactcttttagattacaaacctgcttaaaaactctttgtcctaggaaggaaagaaagaaggaaggaaggggagagggagtaatggaagtgggggaaagggatagaaaagaaaaggagtcacatcctgttttgtgcccttcaactcaggtttatgcctcatcctgttcttccacttcactatcactcctcttaaaaaataatttgccacttagtaacacctttcacccatcgtgcatgcatgaagcgtgtccaactctttgtgaccctacaggccatagcccaccaggctcctctttccatgggattgtccaggcaagaatacaggagcacacatccatacatgactactagaaaaatcatagctttgactagatggacctttgtcagcaatgtgagctttctgtgttttaatatgctatctagaatgtcatagctttttttcccaaggagcaagtgtctttgaatttcatggctgcagtcaccatctgcagtgattttggagtccaagaaaataaaaatttgtcactgttctattgtttcccaatctatttgccatgaaataatgggaccagatgccatgatctttgtcttttgaatgttgcattttaagccagctctttagttcctcttcactttctgccataagggtggtatcatgtgcttaactgaggttattgatatttctccctgcagtcttgattctggcttgtgcttcatgcaccccagcattcagcatgatgtactgtgcatataaggaaaataggcacggtgacaatatacagccttgatacactcctttcgctttttggaaccagtccattgttcatgtcccattctaactgctgcttcttgacatgcatggaagtttcacaggaggcaggtaaggtggtattcccatatctatgagagttttacacagttttttttttttttgtgatccacgcaatcaaagtctttggcgtagttggagaagactcttgagagtcccttggactgcaaggagatccaaccagtccatcctaaaggagatcagtcctgggtgttcattggaaggactgatgctgaagctgaaattccaatactttatccccctgatggggagaactgactcattagtaaagaccctgttgatcagaaagattgaaggcgggaggagaaggggacgacagaggatgagatggttgtatggcagcaccgactccaatgggcatgagtttgagtaaacctcgggagttggtgatggactagaaggcctcacgtgctgcagtccatgggctcgcaaagagtttgacatgactgagtgactgagctgaactaaacttgctttcttatctaacaaatcttccagagttccctgctgcagccctggaatcaaccatttttctaaagaatggtggtttcttttactggagaatatttgtatcgtagaccaaggtctcagtgctaggtattctcatttccctagggatttctgattccaggctctggtggtgtatgaagtcaggaaatacatgcatatatataggcatacccacaaaattttacatctagttatttctatatcattaacttccctcctatacttcaaagttcaatataatactttaggattcattctagcattcatatttgaatatatttttttccaagtgtgaaacttggctccaatgctcttcattgtgttcatttatatattcatttaatccaccatacataagcaatctctgaatctttctgggatgctgacccacctgtttatgtataatgagtttttgactaattttgaagaataaaaggatggaaagagagaaggaaagaagtagggaagacaggattttaatcagtttgacatatctatttgtgtaacttcctc

SEQ ID NO: 28427 - DNA, 793 bp, Bovine  19866881351236
  misc_feature (1)..(1): n is a, c, g, or t
ncacttgcagtcagtgaggcttttgttctcgtagcagcgagtgctgacgtaaagtctcaaagaatccggtcctcatataagctgtgtgtgtccaggcacacgggagggaccactgtctgtagggagtgcaaacggcaataataaagtcatgataacttgtcaaagatgatgcgccaatgaaaaatcatttctacaagttcttttaattaaacatttggctgtccactggaaccatttttaaatataaaatgccagccctgtggcctttttctccccatctcccacccttctgcagtagctctgacaattgaattctcactggtgataataataaaattcataagacagagtacagctagttatgcctctagcaagatgtcaaatttcacttgcacaaaattaattgcacctaattaaactggggtcattggcattaccgtaaagtgaggctatttattagacaaagaaaatttcacaaatatcaatttgctgtcctttcaggtttgtaaaagagaagaattgcttacataattaaatttgttttgccattttaatagtgttagtcctcaaaagatcctcttcaaaatttcctttacttttaaaattgtgtaatattttagaatactggaggtaattcttggaggagggcataaaaaatagtaagagttttctgcagagtacccgatgacttttcaaatagtatattaaaaaaaagaatttgtaaactatcatttgcaatggcatgtaccttggaattactcatatgaaggatattctatgcaaattaatagtg

SEQ ID NO: 28428 - DNA, 1180 bp, Bovine  19866881662207
  misc_feature (1)..(1): n is a, c, g, or t
naagagggggtgaaggggcggagggggtgggagaggagtctgagaggaatcaggggtgaggtgatgtaagaccctgggggcccctggtgggatgtgggcttttatgccgaggaggagaattatgagatgggtggcaggctctgatttaggtcttaagagagcatttgggttctgcgttgaacacagaccacagaacaggggcaagggcaggagtagtctggagactgctactgctcgaagatgatgatgatgatgacaaaggtaatagcaacacacacccagacacgcgcaccgaattatccaaatgagtctgaggggaatggcctccgaagccccatgcagggtttctccattcagagaccgtggtatacaggacttcctgacagtccagtggttaagactctgcttccactgaagagggtgtgggttccatccctggtcaggaaatgaccatatgccaaaaaaaaaaaaagaaaagaaaagggaggggaaatatatatacctatggctgattcatgttgatgtttggcagaaaacaacaaaatactgtaaagcaattatccttcaattaaaaaaaaaacaaataaaatcagataaaaaaaaaagaaactatggtatacattatggatgaaaggaatcagtcctacaaataaattccttctactcactaagatgctaatctagggactttgttttaactactctattatcatccttaagaatagataaatcaataagcaagccttcatcagaaaaggggacatttctaaaaaacatcattgttgatattaccagtgaccatgataacatctagaacttagagaaactgccctttcagaatctgtgatgttaggtgggttctaaaactaaggtttccaagtaggattgagacatggcttcatggctaatatttctttatttgctgagttatgaacagagggagagcatttcaaaaggacagacacataaagttctataaaaccccatggagatgtagaatctattgcctattatcacctgcctattggacataattttattctaaaaataagcaataagtacttcaaaaactattgaacacacaatcagtgttatatgttgtagttcatataaaagaaaatcaatttgttttcctctggaagcagaaggctaaacaacccctcccctcctgatggcactg

SEQ ID NO: 28429 - DNA, 1225 bp, Bovine  19866881694815
  misc_feature (1)..(1): n is a, c, g, or t
ntatttaaatgtatggaagaaacttccagaatgagaaaatgacagaagcagtaattaaatctgaatggaaagttactgttcttttactttgctttcccttcaaatttgcatggaatgtgctacttataaactcagaaaatcacaaattacaaaaaacatgcaatttagacaagaatatctgtctagcagtcctatttcctttgttgtttggaagagaaatcattaaagagctaagaggggaaatcccagtttgaaagctggaaaccatcagaaaagatagtttcaaccaatggtgaacaattgctggaaaagctgtgtcttcctgttacttgtttgctttcagcttcccccacatctggggaaagcggaaccagttttgttgtctatagtcctcctcctgtgtaggcttatttcatggatcagggcttccaagcagaggggacccaaccttgcattgttgaattctagaccatcttgcataaacatctaggacctggtgttgggggctgtgagctctcctagctaaggggaaaattgtaagagagtaatgccgagatgtctgtgacttttatgcagtgggggctctaggccttccaccccagggaagctctggcttcagtgattggtcatcaggtattcaaccttccctggtggctcagatggtgaaagatccacctgcaatgcaggagaactgggttcgatccctgggttgggaagatttcatgaggaagggcatggcaatcctctccagtattcttgcctagagaatccacatggatagaggagcctggtggactacagtccccggggttgcaaagagttggatatgacttagtgactaaggacagcatcaggtattcaggtctcaagatggggcctcagtgcaactcaccaccagaaaaagagctggaatcattgactctgtcaaagtcgtgtaagaaaaaaagagtcccttactgcatggactggtccacagttttcttttaaggagaattagtgagatgtttaattttctcatggctatcaatgaaaccagcataatcacctaagtactcccttgcagcatgccagtgagcctttgccttaaggcttgttgcccctgagaggaagcagagacactgatatgaatatttttaaaaatatttgcttatttggctgtgccaggtctcggcggtggcacatgggatcttcacttgttgcgtgtgggaaacagttccctgcctgg

SEQ ID NO: 28430 - DNA, 997 bp, Bovine  19866881782609
  misc_feature (1)..(1): n is a, c, g, or t
naaaacgtattggttatttaattaacccaattttacactgatgatatgattagtaattctgtttgtaaattgactgaatgtgctttattatcttatgattgctctgattaaagtttttagttcaatataaagtgtaacttaaatactctctctggccagcaatatgaaatatgaaaaaaagaaaattacagtttgaggatttcaccacaaatcctgctaatcgtataaatctgtgtctgttatgctttatcttgcagaattcagaaatgaatgaaaaatgagattcccccccctcagtttgtaaagtaaatcaatattttgttatttatcaaagtgacaacatgtttttatgattttaactatgttatttatatgattagttgtctaggtcttaacattttgtgtccccagatttttttgtttgggtctatttctgacttactttcatgatctcttaatttatactgacttagaagtatgttttttaaaaaaattaaataatttaatacttaactggttaatcaaagagtcatattactttacaaacaaagagatttatttatattccaacatcttcatggctaaggacataatttgtggcctttcagatatcccatgtcactggaagagtttttggtgtcaactgttttgactcaatattttgaccccaaggacatttttaacataaacatttcagttagaatcacaccaacattaaaaaatttggttcaagaaagcactttctggagtgaaaatcattaagacaatttaattccctgattaattttctatagagtgcatttaatggttttccatatttttccactttcttttttattttactaaaactattttcaccagaatcaattctttcatttaaattttatgtcaagtgttcattttttgtcattaagaagttatttcttaagtgattataactttggccataatgagttttctcttttggtcattatttctacaaagttcaattttcttg

SEQ ID NO: 28431 - DNA, 805 bp, Bovine  19866881800080
  misc_feature (1)..(1): n is a, c, g, or t
nttataatgcaggagacctgggtttgatccctggatcgggaagatctcttgaagaagggaatggctacccattccaggattcttgcttggagaattctgtggacagaggagcctggtctttttttagtttgagggaacaggttgatgtcaaaatgcaggaaaacatacaaatgggcagagttaaaatcagatctgaccatagaattttttttgtttgttttgagttaggtgagccttcattatttttgtacatttattctttttttttaaatcagggccacaaagatgtgagacccagactgggtggtggcacttcttgaattttcccagacttacagctgactcactgtcttaagtactagagcaagtcatataactctataatgtagcagatttctcttcagaggtggtaaactgtaatgaatgttttataaccattcatatttagagatgaaagacaatagtgcattagggaattaaggcttttaaaaaatagtttacacaggagaatgatatttttggtatgcccagttctccatcatctgctgtcagtgctgaccatacataataagctggttagacactgtggagactccatagaacatcaacttgctggagaaagactgcatgaaaactttagaagttcaataatgtgtttgtttttacacttaagcacaagaaatctgagaaataatttataagtagatgatttagcttcaggtttatttctgaaaagatttcttttttatattcatatttacttggtgacttttaaaagggaagcaggaaatcttaactaagttat

SEQ ID NO: 28432 - DNA, 1183 bp, Bovine  19866881833228
  misc_feature (1)..(1): n is a, c, g, or t
ntttaaaaataaaataaaatttaaaaaaaaaagaaaactttaaaaagttttctttttttttttttttttggtaattacaactaaagatcctaaacccaatatacagctacgtatgttccaaatatcagctttcagaattttggacttttaactcacatgtctaattgatctgaaagaaaagggcagaacactgtgtacattaagaaatggccactgatccctcagggtcccctgatctacaggtgctgtgttaacaatattgtcacacaaggtctgggttactctcttccttgcagcaagtgagagttgcacagctgagtgagaattttcttctttatttcctttttatcattggtgggagaaacaagcataacagcatttccccaaacttcttataattctgcagaaggtttgggttcccagagaatgaggagaaaaaaaaaattctaatgcaaaaaaagggggaaattgattctcaggtgatgtttctttaccttactttttattgtaaaactaagatcattacaagtaatagaatattcttaagcctttggtgagtctatgtccctaataaagattgattttattatttcatattttcttccagttcctaattacaagcacatgtaatttttcatacagttgcaatcatagcataagtaaaattttatatttgtagggttttttcctgcttaatggtaatctataaaaattacccacattatccttggcatcccccaaattatcataattttggtgcctgaagaatatttcattaagtcactgatgtaccacagtttacttgttcagtggacgtttctcttctttctgggttacttttctccactcttctttttgctggttgtgttatcagttggactttgaaaaactcttccagttgagtcacttgacttgtcataactcgatgttacccaaactagccatgttccacagaacttctgatgtgctcctaataggggctctgtgttggggcagggaaaggaggcagggggactgggagaaggggaacctgtccacaaatggacttaatagacagatcttggagttttagtatcacatttatgtattaaaggctccaagaggtctttcagaggaggaacttacttgactttaatctagcttttccaaactttgaccgtcaagaactcttcctgtgatttcc

SEQ ID NO: 28433 - DNA, 760 bp, Bovine  19866881908475
  misc_feature (1)..(1): n is a, c, g, or t
ntgcttaggttctttttatttttttaatgtccccctcctccgcccacagtgtaaatgtgtgagaagactgtaacgtcatttctaaacgaagttatatcccgcacgccgacatttacggacattcccacactctcggggctggggatcaaagcgcacagattcttgtctccgagtccgtactagctttaggtttgaggggttctcaactcttggcagagcagtcgggaacgaagaggcggttcgccgcccacattcctctccccgccatagcccttggctcggctggcggctcgggggctttgaggtctccttctactcgccggccggggaccggcggctggggtcgaccgctcgcgattttcaaatcggaagccggcagcgccaactccgcttccatcaccttggggtggcaggggtttgtccctgaggtccgcggcgaatcccgctggacaataaactacgaaaggccaccagtaagggctcagagctagtggttagtccctcgggagaagagaaacgggcagcgggccgggacagggggcgacgcccgtagtccgaccaagatttctaagaaaaaggtccgcgagggctgagagggcccccagccccgcggccccaatcccaccatcgacgcttaagtagctcagagaagtggcgcccgggagaagcgcgcgggagcttcgaccgccggggagcgactgaggggggaggggtgacagcgagcgaaatctccccgaggcagcctcagcctagacttcgg

SEQ ID NO: 28434 - DNA, 753 bp, Bovine  19866882028417
  misc_feature (1)..(1): n is a, c, g, or t
nctgtagcctcccaggctcctctgttcatgggattctccaggcaagcatactggagtgggttgccatgctctcctccaggggaatttcctgacccattaaatgctaatggtaagtaaataatcattcaataaaagttatttgtgattggtacagatcaaatcaagagttgagttgtgttgatggagcggactcttggccgctctgagagagggctcagggaaggctatagtccatctccaaaggtggtacccagcacacaaagctcaggtgctgctttttttcccttcgcagagcaaacagagctcttcctattcagatagagacactactgaagaagaatccgaatccctggatgacatggatttcctcacaaggcaaaagaaattgcaagccgaagccaaaatggcccttgccatggccaaaccaatggccaaaatgcaagtagaagtggaaaaacagaacaggaaaaagtctcccgtcgctgatctcgtaagcagcaagcgctgaaacgcaactgactgagggcttgcatgccgtggttggctggcgagtgttggctgcaaaaggttgaggctgtctcagtcctttcccagagttatgcaaacttgggtttctagaaggcactgtgtaaaacgtcattgagaaatatttaagtctgtttctttttccttcctactgtatcacagaaggatgcataagctacagatttcacaaacgtaaactttgctccccattcatatctactctgtttt

SEQ ID NO: 28435 - DNA, 1605 bp, Bovine  19866880347346
  misc_feature (1)..(1): n is a, c, g, or t
ntggtaccccgctggcctgatgatgatggagttggtgatgataaaaggtgactttattgatccttaaaacgttccagggtcccacaaacatgtgtcatttcaatgaatctcaccatcctgtggagaagcaactattattacccacatttcacaaatgacaccactgaggctctgagggaaataactgcctgaggtcatacagctagtaagtgatggagctggggtcagaccccagagcttgtgccctaaccactgtacctcctgccctcacaggggcttgtccttcacatgagctggggagcagatggcccctggcttccaagatctgggacaagcgatgcacggagcagtttaaggtgggagtctgaggcatggtgtggggggtccctgcactgggctggggccctagtcacagacctgctgaagctcaaccctaaaggaagggagaggctggaacactgggtgcagagctggcctggcactcagggtgccctgatcccttgcacacctcttccaacctctcccagagggtgcgagtcctgggggagggaaagtcatggactgagttcccgaaaggcatgtctgagaggaagatggccccctccccaccccacccggggctgggagatgctcatctgagggtggggacggcaatctcaagtcctcagggaaggaccggcagcactgggcagactcactgagctcaaaaagaacctttatgtcagtctcggaattcagactttattcctggtgacagtgggcagccagggcgggcaggggcgaactgggaagagctcagtaactgagaccaaggaagacagtaagatctgagagctagcagagggttaggggtgctgaggggggacccgaatctggaggtggctcagagaatttaatcgaccacaggggtgaagaagagggaggtaccaaggatgacccaggcatctcccccagccctctgggggcttcgatgcccagctttgctgaagcagcggctgcctgagtcaatacgaattgaccaggaccccaaggagccctgggcccctccccccaggaagccctgacttgggggagggtgctgctagccggcaggccgacaccagccccactctgtcccactgctgacctttctcctttgtcagcactgctctccatcaatgcaccggaagggccagtgcaatctctcccgactgcctggggccagggctgggggcgggggcccactgcgtcttccctcttttaaggaagaggtttctgaagcctctctggaaggccgggtgcagaggagccaaagccctcagtgcagatggggagcctgaggcctgagagaggtggctcaggacccagcaaccagctgcaggcacagccctgggcacagagagcccctcgggggtgacccacagcccccgagctggcagaggggagggtgaagaggaggggaagctggatggggaggctgggtcaggccatggagggatgggcaaggatatctggtgagaagagggaccaatgaggtgtgggaagggggcaggggcagagcagggctgtgccccaaagtcaggaaggggtccggaggcggtgatgggaacagttgtggagtggaga

SEQ ID NO: 28436 - DNA, 1445 bp, Bovine  19866880348535
  misc_feature (1)..(1): n is a, c, g, or t
nggtctcctgagtgaggggtctgtcttccctgcaacggagcctctgccctgcccccaaccctgccggctggggggaggtgcaccagcactgcaagaggggccttgcccccatccccagctcaaaccccagcccctccaccgccttgtgctgtgaccttgacacagccctcccaactccaggccacattcttgtctaaaacaaaggcttgaattagactccgggagaagcagtaggcaatccagctcacagccccatccaggatagttttaggggtaactttgagggttttctgcctgcaatgtaggagacctgggtttgatccctaggttgagaagatcccctggagaaggaaaaggctacccactccagtagtctggtcgcaaagagtcagtcacgactcctaggggttggtgaggggtttcagggaggcatgcactccagtgtaccccagatcctctgcgcccaactcaggctcctgtggcggctgaacctccctctccagggactgcccgtcaagcaggatgcccagctcagaggtgggaagaatcattcgtgtccacccaagccctggcagccctcctaaactcaaacaaagtcagtgatctgaaggggcagtctgaccctgacactggaggttggggaggatttcacaaagggaagtttctagctccctggtggggacagctccctcacctccgagtgagtgagtgagtgagtgctcagtcactcagtcatgtcggactcattgcaacgccatggactgtagcccgccaggctcctctgtccatgggattttccaggcaagaatgctggagtaggttgccatttccttctccccctcacctctgaaccacccctttaaaacacagcagttccatggaggtctggaaacctgagctccgcctgagccggtatctgctgccactcaggactgtgctctgaacttgtaagggaagacagagatcacaccgcacggcctctctgctctgtaagttgcgctcctgccttcggccaaaatcaatacagttctccactatgattgcttcaccatcatgaggggccaggccccttgtgatgacatccccaccccggcactggcggaggatactgagggtcccgctttatcacccagcctcagccccacgtgaagaagtgtggggtgggggtcgggtggcgatggggggcagtgcgggcgaggagtaggggggctgccccaagagctgctctaagtgcctctccaaagacaagcccggtgctattcatcaactggttttcagggctgtgagaaatcaatggcatttgtgctgcaaactcatcattaggacaggaaaaactctgcaatggaattgatttgtttaaatataataacacgatttaacagagaaccaagggggtggggaaaggacccaggcaaacaaaacacagggaggcacagaggaaccag

SEQ ID NO: 28437 - DNA, 694 bp, Bovine  19866880356895
  misc_feature (1)..(1): n is a, c, g, or t
nattgtgctgctccttctccaagagccagcttcctcttctggaaggtaagggtgctggtaatgctaccgtcttggattccctgctagaaggcagaaaggaggaaccatgtcagtgttcaacaaactcctgactcaaaataacctttttttttttttaaaggaaatgttgtggtaagttctataggactgatggactcaacctgagcttctccaagtgtggtccctggaccaacagcaacagcatcacctggaaatttgttaaaatgcaaatttgcaagcatcagcccaaattctgagggtgggacccaacaatttgtattttaacaagaactccaggcaattctcacatctcttaagtttgagaccctctgggctaaacttttcgatttctgtggacccacaggagggggagatcattgtggatggtagatccacaaggaggattgatccacattgaggatggagatcatgtgtgcttatgggccatctccaaagaaggccttagaaatggacattggagggtgaggagttgctgggtgccgggaggcactgaggtgccagaacggtgatcaggagcaggaatgttgaagacaaatctgccaaagcctgacctgctcccaccaatgcccacaagactgggagagtgagcgctgaaatcatgaccaggattcagatttgaccctgactgaatgat

SEQ ID NO: 28438 - DNA, 815 bp, Bovine  19866880365022
  misc_feature (1)..(1): n is a, c, g, or t
nacaggccctgtgtgtggggtggcgtggggggctcagtcagggaaggcatggggggctgctcactgggtgggcccaggcacatctgtgagcaccaacccagatcctcagccacctgctggcctctcgtcccatacctagaaccctgggggctaggggcctaactctgccagggcaccctcatgccaagggtcccttgctcactgcacacatctgcccagggagtgtggatctggagggcagccagcagtgggttcagggtgggtgggcctctcttggccaggggcggggggaggctgagatcaccagctgaatcaccaaggttcatagttctgggttgggtttgaggttctgcatttctaacaagctctggggtgacactgatgtggagatggctggctgtacttgaaggagcagggacccaaagcatggcgtggccattcctgagaagagtggtgactggcatctcagaccccccactggtcttggagggacccagccctgcctggccacaccctcagctgccaacatctggagggcaagactacacggattttctgagtttccaggattccatttccattacacgtataaaataaaagtagtaccatgctataaaaacagtggaaagtacaaaaaaataataggaaaaaaaatcgctgataatctcatactgtatgtaacacaactgttaacctctctccccaggattccaaaaccacatctgtcagagtcaggggtcatccagtgagtggggtctgcccccagagcctcaccttgttgcagcgaaacactaggggagagatgggagctgttc

SEQ ID NO: 28439 - DNA, 1915 bp, Bovine  19866880425218
  misc_feature (1)..(1): n is a, c, g, or t
ncgtgctcaccggtgtacacactcatacccaggacagcacacaagctgcgctcggggcatctggggggcccgagcaggggcatggacagctctgacgcacgggcagggcccctgcagctctggggcccaggagagcgggtgcggggagcaggtgggcaggtggccatctgcagaaccatgcgggaactcgtggcggccgctgtgctcatggggttgggcctgtccagagcaggcccataaatcaggaagcagcctgccgccagcgctaaatcactacctctaggacatggtgcttagaacagagaagcagctggcatcaggcccaggcccaccgttggggtgggggctggaggggacatggtatgtggcaccccctccaccctgtgccgctgccccctcctgccctgtgtctgcccgccttgtcctaagggcaggggctaattcctcccgcagtcagaccttctctcccactcgattcctgcctccccctggcctttcctcccattctacctttcttcctctgctcctggccccagactcctgagttcaccccctaggttgagtgctgccctcccactccgagcactgaaggcttctcccagtgtctaatgccttaggacctcagagggctggggttgggggctgtggagagtccacttctgggcaggaacacgggggtgccatcaccagacctgggctgtgagcccagaggcactcccagctgtactccccagagttacctccttcttcctggcctcgagcactccactttccaatctgtaaagtgaggactgactggggagagacctcctggggctgcctgccctgaggatctgaagccagggaaaagagcctccgtggatgctgattaattatgattattaataatacaaccatctgtatctagtggtggagtgaggatgattaaaactgggctccaggctccagccgcagaatacatgggtttccaggtgggctagggtgtcaccccctaggcctgcaagcagatccctggtggctatatgtcggggaggggctgtttatactgcactgcacggacggatacaaagaggagcgacatacaggaaggcagacagacagacggtggggagctggctcatcagctgatgaacagtagacaattaccttgtgccaaggctctgggcaggactctctctgcctaccactaggacagaccacttggtcttcccatctctcctcaaccttcgccttagcctgcagcagagccaagaggactcgacgattcctcagtgctcagcacagcggggggagcccgtgcactgcccaaaggggtgagcatggccagctcaccctcgagaaactcaccctgagccaggcactgctaacccattaattgtcacaacagccccatgtgatatttacgcccatttcctagatgagaaaactgaggcacaaagaaaatgagtgttagtcactcagttgtgtccgactctgtgacccatgaactggagcccgccaggctactctgtccatggaattctccaggcaagaatactgaagtgagttgccacttccttctccaggatatctttctgacccagggatcaaacccaggtctcccacattgcaggcagattctttaccacctgagccactgtggaagccaaagagatagaggaatttgccaaaggccatatggccaggaagtggctgaaatgcaaagcagaccatttggcttcagaggtctcatctacccgggtacaaagattccaaatgaatgaatgaatggataacatttaaacagcaggatacataaagatttttttgctagttcatctgatagttcatctgctttaaactatctctgtgagtggaaggcaaaatggccagaaaatacatgtcatgggttcaggctaggtctccgaattatagg

SEQ ID NO: 28440 - DNA, 681 bp, Bovine  19866880460126
  misc_feature (1)..(1): n is a, c, g, or t
ngtttaagcatcaagctgacctgggctcagctcagctccatcacttccgtgctacatgtgaccccagctgtatctcccagtctctcacaaagcgataagtacaaagtacttaactcaagctggcatctcagaagggcttcgtacataaccattttgattattacatcctgcattacagtacagtctctaaaacctacttgctgcatgagttcatgcaaatcacttcacttttctaagcttggggtccaaaagatctagaatccgggtctcctggctggagcggcagcaattctgtttccttggcaacccagctgcctctcaagggaccatctggatcacgtcgccctggcaaggtgctgcccaggcaaccaggtgtttgtgttctgcagtggaagctctgcaaggtggtaattcctctcactggggacagggtggtggccaggcaggtggctggaaggaatcctcgctgcctcagtcactgcctgcccttgctattcctggtgcacagagaaaccgactccagagcttgggaactctagccaatgactttccttgaggagctattaacagatgcttcattatattcctccgcacattttctggcttgtcgaggctggccaggtggaaaacgctgcctggggctggactcctgtagggaattccaaaagacccagtcctcac

SEQ ID NO: 28441 - DNA, 1621 bp, Bovine  19866880483932
  misc_feature (1)..(1): n is a, c, g, or t
ngcagggactggagacagctagggctccgggggcatccctcactttctctgtggtccctccttgtggtctttccagactgtggcttcagagagatggacttcttcatggtgactgaggacccccagattctctaacagatatccatgtttctccatcttatataacttgacttttttcctgacagtaaccttaatgttcttgaatgtttggagagttcccactccgtcctgctatgaactgcatagcaacacgtcttctgttaacttgacaatgacaatgaagggcatctggtccaaatcacttcactttaattcctgggtttcctcctggatcacagaactgatgggggagacatctccgtttgaagacagacatacacacacacctctttgtcatgtcaggcctcccacagtttttccccttcttaacaacactctcacgtcccttggagggaatctttttccctctacatcttctgagtttataaatcaatgtatccaggtgcctgagccctacagtgtaaaccagaagtccgcaaactttttcctaaagggacagataatatattctttatgttttgtgggccaagaggcaaaattgagactatgatataggtacttatatatgacttgaattatggtaaagcatcaggatgcagagaagacatcagattaaatagctatttagggggcttccctggcggtccagtggttgggaatctgcctgctggggcagaggacatggcttcgaggcctggtcagggaacagggatctcacttgccacggttacttacactctgtgattacctgcatgctgctactactgaagcccgagtgccctagaggccatgctcggcaacaggagaaactgttgtggtgagaagtcctgcatggcaactggagagcagtccccacttgtgccgctagggaaagcccacacgcagcaacaaagacagtgcagccaaaatgttagagacagagatttaggaagtcaagtcatcaaaacttggttgttaagatcgtgagagggatggggaaattgcagacgaggccaaagggcacaagagcaacatccagagaactgaggcgtgctgcgttaggtggggttctccagaggcagacctgagactgagatccgtgtgacagtgatttgttgagggactgctattcagaacaacctgtacgactgggaggggtggagcagggagaggccagcgttggcctgatcacagagcaagggcttcggagcataaactgtactacatgacatcttccttaaggcagagggccagaattttagactctgttctagccattgcttgtgggctgcccctttggggtataagtccccagataagacagttcttgacacctcagggccattctctagagaaaaggcagctgtgggctaagagcccacactcacggtaggtctgggctttggccctgcagagggatgtgggcagaaaagagcagtgtttcctatagtccttgcactgctcagacccacctgcttctcacattaagctgatcttgtctgcctattgacagaccagagtcattattggtttgggttgtaaccaaaggatagtatccaccctcacagggtgtcatctccaa

SEQ ID NO: 28442 - DNA, 1342 bp, Bovine  19866880523577
  misc_feature (1)..(1): n is a, c, g, or t
ngtaattgggaggtgccttgtcctgtccaccctccaggaggtgcagctcacagcctccccccacatgcactgtgtcccttctgaggactaggtaggacagggattaatgcacccattttatagctggggaaacagaggcccaacaagggcagtgagtcgtctgaccacccaggcagagtctagtccctgctccctgccccaggcctgggttatccccagacctcctctacatagctgggtgagtgaaggcagcttcagccttccctgaaggtctgatcttcagaccttgatcttcctctgtaaactccctttgtggtttttatggtgcatccaagctcaaagatgccagaaccagggctcgtatccagcctttccctgcatgtgcctgtgtatgttctggtgacctgtgccggtcaggggctgacagtcactcagtgagaagcactatgatgggctgctacactccacattgtaagggaagggcaatcagatatcaggtcgtgatgggcaggaaaggacttacaaaaatcataacttgcatccctgagcgcttacattgctacagacatgaggcatggttctaaatacatgcgaggtactacacacttgaaaagtaagtacaagaatcatagccattttacagagaggaagccaggcatgcctggatggtcagggtctcacaataaggagcagaaccgggactagacccaggcggctctgctctcagccatatcactccaagtggtgttaaatcagtatgttgccgccacctattacattagaggtggggaaactgagaccccgtgtgtgaaccatttccattggatcatatggaagttgcaggtccccgtgacccacaccttgtgttggtaggaggttccagggacaaggttccctaggatacgggtctttgcctgcctgtttgtgataagcccttgacaacgtaaatagccatggcttggggaaacaggaagggcagacagagggccctagcacacaggccatggcaagatgagctaatggctggaaggagaggctcacgtgcctgggttgtgcttcccacccacgggagctggtgaccaggaaggggattgtgctgggactcttccagggatagagaggcctggcctccatctcctccaccaactaagcaactgtgtgacccggggctaggcctggtcctccactgggctacaccagctttgtctctaaaatcagggctgggttagagtcagagctgccattctacaagtaaatatagttagccctccatatccgtgggttccacacccacagattctatatccacagatggacagcattggggaaaaatttttcagaa

SEQ ID NO: 28443 - DNA, 582 bp, Bovine  19866880523945
  misc_feature (1)..(1): n is a, c, g, or t
ngggactcttgacccgacgaatttaggatcgctagaaaatttctaggtctagactcctttttgccacaggatgacacaaaccttttttgtttaagtctttggatttttcaagagaagtcaaaaatttggattttttgaaatatcaaatttcttggtttaaaagcacagttcaggccaaacaaagcaattcttccaagttaaatctcaggcccactagtttgcaaccccagctgaaattccaagcccagaattttcacatggggaactgagacccagggtggtagtggcagtggtttagttgctaggtcacgtctgactctcgtgacctcatggactgtagctcaccaagctcctttgtcggtgggatttcctagacaagaatactggagtgggttgccattccttctgcaggggatcttcccaacccagggatcaaaccctgtctcctgcactagaggcagaatctttactgactgagccacccaaacagggaaagtaaatctctaaaggatatagagcaagtaaagcatgtaggggctcagaccctggaggtcaagtttcaagattagagcttcgggcgtc

SEQ ID NO: 28444 - DNA, 1094 bp, Bovine  19866880589915
  misc_feature (1)..(1): n is a, c, g, or t
ngtggcagcatggctccgggcctagcgttcaagtgataacatctaggatctggtgccaaattagtgtgacctttggcaagtcacttcccctctgggggcctgtgttctcatctctgtactgagaatattgccctgtgtctcagctctaaatggtagactccaatccaagagttaaactactggagtcttgagctagaatggacaggagggtgatgaaggcttggtcctgcctgtgggtgctacctacccccagcatctgatggtacagcaggtgatagtaagagatgccgggatgaggaaaactgaatgaatagagtcttgtgttccacgctccaggagctggagaaggaggaagggaaagtggtggcttcgggactgggatagcctgaaacttcccaggcggtccttgaatttggaaatgggtagaatttggtgtcttgggtgagaaagggaatgaatatcagctgggacacctagggaggtggttcctccaggtgaagcaacagagacgagtacaggaagtggagtcattgctgaaacagatcttatcccaggagcacaggtctgatccccaggggaggggagagccagggaggagccagggagacctgtggggctcccaagggcttccgggaacagggatgttgctggcttgaggcagaaatctgtgcagggaagtgggagagccctgcgaggtcggagctctgctgcgggaatgtccctgcctctgctgacgcaatggaaagcctgtcgtgttgcagggttcctgttctgcggtcgcccatggtagggggccagggcagccagctcttctgaggagctctgggaacttggtggaacttgtccaggcctcccctctgctctttcgtggaaaaaaaaagagaaccttgtttgtggaatctgcccctagtccctcgggggttgcagccacgccctgggagggtttaaatctctgtgggcggttccctggggctgggactggaggggacaggtgacaggggacaacctctaaactggattttggcctcacaccctctcagtgcccgctaccgggcagagcctgaggcagctggtatttataggcacccggtcca

SEQ ID NO: 28445 - DNA, 3057 bp, Bovine  19866880598796
  misc_feature (1)..(1): n is a, c, g, or t
ncttagagtgaaagcttggtgcttagtgttttcagaaacctcaagtgaatctacatggccagaggagggcgggataaaaattatacatcacagccaccaccacccccacacatacacacaagagaccaagcaccctgagacacaccctggagccctgatcctcaactgattccctgactttatcttcctcctcttgaagagccttagtttccccatgtgcataatggagatgctgcacccagtgggtgctacgggacaggagtgctaggaagtcctcggtgtccacctcctctgcctcccccaagccaggccacccttggactcatgccccacagagtcccaggctggagcaaggacatgacagaaaacccaggacccatgagcaatgcctgccactcctcagaaggtttgggattggggacaaagcaagtgaggcactgaagcctgacagagcaccctggttaatgcatgccccatactggcacccagggcacgatccaggtgaatgccacccgcaccagcaaggcaagccaatgggacagctgtagtcaggatgcaggagacttctaggtcgagctctgccactgacttgctgagttactaatcaggcctctattttctcttctgtaaaatggggccatgaagaaaagatgcctagaataaagcaccacctcccaaagtaagggacgcttctccgcagagtctttctcttggtgctgaccgcgcctgactttctgtcactgctaattccctattactaatgctgcctgctttcctcccttccacctgactcagaaggtccatgaggtgtggtctccctccgagtctaggcccgccctgtcaactgaatctgacggagggagggtcacgccatctcggccaacaggccctcgaacgacggtctcccttgtctgagtcagagctcagctttccagggctggccagagggagccgggcagcttcccaagctcccagctgggctggaacggctgttcctcccaggccctggggctgccccccaccacttcacacagaccacaaaggctgctgggaacaaacctcagctcctgaagcccattcaacccgttaggcaaactcccaccttcaacaaataggtggctttgttctacacatccatgccagtcgggcagcccctcggctcagatgcacgaacggacagcaaaagtgatatatccaaaccttcagaagactgtcaatacctgctgctgctgctaagtcgcttcagttctgtccgactctgtgcgaccccatagacggaagcccaccaggctcccccgtccatgggattctccaggcaagtacactggagtgggttgccatgtcctgctccaatgcatgaaagtgaaaggtgaaagtgaagtcgctcagtcgtgtccgactcttagcaaccccatggactgcagcctactaggctcctccatccatgggattttccaggcaagagtatcgggagtgggtgtcaatacctaggaccttttaaatcaggacactgaggttaccccctcaaaggtttctaacagcctcatgtgtgtaggagcctgaagccctgtctggtaagcctcatgagacccttactgctgttctcaaatctccagtgagaccagagaggcaaagaggagggtgtcctcggtgctacgaagatagcactaggacccaggagggcatctgggttaacagctgcaggaagagcctcccacgggttgaaaatatccaacaaggaagaggtctgctttgatggagcacgccctgaacttggaggtattcagaagaatgtcgggttgaggaaaggttagcaggctctgtcctgcaggacttctcagagcctttactgtgttagtgggcagtatgtgtctccaagggaaggatactaggctgtgttccccaaatgtatttgactccaaagcccgtcccctcaacctccacagagcatcacttgacagctgagccacatcttcaagccacatctggccctggaggaagaggaaaagaaaacagctgccctaaacatctgacctggaatgggacagctctgtctccctaagagggtgcaggagctacccaggaggggctcttggcatcactcggaggtgcttaagcactaattctcaacatgagggtaactctacttttctgcaggtggagtcccacagcctccacactgctgtgaatttaaattccaaacaaaacctggcagggaagaccccccaccctcatgccaccaaccccagctgcctataagacctgccttcctcgggtacccggagaaagagaggaagggcatagccaagggcctcacaaatttctctccaaagacatacattaatagttgttgccacagatcagggttgaaacaggggttcattcacagggtctagtttctatacccagaggcctttttaagaactgcaccaagtacctgtgtgtgctttggcctggcaggcttaccacactaagaagccgagaaaacccccacaagcaaccacccccctggtgccagtttctgaacttgcccatgaactccaccatctccctctctgctcccggagccagtgctccactcagaacccttggcttatcttcagcttccagagctgaggttctaggggcacaatgggcttctgtgcccccatgtcctcagcccccacccccgcccaaaccccagctgcattcatggtgttctgctattgtggtgggagcagcctgggggtggtgcaggagggggtgggctcttggcacggggactggcgcagacaggccatggtcagtggtcagcatgcaagtcacatccgcaggcactgccactgggcctgccaggctctgcatggaatggtgacgctcctggggccctggggcccttcgcagagttcctgcaggcccacacacaacttgcttcctgtcggacaagccccttggtggcattcaggtggggggtattttttcttgccttctcaaccagttgctattttggagccatattaggtcaccagctaagaccctggatgcaggaaaggcctgtccctagaagcacagctgggg

SEQ ID NO: 28446 - DNA, 1655 bp, Bovine  19866880612214
  misc_feature (1)..(1): n is a, c, g, or t
ngcctagggagaacggacctgaccacatcactaagaacagtaggtcccctgggacaccaggcctggctcggagtggggcggctggggtggccccagggggtggcctcttgtgccagctgcccttgccgctgaaaccattttgtctcattctccgtgaacactgggattcaacgttgacagaaagagctaggattagggtgaagggtggaagttcccgcccactcccttttctagggaggctgagcaggactggtttagggcttacctgctgtgggtcaggaggccagtttcagccctgctggctgcactgcctgtttatcctgccccggttaatgtctcctcttcctgggctgagaggcctgacaacattacctagagagaagtgcgcggtgtcttctgaatgctgggccgggatcagtcagttgtgagctgttagctggggtgtcatgctgctgtcggggatgggagcgggggcagcctggggccttggggagagccgtgggccccagctggctttccccccgccggcaggcccgctctgggacggcggatgtgtcactttccctccctggctcacacccctcctgcccttaattttgtgggactctggggagtgggcattgtggctggcagggggcaagtcagggggctcctgggcacttagcccctctgcctggtttgcttagcacccccgcaactccaccccaagctcttggacccccttttgcttccaatccttgaaaaagagaggaaacctcaagtgtgatttcttgcctggtgtttggtgatggggcctggctgtgaaaggaacttccctgaagctgtgagctcagcattgatttatttcctgcaaaaggatcgcattgtgattcctcccaccccagtccaggttgacactttcatttctgtgtgtgctttgggtacagggctgatttctataggcacaggagtggagctgctttggggcttggaatccacatggggcccaggattctcagagttttctgccttgtggatggctgccctcctagctagctccctagaggtgtggttgtccagccaggggagatggtcctccagacctgccgctctgggggctccaaacactactattctgggtgttcatgggacctttgattctcaagactgcaagggagcttggcagccacctcatctgatgtcttgttacacagatgacttccggtccttctgccacatccccacagagcatgttataggcttgcatgcctccagggacagctccctgcctcctatctgcttcctcctgggaagttccactttgtgtggcgcctggaagaatgcctctcactatctctcagaactgtgccgatagggtaaagtcagttcttgggaactccctttcgcatcatgggtgtttccccagagacttctcctctctagctgagttcaggctggagtgggcagaatgggcttcctggatgaggtagcctttctcagttctcctgctgctgctgctaagttgcttcagtcgtgtctgactctgtgcgaccccatagacggcagcccaccaggctcccccgtccctgggattctccaggcaagaacactggagtgggttgccatttccttctccaatgcatgaaagtgaaagttaaagtgaagtcgctcagtcg

SEQ ID NO: 28447 - DNA, 2191 bp, Bovine  19866880612445
  misc_feature (1)..(1): n is a, c, g, or t
naggcctgggcagatgagaaatcttgtactctccctaaagagtttctgttttcctcccctcaaacatccagtgcaaccaacctattattacctttcaagaaatatgctgctgggttggggctcactgccatatccttcctagctgcataggatctgagggtcaagacagaaagtgtcctccttagattcatctggcccttcccaactcaaagatggaacatcactcatttctgagcaccaaagggtggctagccggaccgcaccaggccaacaataggtgctcaataaatgtttaatgaactaatgagctggagagacagggttccaggcttgggtctgccattaattcgctgttgtctttggatacagacaattgtttctttccatagttgggtttcctgggccagaaaaaaaggacagaccaagtaatccttacagcccctcaattctataacacatacttaggggtgcaacacataggcagggagattgcagagtaggaagaggtttcaaacacctctccccactgctccagatagaagagaacaggatgtaactgctgggtgggaccctcctgggcaggggttctgaaagcatcgctgccacccaccaccccctcttctgcaagtgccaacctctgtgggtgaatgactagagctgtcgggcaaggaaaatgggggcagggtaggagaaaggacagaaagtaggtgcagagtccgtttaagccagatatcaaaataattccaaaataattttagaagagccattgaaagtacaaagagactatattttaaataaccccccctccctgacattcagattaactctgccactctctggcaaagctataatctgcactgaggtggaccctccaagagatcaagaatctggaacagactgatgggagaagaaggagaaaggccctgtggtctgggagcctgggaaagacaggcctgagtcctcagcagaaaccctggccagcggaggcaatgaccccgagtctgtgtatagagaatgccaactagggagtcagctttgagacaaaaaagtgccgaataaagtagacttctccagagggtttactggcccttggacaattccagacctgtcctgatgtctacaggtacaaagattacacagaacaaaagtccctgccaccctgacactaccagccatccaggcactgggccagtccctacccctctgaaggcctcagtttccctacttggcatagtgaagacttttagcgagatggtatctcaggccacagctgctctgacagtccacgatgctaagattctatggaaaagcacatcacctacaccattcagacccccaccccggagacctgggaggggagtccccagtccccagccggctggctgaggctggggctaagtggagtccccacaccgtctgtcctcaacagcctgccacggctgaaatcttcgagtggttacaattacagccgggctaacaggattaggggagcattgaaatctaagaaatctaattagctcagacaccccggcctcccccagcacgatccacagtaaccccagcagctgggcctgataggcggggcctggggccttcctgggccacagtcattacctgtgcaggtgtgccaggctgggccaggcttcctggggagccgccagctcagctgcccgactgctccctgctctggacccccgccacctgcagcctggtcctgggatgccactgagatgggctccagaaaactcagtgcaggggcctggtcagcagagggggcagtgctaaggggcagaaggaatccaagggcccccacagggcggctaccccacacggcttggggactgactcagccagaggaggggcaggctgagtcaacgtctgtatctatagaaaccatcacagcccagggaagagccttggtctgcatggggatctggggcctagaaacatctctgcttcctgctccagggccagggatgggggtaaagccccatgcacagacatgtgtgccctgggcagtcatggcaggatctggggttcagagcaagctctggctgtaagacactgtgccctaagaaaagggcacagttgctcagggcgtgagccatgtgctgccaaagtggggggcaagtgagcctcccaacccctcctgggcacacctcctgctacttaacctcagtccccagttccc

SEQ ID NO: 28448 - DNA, 1207 bp, Bovine  19866880615120
  misc_feature (1)..(1): n is a, c, g, or t
nacgactgagcgacttcactttcacttggcttcattcacttctcttttagatttgtctttcaggcaaagagctctctgacaacacttgaggaagacaaattgtgagaccagagcaacacttggctctcagaaccttgccctggcctctcaagagatcagatttccttgctttgggccaaactctttaaagcattttggcattgggtgaagggtttggggggccagagggctggcggggagcagctgggatggcacccagggtcactccagcgctttgccctgctcttgctcttactccccatcctgatggctcttctgaagcaagaaaatgggccagaggtgccccagctgggcaccaagggtgggatgaagacctgggcttcccccttccaagagcatctgttgctacagatgcaggtcggtggccccatggcagctgatggctcctttcttgagacttctgcaaagcccagtctggggttgtagtcttcagagttgtccatgcattagagcacctggagccgggcctcaccccagagcttatgaggcagcgtgttacagctggggcctgggaactggaattttctaacaggttccagcagtgctgaagctgttggccctgggaccatgctttgaaaacccatgctttggttgagtgaaggaagccgaaggcatagaaaaagatgaagaaaccaaaaagaggaggtgggctggagtcatgccacgcaggaccttccaccgtgggttggggatttacagttacatgggtgaaggtgggggtctggagcagcaagaaaagactcggggagtcagaggcgcccctggcagtgctgggcctgagtcctctctatcctgactctgcggcttcagccagctccccccaggggccccaagtcccctccctgggtgaaggcacacatccccctgcccgcccacctcctcaaggggcaggtgttgcctggttggggcgatggccttggagaggggattgcaaactggaaggccctcagcagatgtgagagtgattattataatccccctcccccagatggcaccggtctgggttgcccccacctccgcctgccaggcccgctctctgtggtccctgggggactgaagggcccgccgctccatggccacctccagggccccaacccaggctcagcatgagccagccttccagcttcgcagggtctttcttcaggtg

SEQ ID NO: 28449 - DNA, 2663 bp, Bovine  19866880618383
  misc_feature (1)..(1): n is a, c, g, or t
naatggaatttagcctgtatagagaccaaattctgaggacatgtccagctccttttattaaacatgaaattgtggtgcagccagcattgtctaaagcgggtatccttgatggagattgggactctgaagaaggcaacacagcccttttgaggataagcacagcctggcaggaacattttgctatagataactgtcgtggttgtgggcttattgggattggattcagccatcaattcccctaatgggattccctttgctgagttgccctctctaggctgcagtgagctccttctatataagatgaggggttagcctagatgatttcaaaaccctttccagcaataacatcctggaggtaaatcatcagcctgatgtttagttccaggctgtcgtatgtgcgtgtgcatatgtgtgcacgtatgtgtggagtttgcatgcatgaatgtgcgcatgtctgcatgcttacacagacatgctcagggtgcgtgtgtgcatgtttccagtgtcctttaacttgatcattaacgcctcacatcagacgccaacaataaacagaccatagagacttcatttctagctgctgctactttcgaaacagataagggtcctgggaaaagcatgacacctctaacacgcataaatacacctggcaagcttttgagcccctaaggtgtttttcatcctggcaggtatgctaaatgtgtccacataattgtgtgacaaaaattgtatccagctttccttaacaaaaatctagtgcctcatttacctaggaaggctgatgtaccacttgatgaacaaggctgagactaaccatttctctcaataattatattctgatggctgcagggacagaccatgagaaaatcagattatttttatacagcaaagagaaagtcgagttaaagactcacgagtattaccactcgaattataggtgagcccttccgagaagatagcctcttcgattctaggtagacagaataattggaaaacctattgttctcaccatcatgttgtctttttagtttagcttgtcccttttcactatttggagctacattaaatacatatattttaaagaagctgtcacaagagtcttccaaatattctaaatattctgtttctcaattattccccctttgagtacacgttctatccacactcatagtaagtgacttaaaaataaataaactaccatcattccctttctcaaaaaccatccctggggactttcctggcagtccagtggttaagactgcttccattgcaagcagcagggattcagttcctgggcagggaactaagatcccacatgctgcatggtgtggccaaaaaaaaatcactactgacctctatcaggttcaagtccgaaccgtcagtgtctgtcaaggctgctcggattcttcaacttgccctcctttaccgtcagtcttaccagcagctctgctcctcagtgagttcttctcgcctataaccacatggatcctcctcccaggcccccgagacccaagttcttcctctgacaccccgaaacctctgacataccatctcctcaaactttcatccttcagggagcctttcccaaatgccctcacttactcattcacaaatatttgctgtgggtccttgggcccaggtgtcaatgatacagaaatcaatagtgagagcgacacagaggcacactgaggtcatttggaaaccagaaaatgttaccagggcagtggagtacaagccccaacgtagcttccagcacgtggcgggcgttcctaagggcaggtagcatgaagagggctctagggacagatgagcaattcacccgggacagggaaagctgggaggccctcctgccgggagctagtgaatgcagctgcagctgatcccatgtggtgccatgagaaatgtcaccccaacctgggcaactggtctggctgctggtgctgccaaagcccaggggaggatggagccttgccccgaagctgagccaagtcaggagctggccaaggaggtggagacagggaaagccagggttcctgggggtcgctgaaggaggcaggctgggtctcaccctggggagacaggagggactccagcagagctgcaggcagggcagcctggaggccagtccaccgcatcctaaggagccagccaatggacaggggacatggagctcccggagaacccagcctcggctcggcccgcattgctcacccggagctctggaggctcctggcattcggcgagtgctcagtgcagacctgccaaaccactgagtgagtccacgagcaagggaacaagtgaaccaagcacagctgtgcaacacctccccacgtgtccaaggaacagcacttttctttggggcctccctcggtttccctttaaaagagaaacctcccagggcttgtttctgaaaacagtgagacagaggaaatagagccccctgaagaaacaaagcaagtgcttttttctctcaggcctctcagggtacttcaaagaccctcagggacatccaagcctggcacccagggaggcacttggtaaagaagggtcgaatgccctcagtagagccttcagctctgcaagtgaagtctaagagcatgacctccctccaccccactctgggccccaggtcacactgccctcctgggacccccactagcaag

SEQ ID NO: 28450 - DNA, 1163 bp, Bovine  19866880636012
  misc_feature (1)..(1): n is a, c, g, or t
ntgggaccccacgggaggggatgcgcttcgttaatcacagggagacagctttccgggcagcctcgaagacagaccgaggagaccggagctgggagggagctcccccacaagttcccaggggaggccagggctcctgctccgacccagcactgagtcccatcagctagtggcttgcccttccagtgccctggaatctctgagaactgccggtcctgcttgcggcccagacatcaggagacaaaggtgggtgtgtctgtcctctgccatcaggccttccttcttccgtccagtgaggcatcagagaaaccctctgaggccagagggttggaatcttggttctttgcttggcaatcggctggtcgtgtgaccctaggtctcaggctgtgcaaaataaggcaagagctctgacactacctgtgtgcccagcctagaatcagtcatcatgctgtggggagggcacgtacagaggcccacgccctccatccctagacccacagaagagcaagtcagctgtggtcgttggcctgatctgagtcactgggcaggcttggcagtgggaggtgacctacgcagccccaggcagcagggccttggagaaagccatggtagagagaagacagcctggagcacaggcaggaataaagacacacatttgccaggagctgggcttccagtcaccctgctcagaccaagcccagtctcccctcatcctcactttgccttttggtgttgagggctgtggactcctcttggaacacttgagcccctcacagcccacagggatgcacctcactgtgatagaagctcatagacatcaaagctggagatgcgctggctgacccctgacctcatcatgtgaccctaggcaaatccctgttcctctctgagacctgtcagggcacccagtgaaaagagagcctggagattccctgtgcctttcctctaaggtcactagcattcctgggtcagccagcagagaggtggctgggctgagttgaccatctgggagacccagcgataggcaacaggagggagacagcctgggcagccaggcagggctagtgggcagagcatggggcacccaggggggtcagagcaggactcaggcccctccacaggcaaggggaaggggaaagaacaagtgatattcaagcaaatctcta

SEQ ID NO: 28451 - DNA, 1033 bp, Bovine  19866880644563
  misc_feature (1)..(1): n is a, c, g, or t
ncaactgaataacaacacacgcagaggcaaggttcagaaaagtgacgtgacttgagatgggatcctaacgggagtagtctgattccagagcctgttcagagaaccactccaccgtgttgacttaaatcctcaaactcctttgcggtccccaggctgtgtccctggcacacaaatgctcaatgcgctttccccagaggggacaatggaaggggggctccagggtccaggcttgggtctggctgggatcactctactggtattaaaccccatcccagttcccacagctgtaaactatgagatgtttccagcttctttatgcccagaactagcggtgccacactcttgagtctggctcacagtgacccttctaaaccaggccctgggggctgccgtgaggacagagcagtaaagggatgcatgcctttttcccaaacctggcttggcaacaccctccccagcagcaggcacagtgggcgaccgtagcacaccccatagggtacccagcccttgggccctctgtgatctcccagccaattctcttgatgccccacccccacaggtgggaggatgggcaagggcagggcaaagaggctgccaagcaggtggcagttgagggccagggataggccaaatcttggttctgccctaacctgctgtgtgacctaggccagcgtgtagctctttctgagttttgtcttttctagctgggaaatgagtcaggcatgcctgtgtgatggttgggtggattacattaaatgagcatgagtgagggcctgacccttctgagaggtgtcatccacgcacacacgtgcacacgcagagctgggaggacgtcgggttacaggaatccccatcccggcctgcggagcacgccaggctgccctacccaagaagtgtctctggggcctggcaccagggtgagagtctccgctcctcctcctccagctcagactccttcagccccaaacctataatccccagctgggaaaatgacagccttgcccagcagccgccctcggccgccgggcgggga

SEQ ID NO: 28452 - DNA, 2255 bp, Bovine  19866880704874
  misc_feature (1)..(1): n is a, c, g, or t
naaatgaggggtgtggctgagagttctcaaatgaaagccagtacgggtcagtctccctggctaagctaagcccttcttcatacatgatcttactgaatactcatgaccttacaagataggtaacgttgtcaccccactttacagacagcaatctgaaggtcacactgttaataaggggcagatcagaacctgtacccagagagtccacatttagcatccacactcttagccagctcccaccgtaccagggctgggcccccagcaccaggtgaggtccttcctctccagtgatcctcacaaggcctctgagtccaagccctgggctcaccagggatgcacagccagccagcccccctctcatcctccgtccgtcccaggcacacacggaagccacccctacacacagcttctgtgagcgtttacagggtagaagaagaagaggatggaggggtgagggaggagaaaagttggggaaggggagacaggggatgcagagcaggaggggggtggctagagttggggttgggaaagggtggaggaagacacagaagaaatgcagagggaagaagagccagcgagcgagtgagaaagaatgacagagaaatggaaagagaaggaagatgcgagaaacaacgatggagaaatggaaagagaaggaagacgccggaggtggcaaggacaggagggaggaggggacgtggagggagggagacacagccagaaagagcagagaggaacagggaaggaaggaggagcagttacaagaggaagaagggaaggaggagaagtggtggagtgagtcacagggaaagggcaggggatgaagggagagggaacaaaggaggaaagacagacgggggtcagggagggagcgggccttggaaaaccgagagacagagggaaagcgaacccgcccacccgaacattaaatacctaacaggagatgacaaatcaaatgggaattactgtggtaaaaacataattagaaacttgattgaagttaaacagaatttacataacactgcaaattaactttacacggaaactattcactgggaaggcaatgaaaaggcatttcattagtaatctatatttaaacaataggcacaatggagccttctgatgaggaacttggtgccttcaacccgagggaatgccagaggctgctggagaacaggaaggcagtggatgctccaagaggaagcgggcagggtccggggtggggtcccccggcctgcggatggcggggtggagccgggtggacacagtgggccagatcagattctggtaccggttctgccctgggcttgctgtggagtcctaggtgagtgtctcacctcctctggcctttgtttcctcactgacaaaatgagaatgttggaaaggtggtttacctggaggtgcttacaagtctggatattctaggagagcctgggggatggtagaaggcagggctgagcatggacttggggttcaggtggacgggttgcttcaaagctccatcctgccagctgcaagctgtggcatcatgcaagcctcttcctctcgggccctggtttacccatgtgttcaatggagataagtgcactgccactcgatgtcacccaggcagtggaaggatttatcgagagattgggtgggggcaggcttaaagagaagtgagtctaaaggcacaggattacttggcccgtccgcctggcacactaattagattacccacagcctcctgccaccggcctgccactgagccacgcagcatcaaagcggcttcccacggatccctggtccccattccggagtcagaggcacacctccctagggaactggtgggtcaccaagtccccacctggctccatcgtgtactctggtatggagaagtctcctgggcctttgcacatcagttgtgtccaactctttgcgaccccagggactataaagtccatggaattcttcaggccagaatactggagtgagttgccattctcttctccaggggatcttcccaagccagggactgaacccaggtctcccacattgcaggcagattctttaccagctgagccaccagggaagcccaagaatgctagagtgggtagcctatcccttctccagcaggtcttcccaggcacagcaggctgtgtttgctgagccagaggagctggcctgctctgctgccccaccacttgccctccctgcacctcccatcccacctcacaccctgtggaatccttgccagccttcctctctgcaacctt

SEQ ID NO: 28453 - DNA, 944 bp, Bovine  19866880767017
  misc_feature (1)..(1): n is a, c, g, or t
nctgacgtaccgtaggcgctcaggaagcgccgggcggttgtactgagggctgggctgggctctgtcctggacagattgtgtgtcctgaacacagatgtggcacttagtcaaggccccaccacatacacacgtaccattacaggcaaatgtggaagacgcagagcaggtcccgccacactggtgtgcagaagccaacacgagacacgcgggtgaccctgagggcaggcccaacagagagcacgcatgactcccctacagccacctggagtttctgcgggcaccacagccggcaccccaaccagccttggcctccttgactgcaccggggcagcaaacaccctggggctggaccagtggaggaatctgccagacacaaggccttggccagaccaggcctgatatggttttcatccacgttgtcttgtccctctttatttccagcaacccatctttttaaagaacgctgactttctgagaatgatggtggagataaaaacctggatgctgacgtgggtggcagggtctcatctaaaaagcacacgggctctggagtcgggaaggcctgagtttcaattccagctttgctgttcattagccatatgaccttaggcgagccacccaacttctgtgggccttggttttatcatctggcaattggcctgatggagtttttgagataattaaaggaactgggacatattacacactaagctcagagggaaacccaatgcttagagaatactattattgctgttcatattattattattacccttgaatagaaacctggcacgctatacacagatagctacagggacagattttttaaagatgataaacattcttgaatcctagttttcttggggcaatgctgacgttggctggagagaagtcctggccaggcacagcctcaccccacaaagaggggttgcctctcaccaaca

SEQ ID NO: 28454 - DNA, 2592 bp, Bovine  19866880791831
  misc_feature (1)..(1): n is a, c, g, or t
nctgagtgtctgatttctctgcagctccaaggatacttgagttgctggtctttggacccactttgagtagcaagtgtgcagcctgacaagagcgtgacaggactcccccctggttcactgctggaacccaagcaccactaacggcactgggacaaaatagacgaatgaataactgtcagaggcagaaaggcatgaacagctcttgaatgcaggtgtttcgtggttgccatttgtgcacaagaaagttgctgctgctgctgctaagtcgcttcagtcgtgtccgactctgtgtgaccccagagatggcagcccaccaggctccccgatccctgggattctccaggcaagaacactggactgagttgccatttccttctccaatgcatgaaagtgcaaagtgaaagtgaagtcgctcagtcgtgtccgactcctagcgaccccatggactgcagcccaccaggctcctctgtccatgggattttccaggcaagagtactggagtggggtgccattgccttctccgacaagaaagttgaggtcgacgcaaagccataaggaaaacaggcttggggaggggctggcctgcatgtgaggttggcagctgagtgaccatgggttccagagttcaaggataagagtggggaaggaagggcccgggttctgagagttgacagcccaattccaaatcctgcctccagcacccactgggcaagtggacccaagagatgaggctgcaaaccaggcaacaatacatgagtggatgattgtctcactcactccttttttcatctgatgggtgagagcaaccgtattcataatccgtaagggttattttgaggattaaatgagatgattcacagactggacatcagatgtattgaaaatggtggttcacttttttaggtataataatgtttttgctttcttttttaaaattttgtatcctgtatcaatacatactgaggtatttatgagtgaaatgatacaatgtctaggatttgcttattttagcagagagggagaagacagaaaaggagaaggaaaaggtaacagaagggatggataaaaaaagaatgacaaatgtcaatcattactgaagctgggtgatgggccccaagggtgttcatgactgtcctgtctgtctttgtccacccttgaatatttccacaatcaaaggtccacaataataaattagaaagtgaagaagtaggtgacttacttggcttggctcctgattcatagcaagtgcacaggaaacgtcagctccttttccttcaaggtgggccaggctctggccatgaaggaggtgctcaggggccaccaggcatgtcccccaaccctgagtgatgtgtccaggctcccactattgacaggagcaagcttgagatttgataccgcgcctccgcgtgttcagcccacaggaccacacagctggaaaagcagggttagcttgccttctggaacaatgggcagtagagacagtgctaaaaataatactcacttctggggactgactttgccaggcctttaacatatgttacgttatttaattcccccaaaatcctatgaggcagaggtcatccttcctgcttcccataagcaaatgagtaaatgaagactcaggttggtggagtgcctgggctgcagctgcactctctgttgctggacataccctgtccatagggggaagctgctctgttcacccaccccttcctctgcattgtttaatgtgtggcctggtttggtcagggctcaaatgctggtctcagctcctgggagtgtgttctgcctgcccagctctgggccaccccaggtacctgcaaactccaggtagacatgcagtccagggctcttgcctgctctccaggccccagcaaggttgcttaggcattccaacgggacaaaccattgccccctgccctccctgtctgaacccagtagggtgggatttgcgtcccaggcctggctgttacagggacacggccgcccgctcccctgggcagcacaccaagtcctgctgtgaaccccaccatgaatggcagccattctttaccccaactccaggtcaccaccaccccgcagcctgggaagggagacctcagccttccccaggcctgtaaacaccaagccacacacacagcagggccccagcagccaataaatcttggccccaggttctcttaaagagacagagctgggacagacagcaaccagaccccaggtagctgtagccagctccaccctgcctctccaccgcctaccccaaatcaagagagacaaagtggcacactaacagcactctccctgtaagctttttgctcttgcttctgacatctaacttttctctctctctcttttatttttcccctctgctgcttaccctggggataggataacaggagacctgctggtgggaatgcgtatgtgattcatcttttggaagctaagcccctgggctcatggcgggagccgggtggagaggcagaggtctctggactttgcacccagggaagcctcagggaagccagagagacagtcggggtcaggtgggaagccagcccagcccggaagcatgcgctatagaaggagcgt

SEQ ID NO: 28455 - DNA, 1295 bp, Bovine  19866880818701
  misc_feature (1)..(1): n is a, c, g, or t
natatatgtcctgtcgtaaagcatttaatattttatctcctaattgcattaccagagacagacagctgtttatcctcatcactctcccattgctgtctttggcaggacccactgggccactccaggtgtttccttgcctccttttctgaaagtcctggatggccaaacaggcacctccaggcagttccatgtggtcaggcagtgagtggtgccagcagggtggggggcacctgtgcttggcatcatggggtttcaaggcaactcatggaccctgtctgcctcctcctctctgcccacagccttcccgtgtattcggcaccatggctgccatcagctcatctgattctcacagccctgtaagacaagaaccaccttactgatcccacgatacagaggagggaaaagatgcaaggagaggctgtgaatctcactcactcactcactcgttcattcactctttcagctgtccttccgttttgtaggagcagccttgtggaggccaccaagaacagtgacataaataagatgcggtccctaccttcggggcttgtgcagggaaagtgaccatggcacgaccccctcggggtgtctctgtccccctggtagtgctggccactgacagagtgctagttctaaaacatgaaccaaactcaggttcagaactcttgcatggcctgaactcagcgtaaagccccagactctataaactttctgttcatattctcgtacaaccaacctcctctctcacccccttcaccatggaacttcacacttaccaacatatgaccgccctgcttgctgcccgccaaacagcccctcctcccttccaaccacctgcgttccctgtcagcagggctctgatgctgtgggagtggtgcgcagagattctcgtacccggctcctcagcaaccccagtgtaaacagagcatggttatccaaatcccttttgccaagcatttccccagtcttcctcacggatggtggtgaccagccaagtgacaaagtcaatgagaacagggcactgctatggaccaagtgttttgtccacctccatttcacatgttgaaaccctagcttaatacacctgttgatatttggaagtgggggtctttgctttgggaggtgattaagtcatgagagtagagcctccttagtggtccttataaaagggaccccagagaactctctctccctctttcctccttgtgaggatataatgagaagttggccatctgaaactgaaagagggctcttaccagagcctgacagtgcggcctccagatcctgactttcac

SEQ ID NO: 28456 - DNA, 1787 bp, Bovine  19866880840145
  misc_feature (1)..(1): n is a, c, g, or t
ngcacacctcctgctacttaacctcagtcccccagttccccattctgggggtccacatggatttctgcacccttgtccctgcctggctggtacaatgggaaggcaccaacacactcgccatctataaggcctgacattgagaatggctgcagcaggggatatttcacctccctaaacctcagttttcttctctgctaaatggggctgattctaaacagcagctagcttccgccactgctcttggagttaggcaaagttggacagcacttcttaatccaccaagtgctgtacaaaggcgaggggctgtggttattactgtcatcatgcgcccatggcaggcagccagccggtggtggttaattatttatttggactgatcttcctgcccttgctggactggaagctcctaaggaacaggaactgtcttacacatttcagggtctctcacaggccacggtcctcacactggggactctcaggaagtatcttcagcagcagtgctagggccctgacccaaccccactccccgctacgtatctcctttcttcttctaactgatcccaaggcaagtgccaggaagcagagctggcacgcagacgcagacaagtgacagtgagcccctaagacagaccccgctctgctccccacaggtcactcccaataagggctgaggcagccaattgaaaggtgtcctctcgccccagggaagtgtggcctgcctgggcactggtattgaatctgggatcatcaaagtgctagtctgtggtctggagaacccctagttccttaagcccagcaaaggtcagcaggggttgatttccagaaggtatgcagccgagcatgccaacagtcagagctatccactaaaggcagaagctgcccagaggtggtgaacaccctgtcatggggagcatgcaagccaaagctggacaataagcttccaggaggtgtgtggatgggagagcagtatctggcaaatgcttctaacacctccaatttaaccccttggtgctccattcattctgcacccacagcctgccaggccttcaggggacacacatccagggatttcacacccatatctgcctcatcctcacagcaaccatgtggcatcagagttgggggtggggtggtcctgcctttggacccattttacagatgcggaaactgaggcccagctgagtaaagctatgagccggaggcagccagccaactacagcctcctgacacctttcccctatctcctcaggtgataggaaatgtttgcataatcctgacaggtttctggactctttcctcagagcctgtgcttagcactggttttctcagcctctcatcttccctgagggccacagggtccaacctcaggatcacccctggagcttctagcctaggcaggctttgcctccccttgtcatcagggtagagctctacggataaagagccacccccccacctccgcccagagggcgtggacagaggccactgtgtcctgctgagaggtcaaagcagtcaccaggcaaggctgcagcagggttcagagtaattacagcagcccagcctttgttgtccacacaaaacctaaggagcctcataaagatgaggtggtgataggagccagactagggccctggggagcaaagttatgaatgaaaacgtatgggactcagtcagaacctggcaggccctgcttcctggttctgtgacagagtgcccagagaagcttccggaaattaacttgttggtgcctgaatctcttatagcaacatctcacgtgagacgagagt

SEQ ID NO: 28457 - DNA, 1868 bp, Bovine  19866880843623
  misc_feature (1)..(1): n is a, c, g, or t
nggagcattgatttcaaacccccgaagagcagggactgtgtggggtgcatttatatgtgtgtgtagcccccgtgcttggcacggagtgggcctggcacaggacggcttatcgttccttgccctgaacatttctgttgagtattttttattttgagaggcattcccacgcccttgacctcatcattgttcctgtagccgtgaaggtagagaaatggtctggatgcatgagactgtggaagaaatggatgctgaaggtgggggagcatggcctgcccaggggaggtggagatggaaggtggcccccagacccccatggccttgttcaggggctgtcttctttgtctggagcaccctgaagtgtggactggggaggcagcccccgagatggcttaaggtggtcacgggaccagacgagaaaaccactgctacatcagctctcttcccattttggggatgttgctagttcagggaggagagtatcagtttcctgaatcccaggctccatttttaactggcagagagctggcccagactctcccatggggcaggcgcctggagctatacctggacgcagggtccactctctactgtctttacctggacagttaacatctaaatatggtcagggaggctggtttgccagataaggtggtaacagagagaagaaagttttcttttcaaatttccctcttgaagtcaaaataagtaagcaaccacatgaagcatacaatcagagtatgagtgggactggaatacggcagggtgaggtgaggatgagacgcaggtgatggaaagggggccgtgacttgttgctggggtttgtgggtgcctcactgcgcacccccgggggaccatgggccctgtggctctgccgggcatctccgccaaggcgtgtattggagggtacatccacccgccccgaccccaaggagaccccagccaataacagatgccagatgctggataaaaacctcctcgttctggcctcttaggctgactgaggggtgcattctactccatctccaggagctccccgcaccaggtatggcacttcacatcacactctttcaatcacatcattcccttccccatctcatttctctgcttctctactggtgttttctgggctcttccaaataaatcgcttgcactggaaacgtcacggtggggtcggcacctgggggaacccagactcggacacacatcatgtgactgaggcgcctccagcagcctttccttcccccatcgcgtcacagacccccgtccccatcatgtggtccaatcctgagtgtggagtcccggctggggttctggactggagcggtgaggatccaggtaagacaagtagtcccctcttgagagggttctgtatgatctgttggggtcccagcccctaggcagccctgctctgagctgatgccctcatcccccgaccctctctcctccggacaggcctggaaagcagatctccagcagctgtatcctagcacaccccggctctgtggggagccagcgatgatctaatcctgagaagagagggaggcaagaagagtagcctcccctacaagtaggggcctgcccctggggccctcacggaaccagagaatgccatgctggggaaactgctgagccagcctagagaccagggtgctctcccctcccccaacccctgcaaactccagccaaactccagagaaacccacaaccaccctggaggcttctgctaacaacagaatccatgctccctgcagaaaatatgggaaacaaagttgacgatctccccgcatccagatagattcctgatttctaagttgacattttggtatattcccttctgtttcctgtttcctgtgcctaaccaaatgtat

SEQ ID NO: 28458 - DNA, 708 bp, Bovine  19866880849922
  misc_feature (1)..(1): n is a, c, g, or t
nctcctggcatcttccggttcactggaccccatcctgagcatccctgcatcccaagtcccacgtatcctgttcttgtcccacctgcggtctgccctggaagccctgaagacttctcccagtccttttgcacagctgagagccactttgcctcccagcctcccactgctcaggcaggggggaaggaggtctgctctcacaccctccactcttcacacgcccagcccacacaggccagcagccagacttccaagtcccctgactcctggtgtactctgagggaaggggagtcggggcatatggaggtgtctggacagaggaagggaggacgtgaaggagagggcgggcgctcacctgggggcggcggcagagcgctcatatttggctttatgtcaggcgggaagggtggcttaacgtcttggctgggcgacaggtatggggggatgctgcttccgggggtcatggggggcgtggggttccctggaacaggtgagtgggggtagtttgccacaggaactggcctgggaggctggaaggaaagagagaccatagataggttacgggtttaagaaataaggaaggagggggctgtgcctctggacacagaccccgcccaccctagcatcccagggctgcggcccttgctcccccaaggggagagacacccccccgccccgcagggaaaccccttcctccactctgggcgcact

SEQ ID NO: 28459 - DNA, 1686 bp, Bovine  19866880857582
  misc_feature (1)..(1): n is a, c, g, or t
ncgcctgtcagtgaccagtggccatggggtgaagcagatggccagggagggggggccaccctcaggcctgagccaagagaggccaagtggcccacacaggccagagcccaagaccttggcaccggccactcggagctctcgactcgagagttaatgattcatttgtggccaatttctgctggcctttgcctggaaattcccaagcctgccccttcccttggctccgggagctccaagagtacagtctcatttacacttggcggaggacatctccccccactatccagggaatggcttttacaattacagctgtagtgatgctggttagcccttaggaggaactgattctgacctacaggctgggggctggggtgcttgttgaactgtagtcaagttagaggcccctctctgaccccctgggtgaggtgctgatggaaggagccctgtttgcattcatggtgctccacgctgagtgcagagccgatgcaaacagaaaccagtctggtgtaatgtgaaaagtgtgacaacagttacaaagggggacatagagcttgacctggagtaggacttggctgtaggaaagaaaacaataatatgtgcaaaggccccagagcgtgaatggacaggggagattgagtcgttcttctctggctggagcaaagaggctgtaagaaacatctggaagttcagacacaactcccaggtgaaggacttagacttgggggtttggcagtgggaggtgctggcagtggggagtcagggctgctgcctgaatagggatagatgttatgattggaatttggggggggtcacttgcccatatgagtcttgattctgccggtcagcaaacctcccttgacagcctgctctgtgcccactcaggcccaagccctacacaggtgtggtggtggatgagagggaacagatcaagtgcagcactccaggtggggtggcagggacccggcagagccgcgtgctgctgacagatgtacgggtctgtgctgacattttcagactcgctgagccccattgttccaagtcttcaggtgagcatgtggcatgttcaggtcatcttaaggaactgcatgttcctgacagactggagagatagcctggaggctaaccctgtcccctcagaccgcatggtcttcctgaaggtcgaatgggtatctgtcactctgcacgtgcacaaactgaggcccagagaggccaaggctgatgatggtgctcggggccgtggtctcccagtccttagctgactgtatgtatatcacctcccacatcctcctccaccctgatgcaaatttaagaatatttccccaaaccaggcaaaatatacagcagcctggtcctccaggttgaaaagtcccaggcttggggagggggcttccgttacatgtcttttcaactttgcacattcagtttcttctgattatttcttgacagtcccaggcgttggtggtaaacagccactctccccagaatgtttccccgcgacagcagctttctctggagagggtgctatcaacacttggcagggcctcctcccagctcccggcttgggctcctgagcaaggagagctcctgaaaggcgttcaagaatgccgtgctctccgggggggctgggactgcagggtcctggcgggcgtgggcctggcctctttgttccctgcagcagccggcagc

SEQ ID NO: 28460 - DNA, 1389 bp, Bovine  19866880968060
  misc_feature (1)..(1): n is a, c, g, or t
ngcccccagcaggggtggcaggatggggatgcagctatgtttcaccaggaagccccactgtacctggaagggctgcagtcagccctggggacctgggggggtgagtccacagggcagtcctggacagggcaggatggacagtgaggggaggactggggcctctgccccaccccacgtccccggagtgcttcctggggttccttgctgtctccctcccttactcctgagccgcgggactccagtccctgcacacttccgcctccacaagcagcgcggcagagcggaccctcctgcaccccagctctctcggtgtctcccaacttgtaaaggtgcgacgcagagcagcatcagtgggaggaatgagaaggttgtccttcaaccccaagggctgatggccctcagaacgccacccagctgcgccgcatgggacctgcaggctggccctgctcacctggccccgaagcccccgctgccggggtagttgggccggccgtacatgctctgctggatgtagggctgagtggggccagccttggctgagaactgctgctgctgcccagcaaactgtggggagttgaggccggggttgctggtggtcatgcccgacgccatggggttgccgcctggattcatggggttgttggcattggccatagggttcccaaggacctgtgggcagagagagcggctgtcactcacgtgggtaccccaagtggtgtagggagggaaaaggagaaatggcagggggtgggggaagcatcaaaacacagggaggacaacagagaaagaggagggggaggaaaagggcagggggcttttcaaatttcctctgggcatgaactgctggcgcagtacacagtattagaagcgggtaacccagcccggaagcgggctttgtagataagaacgtcagccccagggtggaacaaggtgaggctggcctgcacatgctgcaggtgggaaaggcctggacttctcagtcttcccgtcctacaaagcagcctggatgcccaagggtcaggccccacggaggccctgctctgctgctctgtgagggccaagggaagcccaaccctctagctctggagggtggcagggccctggacaaggggctccctgtggcccaagactgcagataaagggcgctggttctctacagggtggcaagtggccctgagccattcatgtggccaggcagcgggaaggaaggcgtggaggaaagaggaaggaacaagagcgggaggcacgacagacgagggatgtggggtgcagtctgtcacgagttttaggctcaatctttcgctgaaatctaacccaggccatccagggtcaaagactccaggtgttgggaccctaaggtcaataacctctactaagttctcctgttaa

SEQ ID NO: 28461 - DNA, 1978 bp, Bovine  19866881008654
  misc_feature (1)..(1): n is a, c, g, or t
ntggggaggaggggccgaaatgtactcctcatcaggcagcaacagtgggtacaacccaaggctaccatgttttctgaaaagacctccagacaggagagaggtgacaggccatccctgcagagcacctcctccatgcccgacactgagcgtggcccccaggatgtgccttctcattgactcctcagagcacactggtcctgccctcatcctccctgtatagagaaggaagctgagaagtggggactaccttcccaggttcacacagccagttagaagtggacctgggattcaggtcgggacccgtccacttctattgctggcctttagggatgccaggcagggatgcaacccagaccttcccaaggtttctccatttgtccgaagctgacaccatctggctccctcggggccactgggccaaaccaggcgaccgcctgcacttcccagccctcctcatcctccagcccctgggctgcccctccctcacccagctcccttaatcctctttgtggggatcctggctcaggctaagccccaagggcagggccagatgttactcctgtcccgccgctggtagtcgtgaggaagggagggggtagcgctgccatgctccctgtcccgagcttgaccttgtgagattgcagggacctaaggctgaagccagtgatggcctcggtcaggcggctggacaggtgggcatgagatgaccagtaactggccccaccatggccctgacatttatctattcattcagcaaatattcaccaagtccacacttagccctggaggggcgggcagtgagcagtgtggtcctctcgcaggcagcttagctttctgtctgagaggctgacactaaggcccatgaaggagtaagttaaggatgtttcccagcaccctgtaagagggagcaggatggtgatcagaaagtgtctggaggagatgcgacctgaagagcaaaaaggagtctgccagggaagatgagcgggaagggttgtccaagcagaggcaatgggagtgcgaaggccctgaggcttgatgccggtctcaggtgacaggatcacaggcgtgggcgaggggtacaagaggaggtcaaagaggggggcagaaaccagctgaccccaaggctgcagaccgagaagagtttggatgtgattggaagggcagtggggagcccttgcagggtcttcagcaggtgagtgatgggatataatttatctgaggacaagagctctgaaggggagcatccctggagggtaggatggagggattatggaggtcttcgtggaggaggaagcccaggggaaactgtaggatctgattaaagggggatgaggccatggcttcccaggcacaggaaactgtttagacaaaagcccagtgccggctgtgcccccagcttaaggcactcacttggttgaatggccagctctgaaccccaccccattcccaacctgccacttagccagaaaggggactcaggccactggccacagctgtggagacctgagtgtgattgttgcttagggccctataaaacctgcagcaggaaaggctggcagggggcgcggggagtggtttatagaagacaccctcggtgcccacgtgtctccctgttactatctccttgcagccttgtgaggaccctgcaagggggcagggaagggtttatcaccctgttttacaaacaaggcaacggagtcggggggagcagtttgctacagtcccaggtgggaccgctgcccccgcaagagcccctggggcctgccaccagccctcctgtcccctgggcgtcctcaacccagctgtgccccgggaaagggatgggatgggacaggtgaatgatcccacggggtctagtcagggttccccccaacacacagacacactcgcaccccttcccatcccgagggctacctgagccctccaggttgccctcaccctttcagtgacctctggaaacaacttcctctggattccg

SEQ ID NO: 28462 - DNA, 1317 bp, Bovine  19866881026638
  misc_feature (1)..(1): n is a, c, g, or t
ntattctggcctggagaagtccatggactgtatagtccatgggggtcacaaagagctggacacaactgagtgactttcactttcactttttcacttttcagggggcgtctactatgtatcaggaactatgccaggcacttttcaggtaacatctcatttataccacacaaatcagtgaggtagagagtatcccctccattttggagcagaaacagagcaattcgtttgcccaacatcttaatagaaggatccaaacccaggtacacatgcctcagaaatatttaatgcagctgggatgatcttaatgtatacatctgaccaggccacatctctgtttcccgctgctccctggtgcctcaaggaccacagggaaattcaagagccttaacctaacatccaaggctgtccaccctctggccctgagcacggctccttctctagcctgtctccctactcagccacctgcagtcacagtgctgtgtccccttaaacatgctgtgtatttgaagagctctggccttggtaaagcctggtccatctgccagaaatgcccttcaccctcttctctgcctgtcaaattcccatgtcatatggtgtggtcacatggtgtaatcacctcctagaggaggtgtcatttgagttggagtcagttaatcctctggattcatgaaacaactttcaccttcattacaacttgacatggctgagaagacgtggatgtttataactggtcactagactggggatactctcagagcagagagggtgaactgtttatctctgtatcctagcaacctgcacagggcctggcctagcacaagcattcaaccagagtatatggatggaagaatagatggatgctcggatggagagatgtgtggaaataacataacagatgggtgaatggatgatttgactggcaaatggataatttaatggagagatgagtggagcttggaaggatggaagaagaaggagcaggtgaattataccaacgaacacaaaactattcagcactgacaaagtatactgagtgccctctccactctccatttggatggcatcactgactcaatggacacgcatttgagcaagctccgggagatggtgagggacagggaaacctggtgtgctgcagtccatggagtcccaaagggtcagactcgactgagggactgaacaacagcagtagccaatgactcaggaagcttccctgctcgcctcccttacaacaactttttgttacaggttgaaaaagacctggcaggcctctgggcaaggaacagaagagtgtcccagatggggtggaaaggaccc

SEQ ID NO: 28463 - DNA, 1224 bp, Bovine  19866881048895
  misc_feature (1)..(1): n is a, c, g, or t
ntgcttctggacgtggacattaagtctaaccggaaatccttcctgtccaggggaattactggtttccacggctccaggagatgtcgaaatgcaggctgtgcttgccttggatttgtttttttttccacagaaaacaaagcaaaacaaatacatgggcacgtgcacacgacacataagggcagaaaatcgaatggtagccctgactcctcaggcccaggatggggtcgctcagcgagtgaacaagagaaccaggttcctgggttggaggcctggtgtccccgtggacaccctgtgtgatctctggcctgagccacagacagtgggagcaagcgatccacagtgctggccccctacccgccgcccagctgccaagctgtgtacagggccttgtgttcactgggctgacttatccacacaacatccccatgggaagccacggctcagagaggccaggggaactgctcagggtcacccagctgtgggagacaggactgatctggaagccagcacgacagggcacagggccactgagatggacggactccgagtcctcagacctgtaccgggagtgcagccctccctgggctgcagggggagatgccctctttggggggtttattctcttcctcgcccagtcttctggactgggtcccctctctgctcactgcttggctgcaatgacacccacctgccctgcccatcatttcacaaagcctgaggccaggcacccagaagtgaattctttctctgcgccaataaagggaaagggcttgatagatttcaggattcactgtgcgccccaaagaaggcaagggatcccgctttgggagtcagggacctctcttcctgcctcttccccacacttccccatctgtgttccctgatcccaaggacttacatcttgttttctctgctccatctcagaggctgcagtctggaggcatggactggcccatagacatgtcgtttggctatttaataaactagttgccaaaatttaaaaatttgaaaattccatgtaacaacttggacttctagtctccccctaccacccacttcccaccacaccccaggtgctgtattcttggcagcaagtgcatggagctgaggatggggtggccagcggggaggcagagccccttgtgcacagtctcattcccatccccatcagcctcacaggaccataaggcccatttccaagcctggtgcttctcaagcatgcat

SEQ ID NO: 28464 - DNA, 1218 bp, Bovine  19866881121198
  misc_feature (1)..(1): n is a, c, g, or t
nggaggggtccctctcaaggagtggtacagacagcataaggtaatgcatttgagtgccagacacacaggtcgctttccagccgtgttaggtgaggtgaaattacttccaggagctggtgctgggctccatggagcactggcccctaaacctcgggctcccacagaccggctcagcacccctactccacatgagggacagaatgtctctggggcctgactctgactctgacaggccccaaactctgctcaccgtggggacacaaatggcccttgactccaactctcccatttcacagaggaggacagtgaggcctggagagggcagcacctgcccccgtcccagggtcacgcagcaagtcagaggctggggcagaacaggaatcagcctcctgcttccccaccggccacagctcagtcctttcccaaaggctagctggccgcagacccgctgacaaagagaaaataattattttggcagctgagacagaagccagagccggaaagtcctcgctcactcggtgagcaatgtcccggccccgaggaatgacgcccgcccatcctgcctcgaagaggtgctccagctcacggcgacacatacgtgtctctccaccccagccatccttggttctttgctgttggacttgtgcaaagaggcaaatagaccaaggtcacacagaaagggtatcacacagagggtcaccaggatatgaactcaggccctgattagggactatgagccttaggactatgagctcataggacccttccctgtgagcctgcactggaccctcatctgggaaggagaaaaggaccaggagcttacctgaactgggtccacactggggactattcctgtgatacttctttagccctcagcaaaatgctatgaagtggaaactaaatagcacccccaatttacacatgaggtctagagagattctgtagcttcctaaggtcacacaggtaatgcagagtgaaaagtaataagaacagaggcgggcatgagtgggtgatctgtccacacagactcagcttgttcaagatgaccaactggacacccgggctccctggtctgtgccctgggccccactctcgctggctgcacagacaggttggggtggaggtgaggaactcaggcccaggcggggctgtgaacactcaggtgaagtcatccgccctcatccctggccccctgggtgcccgtaggtagcctcaccg

SEQ ID NO: 28465 - DNA, 786 bp, Bovine  19866881127422
  misc_feature (1)..(1): n is a, c, g, or t
ntgttacgtccctgcgtgtcagagcagaaaggggccccaggcatcatctggttgagctgttgctctttgcaggcggggtggatgttttgtgggtggcagccatcaggggcagaggagaggagaggaggcggccccagcatcggtgggcagcttggcttccagacactgatgacctttccctgctcctttctctgccaccacagcctaactatggaaaccagcaatacggaccaaacagccagttccccacccagccaggccagtaccctacccccaaccccccgcggccgctcacgtctcccaactaccccgggcagcggatgcccagccagccgagcactgggcagtacccgccccccacggtcaacatggggcagtattataaggtgagtcccactgccctacgggccccttccctcctcaccagctcagctcccttcccccacctgcgtcatcctggccccgggcaccccctgaggtcaccagggggcaggcggagatttctggatgtgacctcgtatgctccgagctatgcatgtggtgaccaaaatgacagactggcttttcttggttcctgttctcacggggctcagacgatggttttccttctccttttactatttatagtgcatgtaagataataacaatgaaggaaatatatttttttttaagaaaaagcacccgctcaaatatatttacattcgattattctatgcacatgagcaccaacaatgttatatggttcttattacggttgtgattttgaacctgttctctcacttgaca

SEQ ID NO: 28466 - DNA, 1202 bp, Bovine  19866881163745
  misc_feature (1)..(1): n is a, c, g, or t
ncaagagggcatgattcctggcagcagctcccacgggaaacagtaaaagcgccacccgcgggaaacacggggtggacaaagggggtgccgggcagggtttcctgttgggtgggtgacctgtgcgcctgtggtcctagggccaggccagggctgggtctcgcctcatccctggctccggcccaggccaccttgagtcccatcctccagggcctggcctggcttcctgtcccactggcccctcccagcccaggagagagcagggccccgtggaggcttcctgagaagcatcaacttttgtagggcaggaaggggcagctgcactggcctcctcggtggcctttggcctctgacccccagacctccagctctctgttttccagcaagaggcttcgacaaaatctccactgggttttattcctgggacttcgggcacagctgagtaggggctgcaggaaccggcttctccctgcgatcagtcactgtctgccccgctctgggcagcgtcacttccaaggagccgtgctgaagggactgggacaaggagagatgctaaagaaggatggatctcaggcctcaaggacagattctcaggggggcaaagatgagagacacttctgaagaaggtgggtgtggcatccccactgggcagggaagccccacaccaaggacaatgtgatgacaatccatgggaacagcacccagagagagatgccttcatccccaccgccccttccccccaagtttggggggggaggtgtcaggtgtctgggtgggatgggaactcggcctaggggctagacccattgtctccagtgaaccaaacccattccatgtgcctcaggagctggggattcacctgtccacaggtggagatgtagtgggagtgggagaagttagtggactggcccagtgagggggaagaggtttgaacaaaggccctcaggctagggcacaggctatggcagaagcaccccaggtctgtctcagggctgctgggcaaacaggcgactcagaaagcaaacagcccaaagagggcagaggactcttccagcggccgccacggggcccaccacggacaaaggcctcttgtagctcagagctggggaggagcgctaacgggaggcggcctgggctgaatggggctggtcctggcctgggatcaccctggggacaaggatgacggggatggagccaggatcaag

SEQ ID NO: 28467 - DNA, 962 bp, Bovine  19866881206434
  misc_feature (1)..(1): n is a, c, g, or t
ntccaaagggtcgcaaagagtcagacacaaactgaagcaacctagcatgcacgcacaaattaaaacgaacacaggcttaaagagtgaaaagatctgaagacgcagggttgaactcagagagtaagactcgggatgaggggtctgctgggggaattgtgccaggtggtgggcaagggggagcgggttcctatggccagggttggatgaggactttggaactcaggagaccgaccccaggaagtattggcctctcatgataaattgagaatcaatggattggtgggtcattagatggaattacccatgtggatgtgggtaagatcaagaacagaggggtttttagtcacaaaccgcagtgcccaggaagtcacctgaaaatgcctccccaaaagctactctgcacttctttgctatcaaaactttgattttgttcagaatgacagtgcaccctagcccttagagatgaatcatggtttgtctgggtcaatcgagcaatcacattccctttggctgatgtttacttttccagactgccttgcagctaggagtgctcacgtgataagttctggccatctcagaaagtcagcttggggcttctgggagagctttcacctttttgatgacatagatttgctagtgcttctcttctccctttttttgccttgaacacagagctgatgcttgaggctgtgctgccattgtgaccatgaggcaataaacatgagtgtatacatgtagcacgctggcggtgttgacgcagaaacagcctggaccttgacaccatcattaacccctgcccaccttcagactttttaagtgagatgaggaaatgactttattgctaatttttttttaattaaaagaagaaagttcagaggtagtaactggaaattagaagaatggcatgcagggttggagggagaaaaagctgatagggggctgctttgagcagaggatgtgtg

SEQ ID NO: 28468 - DNA, 1318 bp, Bovine  19866881261401
  misc_feature (1)..(1): n is a, c, g, or t
ntttgcaatggggccgcagttcccatcccatcagaaagcaggctggagtggagattcagggggaaagtgaatgaggagtttgagagaactcattaatcctggcctgccccatcctgtgtgtctcctccccagggaaacctggggtctttgctgccccggactccctcacactgcactggcctcacttctggagcctcacgctgcttcctctccctctcccacagcacttacagaaccccgccaacttccacaatgccgccacggagttgctggactggtgtggagacccgcgagccttccagcggccctttgagcagagcctgatgggctgtttgacggtgagtctgcctcctcccagcctgtgccctcacccagggaggatggctggggactcacgtgctgggctgcggccggaggggaggacccgtctgcatggacccctgataggcttacacctgcagggaatctagtctgatggggagacacatttctcggggttacgtgcattatttacccttgatgagaaagacatgatcctactttgaagagttctaaacttttgagagtaaatgttccatcataagtaaagcagagagactcttgaaggttttcagccctctttttagccattcattcattcacttcagtaaacatctgttgagctctttttacagacatccattcatctattcattcatataagtatttatcgagcttctattacatctatccatctatgcaaataaacactgattgatcgctcagttatcatgcacaaccccctctgctaagtcctgggaaattgaagatgggaaagattccctcttcaatggggagatagctgtgggaagagacagctgaggagatcatgagaaggtggagggaacacggagaagggaagtggtacccatcttggtggtggggcaggttgcagaaaacaggaaaggcgcccctgatccgtctgtaggagtctgataacctacaccagcacctgaggatagcaagaatgtcctgagcatgtggagcagagcacgccagtgcccggatgtacggcagaatccaggaaactgaaattaactcatcctggtaagggtctaggatccaagctgggcagaggccaggcccagggctagcggtttgacttgccaagcttaggagcccactggctgacagccacgtggaaggagctcaaagcttatgactgtccccagccacgtggcctgtatccataaatgtgagggcacctctgcggccagtggggacagctgctcagaccatccagagtcagactttaagggaatgtggtaaacagatttcc

SEQ ID NO: 28469 - DNA, 1304 bp, Bovine  19866881280977
  misc_feature (1)..(1): n is a, c, g, or t
ncttcaccccaaggtccccacgagtttcctcttttcattcagccctcccttactggaggtcagctgaatacctctgctctttgccaccctcagagcccaaccaaaatagcctgagttctagcctagacatgaaactctgggcaagttcagagcatccatcccctcgttgtcaacatggtgatggtgagtccagctcatggcgcaggggagggctcgtgaggactgacgtcagaacacatgtgggggcctggcaggtgctgggccctcaaacaggtgcagctaatattagtatgcttgctcctgcctcgatggctactgttattattagtggtggtattaatatcccagcaggaaatgagcttcaaggtcacagagctccccatgttactgagggacaaacaggaaggccaggagcggtcagcagcagagctggagtcagaagcccaacgtgccccagtgagaccaaaagctcctggggccagggacacaccagccacggccacactcatggctttatcccttgcttctctccacagttaatttttggacacatgtcatgggccaggctctcggccaggggctgtctgctcacgatggggcttggcccctattggttctatcaatgtttgtagatcagttcgtggcctctcccatccggccagccactgggaacctaggccaggggtggagtttgggaagggttccctaagccatccccccgaccaccagtaacaaaaacacagctgttactttgagcagatcccagtctgggacactccgggtaaaaacaaaacaaaacaaaacaaaacaaaaaaacggcctgattcctcatccccttagctgggaagaacacaaggcccagagagggttagtgcctggcctgggacacacagccaggtctgggagagccagagaacacaggcttctcagtataggttctgggttccagactgtggccagagatgaccgtggaggacttgagcagatggactctggtcaggacgtgcctgagagtggggcgcagagagcagggtctccatgggcagaggacagggtctgggagctgagtctgctggtgcagctgtcccagaaatcaagcccctggagcagccacttctcgcaccctctgctcaacagagcgacttcactctcaactagcggagcatccgtgctggacgcagctgactgtcctgagaaggagggaagatggagtacgggcctggcagagccacctgtcctagccaggggtcgggtgtgaaggagaggagggcgtcctaggggagctctcgctgggaggaggtggc

SEQ ID NO: 28470 - DNA, 962 bp, Bovine  19866881335612
  misc_feature (1)..(1): n is a, c, g, or t
nctggtacaaaaaggtttacaatgaaaagcaactctgcctcacaatttctgctcccaattctcctccatggaacagcacttgaaatagtttttgtgtatctttatggaattgttttagttgtatacaagcatagatagatagatgccttcatgcatgcacattcacacacatctttcaaacaaatagaaccatattacaaacaccatacagcaccttgattattttaacctcaacgatttatcttggaaatggtgccatatgagcacatgtagaacctccttacttttttaatggatatttgggggttccactgaatgatgtactatcatttttcacccaacttctatagagaaacactttgggaatttgtcccaattaatttttttttcttcttaagcacagagctgactgtgtttctcttctatttaaaatcctccctggctcctcactactcacaaaacacaatcgaaagccctggttctgactagtgaagtcttaacagcatggccacctttccctctgaacctcatcccaagccatttctcaccctgggcctctgacccaccacctcaaacttcttggaagtccctctgtactcctatgtgtctcttagatgcagtcctcgtgacctcgaatctctgctctgtcttgtctactctgctcagtaatcacctctgctgtgaagccttcccataacccccttcacctccttaaaaataagcactccacacacacacacgcacacacacacagccaggccaaatgagttcattcatcctcaatgcccctcaaacccacaccttactctacagtagctcctactatccttcccaacatagccccatcttctctgagccgtctttcttgagccttcaggtaacactgatcactccatccctcacctcactatcttatacctctcataggacccacagagcttcatttatagcacatccatggc

SEQ ID NO: 28471 - DNA, 759 bp, Bovine  19866881354133
  misc_feature (1)..(1): n is a, c, g, or t
ncctggggcgcccctgcccaccggagggcatctatagcttgtgccctatagagtttagcagattcactctagcgcataacatgtacaatactctagcctgctgtgcagcaaagaagtggtagtactgataaagatgctgatggtgacagcaaatgctccatagtgcctcctgacttaacctctatggaggagaccattctatcctcattttacggaaaagtgaggctgagagagcttaggcaagctacccaaggtcagagagcagacaagtggcagagctaggatctaaacccaaccagtccagctccagaacacatattctaaaacatgacagcctccccgcggcagagtgcccttgtttggcctcctccgatgctgcctggacttaaagtcagaggtgggtggctctgctgcaggtgctttcccctttgctcttattgggaattgatggtataaagccagcttgcacctggagcctggttcatcccccagcctcggtcaggaggcacttctacttcatggtatgcaacgccaacacctgtctacctcctggttcccagagcatctctccctgggtggcagaggctgagctgagggtgggctctggagccggagaccagagcagcagcccgacaagagtgatgtccaagctgcgctgatttgcagatggaaatttacatacataatgtaatttggaccaattgaattgtcgattaagatggaatcacttgacaagcaacgcatactctgggcgggtga

SEQ ID NO: 28472 - DNA, 929 bp, Bovine  19866881526877
  misc_feature (1)..(1): n is a, c, g, or t
ngtgcacagactaaagaagggcctgggtctccaccaggcagcaggtggacaggaagtggcatttggcagctctctgatcaggggtgggaacactgccgcttccccaaattggttttccgacagtaaatgataattgctctaagtgttctagaactcagggatggagattaattacagctccgtatcctatggcgccctgaactttaagcacagcatgacatgcaggttgttaataagaaggaggatctgggaggacttttctgatgagcaaataagaaaaggaaaacaatttgaattggcttctgtacctaccaagggggaccctatgggcctggaagtatgcttcccatcttcccagcctggccacgagtcgtgtttatgatggtcagagacacaaagtggctcccaggacatggggactgatggttggtctccagtccccctggccaggatggatccaactcccaggccgctcagtctctacagggctcatgagaccagcagtcacaactcaaatggcagccaagtcaggaaggcaaagtaaccaagcagggcctgcagacaggggacacggcagggagaagtggatactgggagctgaggagcccattatctcaggggcaacctcatgtcaactccagcccgccactgttaccagggaaagctgggtctttaagagcagaatgacaggtttctatataaaatctctctttttacagttggaagcttattaacattttaacatagttgacagggccaaataaaacatatccatgctggaatctggtctgtgggccaccatcttgaaacctctacctcagcaaccagttacttccctctggcgaatgggaaatctggacctctgtcttcctggagagaggagagctttccagccatctgcctcctggtttcttccctcccactgcgtt

SEQ ID NO: 28473 - DNA, 778 bp, Bovine  19866881741009
  misc_feature (1)..(1): n is a, c, g, or t
nccacggctgccttcccggctgcagagctgtgatttattggcggctcctcctcgccagggcccatggcaggaggagttcaaacacccacaagaaaagccaccagctattgatccccgaatcgggcttcccaagcgctcccgggcattcatcaaggagccatggcgctggggccgcagctctccctttcttcttcctttcttctgcctcccaagtcattcccccaggctgtgcccccctcgccgaggtcactcggagagctcgccagtgactgcgtgcagaggtggagagcgcctttgtctgctgcctctttcctgtagatccttatcaaggcaggcgcccagggggtggagcgggccactttggaccttgggcttttaagaaaatctttggaagttagagaagtggagttggaatgtagaataagtagggggatgcctttctgaagcaggaactggtcggagtatccatgtttctctaggctctgggctgtagtattaagagcttgctaaccaagtggggctggaatgggaccaagcaggtcttgaaattagcatgtgaaaaccctagctttggcctggaggccttctgtgcgggctggtgaatggattgttgaaaacaatttgttttcctaattacataaatctgctagcagagtatttacctttttttttttccctctcacctggggaaagtctgttggtcccaggcctgtgaagtttaaataagcatatcaatactcttctctcacccttccttggggctccttcaagaatgggt

SEQ ID NO: 28474 - DNA, 826 bp, Bovine  19866882006773
  misc_feature (1)..(1): n is a, c, g, or t
ntgaggcagagatagagggaccatagggatgattgaaacaacagagcagtcatgagttcagggtctgaactgagacctgagttcaaattccagggtctccacacgggagtcatgaaaattacttaacctcctcctcctccctcctgggcctcagtttcctcatctgtataatggtacattagcctcttttgaggttagcatggacatccagagagccagtaggtggcgaatgctgagtatggttctggctgtgagtgctgaacacttgagcagttttgtcgctgacactgattttttcttcctcggacatgctctggttctgtgggtagggatagaatgttttacagtggagcaaattgccctggagtaaatgagccggggcatggcacccaggggaggagggcagcagggggctacatgcttgtttacttggcattagcgcactgacactcccctcctccggaatccagacagagcctctaagcttacccacattcagagggcgttgggaggctcacacttatatttctaaattcctccgtcctgggaaagccccccaggcagcttccatgccaaagccactcctggtgattaggggtgactaggggtgagtgatggccgtgggggttaacagtgcctgatcaatgtgggggtgaggtgcatgctcactggttcagggatagcaggtgaagggtactttgttaccacgtatgactggtgcctggctgcttcatcatctgcccttgtgcacgcagaagctaataagcagttccctctattttgcccctgggggtgcctactcgaggagggaaactattatttttaa

SEQ ID NO: 28475 - DNA, 1219 bp, Bovine  19866882028659
  misc_feature (1)..(1): n is a, c, g, or t
nagggatgacctgaccgccctgcttttgaagcattcacaaatgccaataaggtgtccccagagaggactgggcctcccggtgcccggtcccaccatcccgtgcttccaagagcccgccagctttggagtccctgcccttgcctgctgtggtgagaggaagaccctagcccagcttggacatccacttcagctcctgctcagtctacagcctcaggcagagctgggggcctctgcagctgagagccatgggctgtggccaggcctgtcccacaaccacaacccccgccaatcgctgcattcctcatgttcaacatgtcagcaggcccagccccaagccatgccactcaccatgatgtgacgacagccaccaggtcagggtagagggaactggggggcagaaatcccagctgacaggacttcaaagaggtcatgacagccatgcccctgcctctaggcctgctggccccagacataagcccctgtcttagcagggtctgacctaacacaggacaacccttagcatggctcaggccctggcaccagcggaaattctcacctgccacacctacccacaacacttctaacacagcaaagctaatgcttctgaaaagaggccgaacacatgactaaagagcaaatgcatttaaccgagaaaggcgccctaggctggagagaggctccaagtctggacctgtgtgttcttgtctgtgcctggcctccctcctccccttcctccttatctcctatgccgagtgctcggtgggacacactgggggctgtgggcagagaccgaatacgctattactccaaagcccccagcacatccacaccccgatgccattctccctccgccgctccactctcccggcgctgccaggcagggccgacctgctgcttgtcctgttgcttagctcctggggcagggaaggcactatggctgccaggacaagctccagactctcagaaggagaggacaggctgagcgaatggccgcggctgccctccttccagtactctccgggcacaagcacactggctagtccccgtgacattctccaaggtcgccccgtcagtatgctacttacagaagaagaagtcgaggcaggaagaggcccaccatacctggcacatgaaggacggaatcactctgtggaaagtggatcctttgtacccgaagcccttctccccggtgcacagggctctgaagttctctgggtgg

SEQ ID NO: 28476 - DNA, 1426 bp, Bovine  19866880285251
  misc_feature (1)..(1): n is a, c, g, or t
ngagttggtgatggacagggaggcctggcgtgctgcagtccatggggtcgcagagttggacacgactgagtgactgatctgaactaaactgaacaatgacagcatcagcaacagtaataatagtggccttttatggaggatttaaaaggtgattttactgatccctcagaacaataaaatgacgcagattctatatctaattgtatttcacagataaggaattgggggcttgaaaaaactgtgtggaaatgagggagttgagaattgaacctagggtgcccagttgccagctaactgctcttacccagtcgttccattcagtgcttgtgaaatgtttgttgagtgaataatcaaacacatcaatgagcaaatgagtaatgagggggaaaatcacacaaatatagaaaaattatccactccattgactaaagcaaggcgtttcctagaatctaagtcatgaccataaacctttttcctccatcatccaaccgtggacccctcacaactcaggaaaattccaaggacacgcttgttacagaagccacaccagtcggtgtcattccagatatgttcctaagggatacagagaagcatgtctcatccttttgggtccaggacaatcctctgatgaccctcaggaagacaggaacttagtgctgcagccaggctagcagcgatgggtgtctctggctcattttctcagccccttccatgatcctccagggacaaatactgatttgaaagctgctacacagtgtcagagagcagtgcaggcaggagatgtctggagagcccacggaagccaaatggaatgcaggaagtgaagagaagggcagatggagagccgccatggcaaagcaggcgccaggctgcagctgggctttgcttgtggggaaccacaggtactgacaaaatggaggtcactggtgcaggaatgtggggagagtaacctgtctcagtcccagagacacctagtgtgctggataagcacttgccagacaagcttagctcagggaggggccatatttacctgcagttcagccaggagcaaacatacagactgtggcctggtccactggcttatggcagccacccagtcctgcctgatgctcagaaggagggggagcaagtcctagagtgttctccatccttccttctcccacctcccccctcacagggagaattctagaaacatgggctcatacagactttcactcgcacatgcacacacacacccccatgctgagaaatttggtcaggcttccagcatttcaaagcacgagtcaattggtggatcttgtttctggagagaaaccaacatgtcctgaaggctgctgagctgggttccagcctgtaagaggctgccaattactcttcaatcctcatggtcagcctggcacttttcggcctgcacaggtaggacagt

SEQ ID NO: 28477 - DNA, 1508 bp, Bovine  19866880347324
  misc_feature (1)..(1): n is a, c, g, or t
naatatcaagagcctgaggcctgcccccaggagcctgcagtctaacggggagacagacattcagaccacatggcgccgttgtgtggtggctgctgggtaggggcacatgcaggatgaagtgaggcatggagaagaggtgttaattaacccctgttttggtggatcagggaaggcttcctggaggaggcaacatctcagccgggtacaagaggacaaacaatccatcctgcccacagggcgtgggggaaagttttgcacaaaaaaggcagcagcaaaaaatccccacagtgagcgagacactagagcaggaatgtcaggtgtgagttgggagcagccagagatgaggctgtgtgggaaccagattcttgggtgggctttataactcgacctcacctgactttctaggcttgcagcttacaataatgtttataatttgctgtgattttcctgttggctttaccctctgccctatatgccaattagaatataaaaatctagcaaagtgtacataaaagagatgtgggtatttgcttgtgaactggctgctctgcttagagatttaacaacttcacagtgtctccatatcttatgggtggggggagaaagaaaaaaaccatctcttggcatggttgcctttgttaccatcgggccctctccaggatcaatcctttaggggcgacttctctgcaggaaggggtctatcctgtgaaatttcatgtctcatcttttcccagagtgctggacacaaagatggcctcaaaatgtttctctctctctcttgattccagatgatgatgtgccaaccatttgtcactgggcagaagctggtacctggatgtttctggttggaggattcagacagcagcattccctgcctcccacaacccactacaggctcctttgtaatctctgaatttgcacgtgggcgtaaaggtgcctcttgagaaaatccgcccccgccccagatttcacatgaagaagtcgccggagttgggagggatttagagacatcaaataaaatatttctcagattcaagcaatgcttgaatccccttttaaaatggaaatattttcaaagaacccttcccccacttttgttgagtcaagtaatttctatcataatgttacttaagtacgtaccgacatgaaggctagagtaaaagccttctgcttatggctctcatatgactataaaagcaaaacaaatggacaaattatagaatggcaaactacaaaatcaataaaattcaaattaacagtattaatttaatgggatgtcattttatcaaacctaaatcaccacgctgcccatgagcaggggctgagtgagcggtgcagcccttgagagcctggcaggcttgcaggagctattttccacgtctctcagttacaactccatggaagcgatgtctttggtcttgccttggcccaaatgcatcacccacagagcatgcacacctctgcccttttcttcttagcttgctgtcattagcaaaaataaagtctaa

SEQ ID NO: 28478 - DNA, 1847 bp, Bovine  19866880355200
  misc_feature (1)..(1): n is a, c, g, or t
ntattctgaccacacttttttccagaatgcttaaccaaagagagtctcaaactagggcatatacacctaaaaatattcatgggtaacgcatgggtgagaaggcaagcccttgaatctgaaatagttcattttgagtgtgtactgttttgcttctgtagaggggtcaaaatttacatagtgatgatttagatgggaaaatacgagaaaaattttattttctataagtgatattcctttgcttttgagatttaaacctgaaaatggtgggcaaaacttaaacttgtaaagtaagactatcttggttttttattttgaataaatattcagttaaaagttcaggctctttattgctgttattctctctcagaggtccattctcctttcaaactggggaagatgcgggtgtaggggaaggcatgggtggcctcagggccacaggacagaggctgtgtgtcttctggggctttcttggaaattgccactgacctgactggcgagccactgctatctgttgggcatggcttgtcctgtcctgtttgtgtgttgtgtgctaactattgttgctgcttctggatttttccactctgtgcgatcagaaccagctttctccaggccagaatactggactggatggtctttcccttctccaggggatcttcccaacccagggatcgaacccaggtctcccgcattgcaggcagattctttaccatctgagccaccagggaagcccacataaggcctcacaaatcatgcaacatcatggccaaccacatcctagttgttacaagtgagtcatatgccagtaaatattcaaggagtagggaattaggctacagctcttgatgaggcctcattacagaagccattggtacagtcatctttggaaaatactgtctggcataataagcatctcacctttgagcccaatttatggtgaatgaatgaatgaatggaatagggatctaagtgttctgagaactgccaacaatcccagggtaagattttgatatggaagagaagggaaatctctctctattttcctgttcaaaaccttcttttgtctaggacatcctctgcctctccctacctgaggatgagcactgaggccaggagatgtagaaagagcaacagagggagggagagagagacagagttggggggagcagaaaagaagggaaggaaggaagaggatgtaagatttccaactcttgggaaggtgagaaataaacacccctcccttgatatttcctgctcaaaccagcttccatttttccagctttccccaaataagaaatggaacagttgggattcactttgaacccagatcatgggcttccttggtggctcagacagtaaagtgtctgtctgcaatgtgggagacctgggttcaatccctgtgttgggaagatcccctgaagaaggaaatggcaacccactccattactcttgcctggaaaatcccatggacagaggagcctggtaggctacagtccatggggttgcaaagagtcgaacaggactgagtgacttcacttcactttgaacctagatcagtgattgagaagaacttgactataagtcaagcttgatagtccatgtgtccccataggaattgtttctgccctcctggctccaggcctcagcttccctgtcttccagttagaacaaagagggctttccgccagcttatctcctagaaaccctcctgcttaagccctgtgattccataccagccacccccaaccgtcctagcagggcatcaacctcccagggagaggcagccctgtcattcagagaactctccttctccaaaatctaatatcccctcatctcccattatgagt

SEQ ID NO: 28479 - DNA, 1191 bp, Bovine  19866880356275
  misc_feature (1)..(1): n is a, c, g, or t
nttgccctggctgttctgccaggccgggaataatggtccaagccctgattctgcatctttccatcccaggcctgtagggagagtgtgtgctttcttggggatgtgtggggatgtctgacataggagcagcttcaaagatgggtgcaccctcgaaatattgagaaatggtcacagatccctggagcttccttcaggggtggccagtattttctgtggcttcacgaattccccttatttctatgtcagtcaggattcaatcatagaagctgacaaatgttgagttttctagaaatagagatatattataggaagttgtttttatgcaattgtgggaaccagttaagacctccgtgtaaggttgttgcttctgtgtctgcattgggtctgaagtcacttgcagccggcatagcagactggtggaaaggagaattggaggtgaacttggggaaagcaaagacaagttggaaaccatgaagacaactggaaccagtgacgtgccagagcttgtaagactgtcttgtgagagctgattattaaatttttaggaattctatgatgcagttgttaaacacagtcattataaaaattaaattagatgaacttacaattaaataaattgcattaaaaataaagctcattgcttcctaattattctgctatgacctattacctatgcccctggaataatttatatcaactttatctgtgtggtggaaatactgtatacaggtatgctactggatccgtcttcccaacttcatgttcagtggtgtcatggtggcagcttgcaattagccctgtggggatatttatattattgaaattggcaaatactcaagtcaggccttgatgaattattttataagttgcctagacctaagaagttgatggacagaacatgaataaaacaaattaaacttaaaaatgtctaatatttgtagcagttacactgtgggtaaaggaaatactcctttggtattcaaaactacttttcaacctagcaaagacgtagcttacaacacagaagagcagcttcgttgtttcacttttgtcttgcttgttatcgtaaacaatgtcaaccaagattcactctggaactgcacccggagagcaggttgtctgacacataccagcacactgttgattgtgtctgtttcttgtggcctccagtctcgatgacacaggtgatgt

SEQ ID NO: 28480 - DNA, 883 bp, Bovine  19866880387124
  misc_feature (1)..(1): n is a, c, g, or t
nacacctcatccgcatcgtctataagccagcccttagcagactgcttctctaaaattctgcaaatgctgttagactgggcagcctggatgtaagggattaatgtattcatttagtcattctcttagctgtccacacatctacccattgtttgtctctttgtcattgctgttgttcattcgccaagtcgtgtttgactctttgcaaccccacggactgcagcacaccaggcttccctgtcccctcccccattcccagagtttgcccaagttcatgtctgtttatctctttactgaagacagtatagaaaaatggtttatgttacgggttccgatcctgttttcccagcttactagctgcctcaggtcttcacctgagaagtgagaaaacacagtacggatacctgccttccagggctgttatgagaatgcagtggataaggatgtaaagcatttgccccaacaccttgtaactacgccgcacctgtcccagtttcgttattgtttgctggtggtagttgttagtgtgtgttgggggaagcttagcagatgggctttgtcggtttttaagcaaaggtggtaagaaaacacaaagtttacctttctatttccagagggctcaagttcccaagggaaacaagatgcttgcttcactgctgtttcaatattggtttacgacgtattatgtacaatctgtgtgctcgtaaacttgacatcatttacttaatctgcaaagtcttttgcagtacactctgaagagtctcattccacaggggaagagcctggggctcagagaaggcaatggttttgttgagtttgcacagctgaagtaggggaaggggggtcacattgggggctgcccacaacctcaccatcacaagatccc

SEQ ID NO: 28481 - DNA, 1749 bp, Bovine  19866880455394
  misc_feature (1)..(1): n is a, c, g, or t
ntgcatggagccacactgcctaccgcgcagcctggtgcaaggccccagaggaggctcgcatccagggtggacgcggacctctgggaagctgcctcagaggcccgaggtgagcgcaggcagaggagcaccacttccaccttcagtaaaagacgagaaaactcacaaagcccagggatggtctagcaggaaagccattcaagtacaagggtggaaaaatgtatgcaacacagaacaggccactgtgaaaagacttgtgtgctcagtcgctcggtcatgctcgactctttgtgaccctatagactgtagcccaccaggctcctctgtccacgggattctccaggcaagaacactagagtgggttgccatttccttccccagggcatcttccctaaccagggattgaatccgcgtctcctgtttcggcaggtagattctgagcactgagccacctgggaagcctggaaagaagttacttcagtgctaacaataggctgctggcattggacacgggcctgggtaagggtgacaactgtctcctaggggcatgtggatggcccgcactgggggctgtctcagaagacgccttacacacagagacgcctggtcaccacagagttgttcatggcagcaaaacgaggacactcagtgctcaacgcaggagactgcgacacaaaccaccccacctctgcggtagaacgtgcctcatagtcattgaatatagaaacatgccctctaagagggaatataagctgagaggagactttttggtggatggcttggcaatgtctatcaaaacctaaattccccatccagaagttcattctctgtgcaccagagcacagacgtttatgcaggaggatgatcactctagcacaatccatatgaccaccactagggacttggttaaataactgtagtgaagaccggagcgaaatgctaccaagtcaatacaaagaacgatagacagatacaggcactgagagacagcccagatacaaagtgaaattcaaggcgcactctaagtggaaaaaaacaagtttcaaaacaatacatacatcaaacttgtttaaaaaagaaaatttatatatccacatatatgcgtaatacacggacgaataaacaaaaacatacatacatagaaaaaaattctagaaggatctacactggactattgcttctctttggaggcgcaagattagagaaacttttatactttctacacaatatatcactattttcttattttaattttattattggagtataatttctttacaatgttgtgtaggtttctgctgtatatatatcactattttctgcactctatcaacttgtaacaagtatgcactgcttttataaactgaaaaaaaaatgacaggtatttccactaaaaaaaaaaacttaggaagaattctagtaacattggaaaacactattaaagtttataaaagctggatataaatcatatatacaatgtattaataactatccatgtaaaaatatatttaaaagcagagccaccaggaaatggaccaaactggtgagaggtggagttgtgggtaatttttactttcttatttaaaaattttcctacaatgagaggtttttctgcaatcactagtgataagcaatttgagaattttcacctagaaaaaggtgacagcctagccccccaaagaccagcaggaagaaaaatacctttatgcagatgtccctcagctgtgctctgacttcagctactagcatcat

SEQ ID NO: 28482 - DNA, 1417 bp, Bovine  19866880554491
  misc_feature (1)..(1): n is a, c, g, or t
ncaaacgaactggaacttgagagtctggagcagagataggtttattgcagggccatgcagggagaggggcatgcctgcccctactccaaagtccctgaagaatttcagcaaagcatttttaaaattagtttttattagaggatagttgcttcataacgttgtgttagtttctgctatacagcacagtgaatcagctgtatgcatatggatgtatccatatgtaacagatatggatatctgtgtgtgcctgcagcatgctaagtcacttcagtcatgtccgtctctgcgaaaccctgtggactgtagcccaccaggcttctctgtcagtggaattctctaggcaaaaacactggagtgggttgccatgcctctttttttggatttccttcccatttatcccctcatttttttggatttccttctcatttaggcctctgggtcaggccctctcttctgcgggcactccggagtggatcaggccagggaattcaaagtcagtttatacttcagggcactaaacgcagtgccggccaggcatgggggatgggagtggggggtatgtgatcccagctcagggatggtgctggcaccagatcctgcaggtccttaggagaggacctgcattctagcaatggaactgtgaggagtaagctggaaacattcaactgtccttgggctgatgtaaagcatcctgaccaccatctcccaaggctgggaggatggctcctggggagggagctaacgcagcaatggggtgaggaggtgggaagctgagcccatgcttctctggtttcaagccttttccagcttgtcttggaaaagcaaatgcatgactgttggcatccccttccagtgggtgggcgtggaagaagcattaagcatcttattctcaaagccctggaatgtcaatgatagaggtccttgcagggctgctggggttcgcctcctccattccagccacctagacttggtgttgcccgaaggaggctctaaaagccaggctttattcggttttattcagctgcaaagtcagggggagcctgggaggccggctgggcacgtgcaaagatctgtctttgcagatcttgggcctgtgagccgcctggctctgagctgagcaaggggggccaggccctgcctttctaagccttcagatttcctaccatctgcttggtcggaccgcctgtttaaattctccacttgtctcgccttccacaaaataattagcatccatttgttcctagagctcgcgtggtggcattagtcattgtaggagctttcagcgcagctcacagaaatttccatttgatgtaaagttgaaaatggctttcgtgggactctgcagggcccccctcacttctgctctctcaccagcatctggcgctgcgtcggttccctcccacccgtttctttgttg

SEQ ID NO: 28483 - DNA, 1471 bp, Bovine  19866880554883
  misc_feature (1)..(1): n is a, c, g, or t
nctgggaagcccgaaaactagatgctgctgctgctgtcgcttcagtcatgtccaactctgtgcgaccccatagacggcagcccactaggctcctctgtccctgggattctccaggcaagaacactggagtgggttgccgtttccttctccaatgcatgaaagtgaaaagtgaaagtgaagtcgctcagtcgtgtccgactcttagcaaccgcatggactgcagcctaccaggctcctctgtccatgggattttccaggcaagagtactggagtggggtgccattgccttctccggaaaactagatgagaaaggtccaaattgcccaacactgggccttgcacacagtaggtattctcacagaggaatgggccatcctctgcctccttcctcccaccctgtgggcatcagccaaggctcgctcaataattcttccacccatctctcccacacctattacttgaacacctactgtgtacagggcaccacgttccaggacactcagccttatttccactctgcttctccagtggctctggcaaacaatgagcaattcgagtccccgcccctcccccaggcagagagatgagaggagtctattgagtatgtgcaaaggaggcagtgggcggagaaaacttctcactgcttggggaaacgctgaacaaacctttttattttttgcccacagcaaaaatttcataaataaataaataaaggaaaatcaatagcgttttctgagcgtggcttggcagagccaaggatctcgacactcagaaaagacaatggatggtgtcccagccagggagggtgatgcagagcctgggggtggggcagtcccttaggaggaagggggaggggaggttgccctcagtggagggtgttctggacatagcggggttgttccctcaggtgccttgcagcccccaagaaggctcctccccacctcccacctcctctgtcgagcctcaggggaggctttgcctctgcgagaatgtgcccagaatttcaccgggggggccaggcccacatctccttcttagggttcctgccacatggggacaggagacaggaggctttcactattcttatacacccctgcacacacactcacacactcacacagcctgcttccagagctcagtgcttcctcttgcactagaaaagctcttcaacattctgagatcgtaagcaagtcacctccctttttgaaaccttagcttctccatctgtaaaatggacacatcccttgagttgtcctgcctggaagagtcagaggatcttatttctctccctctgatccaccacaaggaccaatgtgactgggacacctatccccccatgctttttctggatgaggcgtgagtcgaggactttttcctggatcggaggggggcaagcagtcactctgggtgtccacgagttcatgtccaggggcaccagtgaggaagcactgggaggggggacaagcagtca

SEQ ID NO: 28484 - DNA, 2079 bp, Bovine  19866880590100
  misc_feature (1)..(1): n is a, c, g, or t
naggagtttattaaatccgtaaaggatttgatgtatatcaaactgttagcataaagtcaatactttgcagagaagcagacaataaatactcagcaagaggcaatatttctatcagggagaaggcaatcgcataaagattaggggagcaatttcaatattgcccgtctctctgctgtaaggagacatgtcttgttttccagaatgatcacaggggaaggagcgggggtggggcagcagccttctttacttggctaatctcaccatcaagcccgaactagatattaggcaccaaatgtttgtgttccctcctacattcatatgttggagccttatccttcagtgtgactggatttggagatgggacctcagaggaggtgaactggtttaaatgaggtcataagggtgggactctgatccataaggtgatagagttggtggttttgccagtaatcatgtacgaatgtgagagttggaccttaaaggaggctgagtgctgaagaactgatgtgttcaagttgcggtgctggagagggctcttgagaatcccttggactgcaaggagatcaaaccagtcaatcctaaaggaaatcaactctgaatattcattggaaggactgatgttgaagttgaagctccaataatttggccacctgatatgaagagctgactcattgggaaagaccctgatgctgggatggcaccttgctggtggagaacagagaccctgtctcccttgtctgctcatcaggacagatggtctttagaggggcaggtagtatactgagacatgtaggtactgtagtgtacatgctaaagtatgttaagaagatagattgtacatgaagtgtgcttaccaccaaaaaagtccctaagcccccaaaccagagcataaaacagcaacaacaaatcacacaaagaacacaagagcatttttggagaagatggatatgtttaatgccttgatcgtgttgatggtatcacaggtgcatttatatactcaaactcatcaaaatatatatgtaagatatgtgcaatttttttgcatcagcttcagttctatctcaataggacttccctggtggctcagacggtaaagaatctgcctgcattgtacgagaccatggagaagggaatggcagtccactccagtattcttgcctggagaaatccatggacagaggagcctggcaggctatagtccatggggtcgaaaagagttggacatgactgaacaactgatactttcactatatctcaataaagcttcaaaaataaaaaatgaatgaaactacgagggagaaaggacagcttttgcccacagttgtaagtacactcaacagtgctttcaaaggggagttccttgtgccaggaaacaggaagacatctctgaattacaccagctagttagggttttgggaggccatctgtgcacactaggagtttttggatgcaagtaacagaaaaatccagctggttaatgtcttggctcgtgatagggtgagtgttcagggttgttttgatgatgatgcggccaagccccaggttcccttttcggtcccctcctccgtgatggttcctttttcatagatcctttttcctcctctcatgaccaccaagatgcctgccagtttcggagggctgtttgatccctggttcacggtccctggggagaagggtatttttgccctcccaaccagcaaacaaaatcttcagacttcagctggttggatccatttaggtgagaaatctccaagaggatggagctcacagcttagtgaggcctggcacatggccccaggggtggaggaagtaggagctgggggatggagtcagcttcctctgaagcacccaggatgtgtgggggagagtagatgcctgcctgaaaatcctgagttgttaaccaagagaagggagggtcgtactgggaagctccgaacagcacatgctcgaaacagcaatgtctctttgcagaactgttagtggtgtgccaaacccagagacagagatggaaagaaagcggatgaggctgtcatacatcaccaggtccaacttcctgattttacagatgggaaagcaaag

SEQ ID NO: 28485 - DNA, 2384 bp, Bovine  19866880622906
  misc_feature (1)..(1): n is a, c, g, or t
ngaaattttcagcaggaaaggagcatctggaaacacaggtttccatggaaaagacggcaggctgggctttgttctcatctccagctgatggagacgagcctttgtgaaggcggcagggaacgctgtcggggtcaccaagtggtggaagccttctctgccctccggcacattctctttttgttgcactgttccacatgccgacttctcccagagctggcttgattttagcaggacacagagagcttgtcctggagcttctctgattgttccctgtgtctccagcctctgcgtcaacccacgctgcactgcctgaccatgcttctacctgaccaggaatgagattcagctctgttcatttacggcacagtggtgaccggtcagcaggaccaagctggtcatttccttatttgggacctagagaagggggagtgctggatgttgtagatggtagggtccaactccctcctttagagatgaagacccacaggcccagagagacccagaactggctcaggcacacacagtgagtgagacactgggtcccctggccccaagcttggtggtctgttcattgatacatggagcccaagatttgagtcggccctctcgagccatgtccttggtaggggaagtggaatgagatatctggcagggctaagctctgtggcagaatgataaatgtcccccttgcattgctaggaagtgggttctgggaacaagggcagccaacagagccatttatccacctcccagtcagccatgggccagcactgtggggagtaaagagagaggggaggctaggggcactccaattcattactggcagagactgccatcggggggtggaccagagcctcagatgtgaggtctgtctgtcctagtggtcagggctaggccaagaacatccttctaatttcaactgcatttaaaatcagagctttaaaatttatgttaattgcaactctgagccttgaaagttcatgtgtgcatatataagatacatataattttttttaatggtataggatataggctgtggtgagacaagaattctcaaacataggtgatgaaaggataattttttagaggccatttggcaagtgtctgtgaaagccttaaaatatttatactctttgtcttaggaattccatttctggaaatacatcctaagaaaatgattatagatagagaggaaaatgtttatagcagcactaaattagtttcaatcttaatacttggctattaaaatacaatggtaaactatgatatatccatttggaaaattattatgaatcatttaaaaatgaggtaaagaattctaatgatataagaaatgcttatgatacagtgtctaatgaagaaagtagagcattgtagtctaagccctgactgatctgactgatttttttttctgttttgtaatacaagtgtctgacttaagctttgatttcgaaggcatctatttaaagaggtgtctacttcaaagcttcccaggtggcactagtggtaaagaaactgtcaatgcaggagacataagagatgtgggttttatccctgggttgggaagattccccggaggagggcatggcaacccactcccagtattcttgcctggagaatcccatggacagaggagcctggcaggttgcagttcatagggtcacaaagagtcagacttgactgaagagatttggcatgtatggcactacttcaaagctggctatggagactaaacaccttgccagccacagcaggccaccttccctcatggaagtgcctctgttttagaggttgtggttgatttcaataactgaccctttgggatgctccctatttttctcttctcacttcaaattcccattctcctgttttaaattcaccaataaagactgagctgtagaaaccctaggaccccacctagaccccaataaaagcagaaccccagactcatgacatgtgccctctccctctccctctgcaatcttgttctgtggcccccacaggctgtgtgatttccaggtcttacaagtaataaacctttatgttttttcaaagcttcctgatggttattgctgaggagcatcttgcaatcataataagaaccacaagggcccatccagctgcagcattgcttattggcaggataagaccacacaacatacgcatacaacaggcaatacatatagatatactcatttttttaaaaattttgcttatttatttttggctgcactggatctttattgctgcgcatagtagtagtgaaagttgctcagtcgtgttcgattctttgcgaccccatggactatacagtccatgggaattctccaggccagaatactggagtgggtagcctttcccttctccaggagatgttcccaacc

SEQ ID NO: 28486 - DNA, 1439 bp, Bovine  19866880625383
  misc_feature (1)..(1): n is a, c, g, or t
nattggaggacggaacagaggccaaatcatgcccagcagcccagttttctccagaaactagggtgatccactaaagaattctaaacagagttaccatggtcaggttctctttacacctgtaattctctggttgctgctagagaacaggttgaaagagaaaacctataggcagagagcccaggtaggggcccaggtaatcatccaggtgagagaaggtgatagtttggactggaggagtggtaccagaatgagagaaatgaacaaactcaagagatatcaggaaggtggaatagacagacctcggtgatgggagagggtacggctgggctggagaggggtcccggccagtatcagagcccatatagccagggcaaaagggtgacttttgttcagtcgctcagtcatgtctgactctttgtgaccccatggactacagcacaccaggcttccctgtccttcactatctcccagagtttgctcagactaatgtccatttaatcagtgatgccatccatcagggtcttttccaggaagtcagctcttcgcatcaggtggccaaagaaatggagcttcagcttcagcaccagtccttccaatgaatattcagggatgttttcctttaggggtggattttagccccaatcaagatgcatagatcctgagagcagacctaaaatcatgtccatttgagcgagcctgagcagagtgaatcaggaagtaatccaaaccagatcactctgggggcccagaatgtgctgacccctggaaaagtaaggaaaccaaggaagtgagtctcacggtggcagtggggggtggggtctggaccaaggtgagggcaggtggtagactctcagcccaccacctggggtcctgcgccctttggtgtgggggttaggtccagggcagaggcgacagcactgaagggcagctgacatttcagccctcgctgacagggtcacagtgcagagcctgctggaaggtttaacacccagacacagaagtctcaggccctcagcctctcctgcaggcgacccaagggcttccgactgactgtaaggtctgtgcagccatcagccgtgtggctgccaagaaagcaattgcctcctctgactacattaataggagtttagtgtccggatcgatgtggctaagagtcccactgcagtcggcacttgtcagactgtatctggagcccaggcgctgcgaggagctgactcagacactcctcaacctgggtctgaaaagcctacgctgcccatttggggcgatggctctaggccccacctcccctgggaatgttccacctccagccagaattggcccagacactctgcagtgacaagagtacaggtccagtgttgctaggtcatctcagatgtccagagaactcagaacttgagctttgcaagtgatgtatgtgctgctgtatataaaatgga

SEQ ID NO: 28487 - DNA, 812 bp, Bovine  19866880721529
  misc_feature (1)..(1): n is a, c, g, or t
ntgggtgtggggcggtggggtcactgttcaacaggcagtgtaactcccagatgagctcacaatccatccaattccacatcacagcaggcattgttagcatcaggctctagctgtttccaaggcaaaagatttttggaccatgtactgccatctacttgtcttctctatctctgtcgccaacatttccctccttggaaattcaaaagagccagggaaaaaaaaagacagtgaggaaaaattgttcagggagataggagggtgatgcaaatggaaatcacaaagaagaatcccagggaatgggaatttcaagatgggagtggttgacagtgtcccacggtagacagaattaaaaggagaggtggcaggtgtccattggatttagcatggagaaaatgacggatgagctggtgagagtcatgtcagaagagtggggcccagaggggagcagaagccacggggcaggtaggtgagaggggagttgatcggctggggaaggagtcccacagttgatactggatgggttagctacatgcccaccatcttacctccaactttgctttttgttctctattctcatcaatagacttaagacctcttaggaaattacaatattacagaataagttttatgccacgataacatcattatgttggaaggcctttgagatgccttaggaagtgtcctgagttcaggaattcccagcctacagtagtgcttcttatcttttcaggggactaaagtcttggcttggtaacctaaatgtatcttagatttcccctgcctcttcccacttacattccatctgcccccac

SEQ ID NO: 28488 - DNA, 1590 bp, Bovine  19866880790457
  misc_feature (1)..(1): n is a, c, g, or t
ncactcagctcatctgcatccctggcttccttctgccctgtaaaggcatttgaccacgagaaagccacttttgccctccctcacatcagcacctggccattctgcttgagcttggggtggggttctcggtggaggcatttgaggtggtttggtgggaggtaccagggcccccatgggcaggagtgaggggcatggggtacacagcactctccaaggcctgactgcttgtgaggtttgcaagagagtctttccttcctctcttcccaactctccaggaccttaaagaacaccccagaactgccactggctcatgtggtctctaacagctgttactgacctctgaggcctggagagactggagtaactgcccgtctgagatctcctggagggaaacagagatgaagaaggatctgtaacagtgctggttatttacacatatgatactcctctaaactcctacctacttctgagatttctctcattctgagaacaagctacggataaattctgatagaatctggagtaagggctggaagggcctttagagattatccaggtgcatcccttccttatgcatatggggaaactgaggcccagaggccatgattagacagagggtgggagagagataggaggcatccaagtgaacagcagcagtttctctcagcatcccagacacggtttatccagtgttgtcctgaagggaaccctggtagagaactaaccagggtttagatagcttaaactatctaagatatccttaaatagtttaaggacgtcttaaacttctgaacagacatctatctccttgcccatgttggccttctagattcacacagatcaaatctgttctgaattttgatgtcagaagatcaagggacttccctggtggtccagtggctaggactgtgtgctcccaacacagagggcctgggttcaatccctgcttggggaacttagatcccacctgctgcaactaagagttcatgtgccacaactaaaaatttgcaatgctgcaactgagactggcccagccaaatacgtaaataacttaaaaaaagaagaagaaaaccttagcacttgggagtcatgggataatttcaatagcaaaacaacagaaataagtcaaggggcttagacagttacttgcataaggcgaggaaggggctgttcacagcagctcatgtggacaaggcctgaaagtctgagcagactcagattcactgtgacctgatggtctgtggaggtgggctccaggagcatcaggttcatctggagggtggaggagggtattccatgtcctccctgaagactggacactcagggagcccatcctggctcatctgtaaatgggaacatctaccaggagggtgtccggatggcaaagaattaaaaaaccaaaatacaggaggaatgatgggaggaagtagagagatttgacttgcataagaggagacttaggggaggccttgatcccagtcttcaagtatcttttcttgatactttctcctgggctctcccaggagaaacagataagaaatagaaatagatctgtcagttccaaggcacagaatcaagataggcaaggat

SEQ ID NO: 28489 - DNA, 1668 bp, Bovine  19866880800837
  misc_feature (1)..(1): n is a, c, g, or t
ntaatgtttctgcttttgaatatgctatctaggttggtcataactttccttccaaggagtaggcgtcatttaatttcatcgctgcaatcaccatctgcattgattttggagccccccaaaataaagtctgacactgtttccactgtttccccatctatttcccatgaagtgatgggaccagatgccttacataagcataactgaagtgattaatacttctaatttttgccaatctggtaaaatggttttacagggttgttttttgaaaaccaaaaacatctaaccccccacccatacacacacacaggttgaacactgaggactgaaactaccagagtctccttgcctcaccccccaacaacttactgtttacattagcatgactctactattctagaccagaataatattttcattgtccaaatggttggattgttcattatgaaatccccagccaaagactgatgaactctttaatgggatgcgtggcgtgcgtgttctccccgtgtctgactctttagatcccacagactgcaggccgccaggcacctctgtccatgaaattttccaggcaagaatactgtagtgtgttgccatttcctactctagagaatctcgccaacaatttgttacagcaagattctctgcaactcttgcttcagcagtttctaccaatactggactgattttcatgagctctacccagtcctaatcaagcctccaaactaaaaaatccaccttaaaccaacagggcctctcttcgggaactgatcaagtcctgctttcagttcagttcaagtcgctcagtcgtgactactctgcgaccccaagtcctgctttaggttactattatcacaagcctatcttctctgcaagccttagatttcctgagggcaggatgaataaggcttcaaccgatatttgcaggtgatacgcgcgaagtacacaggtcacctcaacgagttgaggagcagacgctccagaaacctccgggcaggaactacttccggcttgagaactggctcccgacaggccccgcgcccccgctgcatgccgggaccttcagggtggaggttcgcggcccgctggcgacgctgctccatcaggcagctctagcggccgggatggcgccccaccgagtgccacctgttcccgcttttcttcaaagaaaatgcagccccgtggcacttacccaagcgactatgagagtgataaattcgaccaaacaccagcttcccgccacctcctttaaaccaccgcaggctgccagagataggcggcgcggttgactcccccagattctgaccgctatccgcttcagcgaacgatagcaagggcacgatgccaccgcgctcctaattggccgactgtccggggaggggccacctagattggtgacggaaaggggccgggcgggaaagctagctgtggccagcggggattggcagaatgaatcggtattcactcccttccccgagacgttggtgggtgggagaagctaggctgggccgccgcggaaacgcaactcgtgattggcggatgtgtttttattcgggctctagcggttggtggctggacagttgatcagcgctgattggatagcagcataacggggagggccccgctctggttccgccctgatcccgccccgccgctgggatggactgg

SEQ ID NO: 28490 - DNA, 2212 bp, Bovine  19866880843936
  misc_feature (1)..(1): n is a, c, g, or t
ngcagatgctgcccttatgactgggccccagaaaaaaaaaacaagtgaaaaagacctgagtctatcctgtaggttggagctgagcccacctagattaaaccatactataatcaacttgcagatccaagactgtgaaaacaatcactaatagtttaagccactgagtttgagggggtggtttgttatgcagaatgactatagcaataactgactgatacagccttgctagttcaagtcctctactctcattcccctagtccaactgccatacaagatgttagaccacttcaatcgctacaagcaagaaatgcttccctattaaagtttttagtttttcttccaggtttattcctttatgcattttgttcatacattcaataaatgaagacttgtgctaagccttagcaagggcaatggggggcaagtaagggtggccataaattggaatgaggtgctttctattaatacttcttgaagtgagagagaaagacgtgaaagcaaataattacatctcaaggtgttagccatatttcttaaagcaaaccaagtggagataaaataatcattcttgcaaatgcccttgtttatacttaaaagcaattatctgtgggcattttaaaaagtaaaatctatagtaattatgactttgccttttttctttttcacatatcacatgagccagtcttaccatatgtcaatatcatacattttcctttaaagtttgttttgcacatccttctggaagacgtggagagagatgtacttgtaaacagacagaaatgattcacaggatcatgactgctttccatcagctgcatcaattatatacagcaatggtacttggtgaaatacacttacaacttgttaaaaacactccttgaaacaattcagatcttgttaagtcctggtgtgctcagctaagcatgggctggcagtcggcataccttactcttcacaatcaaatccaagatgaccttggccttgaggaaggcaggccaggttagagtttccttctgatcttgctttctgttgtcatgaaacagaaaacagggaagccagctaagaaatgagtacagacttctatcaggttgtcagtaaagcatccagtcagtcatcaagccaattaatactctgtcaaatgatggagatatagcaatgcaagttaaagaataaatacatggtcacaccctcaggttacttatggtctcatacagatttgcatgcacactcagtcactcagtcttgtcggactctgcgaccccatggactgtagaccgccaggctcttctgtccataggatccctccagccaagaacactgccatttccttcttcaagggatcttccaactccagggaccaagcccaagtctcctgcgtatccttgcaaacgcaaggtgcattctttaccactgagccacctgtgaaactccctccaaggagatcacagatagttaaacatgccatttccagctcctccatcttttaaaaaattcacctaacttcccagtccctcaatttattcatccataaaacttcaaaactaatagcattcataatcaaaaacaataaagttacaaaaattgcatcatggaattgtgagaattaagttagtatatgttacagtagacaaccagttgcctactcaatatccataatcctccccctttttttttttttactaagagaaccctaatttttttggaatggcaatgtatcctgccaaaatattcagcctcccttgcagctatggtggcagttgattcagttctggcccgtgacaaatagatagaagtcttggcaagggcaagacccaataaaaggacaacatttcacgggatatacttttcattcatcttcttgtcagaaacacacatgtggaacatccaaccactaccttgagaccatgaagatgaaaccacacacttgggatggtggaacagaaaactggaaggaacttgactttcaaatgatttctttggacaccctcgtcaactctattctatatacttacttccagactcaccgtgggaggaatagttctcgcttaaggcacttgcttgcttaagccactctttgaggggggtggtgtctgttctacacaggtgaataaattcctaactgaaaacaacatgcctggcatatgggaagcatttggtaaatgccattagtcttattaatgttatgaccacaccgtgtgacggcggcgtggtg

SEQ ID NO: 28491 - DNA, 747 bp, Bovine  19866880847444
  misc_feature (1)..(1): n is a, c, g, or t
nagctggcaacagaaccccccctccccatgttcataaccccagtcttgagacaaacgctctagtcattaaccgagagcgtatacgacaggctaaagttatgactagcgtttgttcgctgcagtaaagaatgtcctctattaatgacaacagctgtcggtttaataaccccagaaaagatcattaaattccttcacatttcccagaaacagatggaagaatttcagaaaggttcaaacatatggggaaacatattggattgcagcagctccaaagagtggccagaaatccgatattctgatgggctgttccgcacacaatcggcctgtgggcacccaacgggagcaggtgcactccatgccttgcggaggacgtgggaacatgggtgaggactggtgtcgaaacaggcaagccctgggtgtgctgggctggactggaaagatggatgcctgagttggcaggttcctattgaagccaaagagggtagctagggtctgcagcccttgaccccactttgctgcttcagtgattgctagaagtaccacccattggcagagtatgacacattccatttcccatccatgctcccttctgatcactgcacacttgctccaatgtatatagatatatctgggtcagcaacagtcgggctaatgcactcgcaggtgaactcctgataccttgcatcaacaaacttactctgtgacggggggactgcccacatcagagcccatcagctgatctcaaag

SEQ ID NO: 28492 - DNA, 1398 bp, Bovine  19866880856175
  misc_feature (1)..(1): n is a, c, g, or t
ncagaagatgcttttagagttaacacgatgtcaactttggaggcagacaggaaggggaggaaggagtcagctcagtcgggcgccagggctcaaaccacagaaaagagggtcagtagcctgagccccacctgtggaacccttcagagctctctctgggttgaggaaacagatgtcactgcgccctgcaggtggctgtgggaagatgaagagctggcagacagagacagtgcagtcaggcagaactttgtagaagtctgagctgtccagggaagggagtgggctgccttgggaggcttgtagtctccaggagaagaggacaccgagatccagagaggagaagcgtcttcccaagtcacccagctgggcagctggggtgctgagactaggcacagctgccgacagcctaggaagttgggcagagggtgttctttctcggacagtgtgtgtatcaggcagggaggtggagagacttctttcccctctgatgccttctcctcgatggtgaaaggaaacagggctgaattcgaagctctttcttgacttccaagcaagcggaacacacctgatgagcctcttcaatatttattttcccaatagactcgaacaattctgaagagacataatattacgtttcttagaaatttccctgaatacatatttatcagggaaacctgcataagctaaaaaggtctcagatctacttatttatgtattcagtcatctccagagtgtgggctctgccagcattaacgagaagagacagtaattagattgcactgggcctgagcccccgctccaaggctgggaagagggcctggctgccaggcagggttctggggtcctcaccctcaggatgcttgtccttcaggtttgcgcctctggggatctgtggatctcaaacttggctgtgtattggaatcatctgggaagttaaaaaaaaaatactgatgcttatgtccttttcacagagattctgatttaatttttcctggggcaaccttggcatttgggactttcacaaactccctgggtgatctattgtgtagcaaaatttgagaaccactgactttgtgaacctgtaggccaggctacactcctgtgtcatcctttcttctccactagtttttatcaaaagtgggctgtgctgatggaagggagagcccagggctgggagtcacgggcaaggccaacttcacggacctgtgacccgggcagtgacaggggggcccatgctaaatactctgctgtatctgtcttgaaattcctaattactttttaacaagtgcaacttacatttcattttgcattagtgttagtcgctcagtcaagtctggctctttgggaccccatggactgtagcctaccatgggaattttccaggcaagaatactggagtga

SEQ ID NO: 28493 - DNA, 805 bp, Bovine  19866880860604
  misc_feature (1)..(1): n is a, c, g, or t
nactcctactgtagatatgaaagacttagaaaagaaacattttcaaggaggcccaacctaaggactgtggagctaaaggtatgtttctaccttatattcttttcagatttttcactctctcatctgtcaagatttgttgacaaagaaaaaaatacaaaactaagttatatttatgagaaaactgtttggctcacagataattgcttttaaagcatcttatttcaacctacttgataaaacagactgacttccaatgagacagcaatgtggtaatctaggcaaaatacatatatatatcatatatactataagtcattatcacaagaagccaatgtgcagactacagtacactgacgtttcaatagtagcaaacacaccgtaagaaccactgattttaaggaattttctgcatgtattacaaattatacagataaacactaaatggaaacacaacttacctacaattcactgttgattttccaccttcaaattcagaattctttccccatcttttaggtaattctaatatcataagtccttttattcctataagtgctacatgatgttgtgttgggcttaacaagacttgatagatttcaaacaggggtggatttatgcaaagcaatctctgaaaattaaagcaaattggtcaaaatagttcactttaatgtaaatatatattggcagttactcaaaagcatagtaccgctttagttttctattaatgtagaataaagaagcattctggataagtactaacacttcagccattaactgatgaaatatttttttaactgcttacatt

SEQ ID NO: 28494 - DNA, 846 bp, Bovine  19866880923181
  misc_feature (1)..(1): n is a, c, g, or t
ntggagtgtgctggcaggtctggctggtttctggtccctgacatcctcagatttggcctgccatgtgccaggaacctccaggagtgccactcatgatcaaagccagagaaatgcacagatgagggccagcctgggggagcgtggggggaggtgtggagcaatgtcttaaaactctggaagggtcagcccagggcccacccgccattctccattctcctctccagaggggcaggctccttgcctctgacaactagctctgcttttttctttatgaaaaaataatcaaagcccaaatgcggctggcagagtttctgaaagtcaatagaaaagaagcaaaggaaaggagccagctgagatggagataacgttcaatgcctctgactaaggagggcctaattaaaacaaatctttaaagcacagaacttggaagttggccccagagggaacggaaatctccgagatggacactcctcccggggtgagcgggtaatggtgctaggatacacacccggactccaactccctcggctcctcccagagcagcctggctacggagcaatgggcccaggtcttagggtcctgatcctcccgctcccccgccagatcacccacccccagaaacccagagccagggctttggggagacacagtagacagtctgccaagacctccctgaagcaggcagctcaggatgggggcaggctttgcctttccaagccttctgaagggctttcgaggttcaagcccacattcctgtagaacatttggtgcttgtccttcagtcgtgtttgttacccacccacctccctagctctcccttaaaatactcccatctggcatcagcgt

SEQ ID NO: 28495 - DNA, 1182 bp, Bovine  19866880935221
  misc_feature (1)..(1): n is a, c, g, or t
ncagacacacaggacacaggacagcacccccacagggctccaagtgaaataagggaacccctcaccccaaaataaagcatgcttccagaggagctgtggaaatagtcctgctgaagactggaagatgctgcagcagggaagggccagggggcttctcctcgaggaagatgagggctgccaggctaaccccaccagcccagctgtcggccaagcttcctttaggagatgaacacagctgctcttcccccatggaaccactgggctctgggggcaaccaatgggcccaccggggcatcatctccgagggacttgtgaggccagagctaagtgtatggggaggatgagggcggtcaggggaatactggacagaacctccccccgaccttgctctctctccagcacttgcaacggccaggtcgaggttgctgcaggcagagcgcagcaagccagccctctgctgcctgtattcccctctccaccagccctcacttcctgtgcctgaaaacctaggcgatccagaggagaaaaagaaaaagtcactccctctccccatctcctgatcccaaccatggcgttctgacatgggataagccaagcactccataaactgaagcccgcccttccagcgaaaagagagacgacagcgtctaatgttgttagaaaagtgcagtggagttccgagtctgtccatattgggtgctgctggggaccaggagagtgtgggcagcagcaggatcccagggcagggctgtgagactggaaccctcacgtccagccttcccagtgctcagagaagggtcagaggtctccctccccgcccctgccttcccactgggcgagccggcaccgagccagcatcattcgtgggcacagatgctcagggaaaacagacacccgggaggttatccggagcagaggacccccgaggcttctcctgagaaacgaaaaaccgcaattagcagcctccagtcatgaatctccttctacacttaggaagatgcaaaagctctacttagggtaattttccggacaaaatacatacgtttcgcctttgcccatgcctccgttcaagttcaccaagagacggagaaaaacctccgctgaccggaaacctggcgtgctagcagaacgagagggagctgccgctaggtaaacgtctcctctaagaaaaggcagtgcgca

SEQ ID NO: 28496 - DNA, 1439 bp, Bovine  19866880974412
  misc_feature (1)..(1): n is a, c, g, or t
nccaaagatgcaccactgcaaggtaattcaatgagcctcttgatttttttttttagcattttatgcaacaaaaaattccttgatcataatctatgacacagtcaccccatctaatatgcaggaggccgtgggaacccctgatgagagcaggggtgcaactcagtgggggagagggcagtctgggatgatgggcagaattccctttgaacggcaggctgggtgggaggttgggagagaagaaacccacaaccacaggttgcttcccggcctccagctcagccacccaccaggaccccctcctctcccagcctggtctggagctgtgccttctgcgtcactcttttctcggtagtgccagcagccttgattgttgaaaacggctgtatttggctttaatcagagcccttgtcaagcacccgccccctccttttgtacttcattgtcctcagaggggaaattttattacaagcgtcattttatacaaacttcctgacgtgctgggattccacaattcccgatgccactgacttggtttctgttcctcactcagggtcacaaaaagacagaaatggagactgcccacttctccctgagctgttgcatcaattcctgattgattaatgacttgctgtgtgaccttgagccccttactactcctctttgagcctcgagttaccatctctgcaaccagtgggttggagagagtctccaaggatcatttcattgcaatctgctataatgttgaggttcatagaataactagggttgcccagttgtctacattgggtccccggctctggccctctttatcttctaaggttgatggagcttccttactgcacttctgagaacagctatcctcaactcccagcctctgacgcctcctcgtttcctgacctgacattcaaaccccttcctagcttgccctccacttccccttcctgcctcatctcctgtgcctggcgcctcaccccattgctgccaccagcaagcagcctgcacttaaaagttttctttaggcttctttgattttgtgtggaagtctttgtttagatctcagatttgtttcttattcaaaccctaaagtgatgtatcgattatgaatatttaaggcttctgattcctatttctgaactatactccaaaatgctaatttggacctctattcaaacctccttttccctagagtgacttttctccttttccctttacctgtctggctctaactttaccttcaaaacctagttcaaacactaaagtcccaaggaggtgcctggtacaatcagtctgcccctcctttgggcttccagcctcaagacagagaaaattcctactagaatggtagcattagatgattggttaagatgctataggacggttaatagggagggtatattacctaaatggggtcagagaactggccagtttcaatccagaag

SEQ ID NO: 28497 - DNA, 1783 bp, Bovine  19866881038870
  misc_feature (1)..(1): n is a, c, g, or t
ngagatgaaaatgacattggaagaacagctgaagaaagaaactgctgctaaggtgaaacattgttgttggtagtttccttaaaaaaaaaacaaacagggacttcctggtggttcagtggctaagactgtgctcccaatgcagggggtccaggttcgatgtctggtcagggatctagatccgacctgccacagctaggagtttgcatgccacagctaagacctggcccagcctaataaataaataatgttttaaaaacccacagcactgtaaaggatgtaggagcacatcttccctgtttaaaaaaaagccctgctcctttgatagagtccccttctgagagctggtgattctccgcttcagggagaaaatggatttctctcttcagagctgggttaggtctcggcacactgccagctttgcgggtctctgtcacagaccccgctggctgaaggccatgaaccagacttggcaccattgaagccagagacactgctctggaagtgccattccatttgattgattttatccaatggtgcactgaatcgtatttgctgcccacattctgattagtcctgttagaataaaagtgcatgtggctaattgtgggggaagtttgctttcaggggggctgtggtctgacctttaaatgtaaaaatattattttttgatagtcctttgattttagaaaggctcacacgcacgggtcctgatggagtttctgtcaggaagactggagatagcagggctgcctaaggctgactcagaggattttcctggcagatgcttaactgtcgtgattatcagagaaaagccctaaagtttctctccctgttgctatgatagctgttgatcttaacagcagctaatttttgatgattaatcattatcagtgggctgctgggggtgagagctggggcctgcactttcattttaatttggctctaatacttgattcactttaggatctagagcaggtagtttaagcagcttgcacccttgccttgtgaagacagaaataaagggagactaacaccatcttacagagaaggcaatggcaccccactccagtacccttgcctggaaaatcccatggatggaggagcctggtaggctgcagtccatggggttgctaagagtcggacacgactgagcgacttcactttgacttttccctttcatgcattggagaaggaaatggcaacccactccagtgttcttgcctggagaatcccagcgatgggggagcctggtgggctgccgtctatggggtcgcacagagaaggacacgactgaagcgacttagcagcagcagcagcaacaccatcttaaagggttacaggcaccattttttctctcttgcagtaggaaacaagagctgcccgggttccctgagtgactcatctgtggctttccagcattaatcctcattcaaaacttgtattttttaggttactgtcgaacaactaatgtttgaagagaagaacaaagctcagaggttgcagactgaactagacgtcagtgaacaagtgcagagagatttcgtaaagctttctcagacccttcaggtgaggcatttgggaaacccctagatggaacaccgaggaggcactttcggggttcttggcgtccaggagaattttctaatccctgactcaacctctgacaaaacttagactagagactatggctgcccctgccccatattcctgcctggtcatttcagctggaaacctgtccctccattgtccctcacacatacccctttttttcctccttgctgcc

SEQ ID NO: 28498 - DNA, 1649 bp, Bovine  19866881053982
  misc_feature (1)..(1): n is a, c, g, or t
nttatggtttgggttggtcaatcaagaggattgatttttccaggaaacccaggtgacctcattatgtaccaacttaaaaatgctacttgtcctggctgacagagcacagcttcctactgagcatctcgcatccacccccattcctgcaaaaagcaacttcttaatccgacagctcattgttgttcttgtctctgtcttcatctagttctgccacagagatagagaatatcagaatcccagggtctctcaatccaagccttgtaaaaaaccctctgggctgtaagtaacagaaaccaaactcaacccaacataaacaataaagggaatttattggctcatgtaacaaaaccatccacaggcagggccagtcacaggcaaagatggatcctatgcttaacagcatcaccaaggatctggtttccttctgcctcctgactctctcttctgttgtcagcttcatgctgggaggggtcccctccaggattcccaagacagcccctgtcaagacccaaggttacctacttcttcgttgacatctagcaaggtgaataaaaagagcctttactcaacatttccagaagtcttgaaattccctctggctccattgccttaggaaacatgaccatcactgtagccagagagatgggatgaggtgtggacttagtccaggtaatgcatcccaccccagaaatgatgacagagacagctccagcagaacataacccgcccctgccaagagacatcaggggctgctgggaaaggaaatggggaaatgaacaccagggatgcaaccaacagcctccaactcgtctcccattttacagatggggaactgaggccagagagagagaaggcctgttctaagatcacagcagagaagagctgggaccacgacccacccctttaatctgcagacttgatcctatttccactctactctaattcgaccttgttcaggccaactcaggaaatattgagtggtcatcaatgtgggttcagatcaatcaatttctccccaaaccttaatgaactacttcggaagcatcacattttaaacacttccaacaaattttcagccaaaagaaaacaaacctcagtcccaggaattcttgcagccacaaagatcaaccccagcacttccatcccccctcttggggccccctaagaaccaagtggctcctgttacttttaaggggaaaaaatgcattctggtgtgcaaacattctcgcatattcatgcactctaaatctaattttagctgcacgagacttcattataagacgctcacataattaagcagttttcttcccagggtttggaagcctgtctattcttctctctcattaacacatcactgggattatcaagaatgggtttcagttttttcaaattatatgttttggtttttccaaattgatccacaacgggagatgaaatccatgaaaattacatgttttaacacaggtttgtgcaactccacagctttgctattaaaattggaatctgtaaacaggatttctctgttctggtctgattagctacatctgccatgcttctctcctaaattcaagcctgttttactccttggctggctgggacagcatcttctttatggagaagctgagagctagagatgagacctaacttga

SEQ ID NO: 28499 - DNA, 1931 bp, Bovine  19866881125412
  misc_feature (1)..(1): n is a, c, g, or t
ntaaaaggaggaacatacgtgtaggtagaagtagcgaagcccacctgtgtgcccgttactggggccacaggccctggggccacctgttctcacccccaacccctcacctccttcccattcctccttcaaggtcagccaccacccaggtttgatctgtgagtcccttgcttttcttgaatatctattgcatgcacaagcatggttttggttggcgtgtttatgtcttgattttctggtgaccttccctttcatatgtcatgttttgtaaggtttacttttgatgtattttcatcacttaaatactattccattctatgaataagccaagatgcatttatccttctcctggtagacattggcacgttgcttttttcacttaatacattttatagatcattttttctctgtacatgtatatttattgcatccttagacatgcatctttatgtttagtggtaatacatttacgtagttcaaattaaaaaggaattaaagagtaaatagtgtccttccctccaggggctcccgaggccccctggtgttttcattgttgtgtgtgtccatctggagacacaggtccctgtacgaggttcaggtaaatgagtgtgcaattcacaagtgtaagtttgctgggcttcagatttgcatacatatcgccaaattgcagaccactatttaaaaagagaattgagggtttccctggtggctcagtggtaaagaaactgcctgccaatgcaggagacacaggttggatccctggtccaggaagatcccacatgccacagagcggttaagcccgtgcaccacagctattgagcctgtgctccattgttctccgcaatgagaagcccacacagtagagaaaagcctgctcactgcaacgagagaaaagccccatgcagcaacgaagacccaacacagccaaaaataagcaaaattatttttggaaaattaaaaaaatgaaaagagatgagctgaagacagtgatgtcatgaatagttttgaaaaatacctcatggggacagtgtggttgtggtcattactgtggtttgacttaggctcgtcagaaatgcactgatgtgatgaagcagctgcagctccatcctgttttgagtgttcaactccttttcatgtctgtctagatcacatccaggcggccatcgcccagctggagctgctgggtgcccttgaacacagggatggccagctcaccctaactccaatgggaagaaagatggcggctttcccactagaacccaaatttgccaaagtaagtgccaccgtcttctcagtcccctccctgtaccttacaggtcggccatcccacaggggacgcctcagcccagtgcttccatcttcaccttttctcttaaacagttatcagcgcctgctttgtgtcgaacctcgacttaggttctgtgtgattcaggctcgtgttaagtcatgtgtgtgtgtgtgctcagtcatgagattctctgccaccccctggactgaagcccacaggcttctctgtccatggaattttccaggcaagaatactggagtgggttgccaattcctccaccaatgaagtcatgagccctacctatatgggatcagacaagaaaggcagctgtcccttctacagaaagtaaaataatatacaaatgaatatataaaagagcataagttatattgtcgtggttttagaaacacctgccccttcacgccttacaagggaagctgcagaagcaatgaatggaaattcagaagccaggaaaaaactggactcacacagtgtttcgttgtggtttgcagaccatcctcctgtcccccaaattccactgcacagaggagatactgaccattgtcgccctgctgtctgtggacagcattctctacaaccctccatcacggcgggatgaagtgcagagcgtgcggaaaaagtttgt

SEQ ID NO: 28500 - DNA, 1750 bp, Bovine  19866881144673
  misc_feature (1)..(1): n is a, c, g, or t
nactgcagcatgccggcttccctgtccttcaccatctcctggagcttgctcaaactcatgtccattgagtcagtgatgccctccaaccatcccgtcctctgtcatccccttctcctcctgccttcaatctttcccagcatcagggtcttttctaacaagtcagctcttcacatcaagtggccaaagtattggagcttcagcttcaacatcagtccttccaatgaatattcaaggttgatttcctttagggttgactggtttgatctccttgaattcagggttggctatctataagccttgagagctgatttactcttaccagctattgagactaagccatttagtttacctctgccctcagcattcccctctataaaatgggcctaataagagcaactatgtacagggtggttagaaaattgaacaggaatgcagggtaaagcacctgagagtgcatggcacctggtgggttataaatattcaataaagacatattattgctcccatcattctggggaccccctcacacagggtgcaggagcattcccacagcacgtggacacagcaggtgcccaaactattttcaaaccactcctgtcacccacaaactggggaggctccttatttaagaagcagcctttcccaccacctggtggtgtgtttccatttcctggcctgagctacagtgttgccacagttgcgcttcacagaggagatttgagaaacattagcactctctaaagcccacgctccagacccaatggggagtccacctctccatctgtcatgggccccaaactgagtatgcccatgcaggagcaattaagagccgtgaacatgctttcagtgactgaggcgaggccgttcagctccaagcagagtgtattcccagtgaacacttcttggttagggccccaggccttctgggcagcaggatagagtcttcatggaagactgtgtggtgtccactccgaccctgctctccttatggctagactcacctccgggacccaggatgttgaaaagccactgccatctgttcaaatctgttacttgcaagccaccaagggctgcaggatgatgtctgtggaatgagagcctggcacatcaaataggacacactgtcctggtatcctccaccacacatgcacacagcattgtaaatcaactgtactcccaatatcaaataaagattaaattaaaagaataaaatattgggacttccctggtggtccagtggctaagattccatgctcccaatggagggggccccgggttcaattcctagttagagaactagatcttgcatgccgcaactaagacccagtagagccaactaaataaataaaacaataatatattactttcctcccttaaaaaaacaaacaaacaaagattgctgctttgcaggtggagtagggaagaagccaacaaaagccaccagaagctggaaaagacaaggaacagattgtcctctggagcctccagaagcaacaaagctctgccgatcaacacctggatttcagcccatgacacttctgatctccagaacggaatgataaattgatgctcttataagccactagttttgtggccactttttttaaatagcagcaataggaaaaactgatccatcatattcatggcagtccctgatggaggtgaagccaatggctacacttgtagccatttgggcacagcaggtgcccaaactactgagccactcctctccccaactattctcctttcc

SEQ ID NO: 28501 - DNA, 1567 bp, Bovine  19866881146848
  misc_feature (1)..(1): n is a, c, g, or t
ncctaaaatcactagcccccatggtctctgccaacgttttcaagttcatcaaacaaagacaatgtctgtttgagtttggcctgaacaattttttgctcttctaattctgcaagaagggcctgcttagtgcacaattcagtcttatacttctcctgtaactgttcaatttctttttggagaaagtggaattcttcctcactgtaagactgtgtctcctgagatttatcttctggaagcaagacatttgggggaatccgcaaaatcaactgtaagaagagctgctccattttgccaaaaaggttatcaaaacgtcctttcatgaagcaaagaaacttttctgtgcacttgcgaatctcgactgggctaatcgcacagtctgggatgccatccagcttctttagaataacctgttcaacagcctgcatcacttcaaacaggtagtcttgaaaggcaatgtagatcctaagcatgcaagtctgtggtgtgaagccaaagaactgggcctcataggtcattggatcaacagacatcttcgtgggtttttttgtttttggggtttttttgctttgttgattgtgaacaacctgcaaatgtaataagaaaaattttcgtttaaaaaaaataacaaattacattatagacagcaaaacaaacaaaacagagcaggaaacaaaaaccatgaagcttatgttccttgatacttgatgctacttccagcctcacacatccacaacaggatacaaatcctgcctctccgagactctcatcagcctcccttcttcctcctctttgtccatttccctcacctctcaattactgaggcttctggcccgtggctcagccttctgaattctgttattaccccatgtaaacgttcagatttacaaccaacaccctagaaactcagttctgcatgtccactttttcagaccttcatctccactctttcagcaacctaggtattgacatttgtaacttctctccccaactctcctactttttgaccacaacctcatatgctagtcttccaacactcattcctatattcatattatatcttaatcttcaagactttcagccctctgagcctctctttttagtctctcccacttcacttccccactccactttaggatccatgatccatcacgttaaccattcctttgccaatgtcctcaactccccgtccttccaatcttgccatctgaaaaaataccactagaaggtgagcaaacctccagtaagctttacaaccctggcattttcttaagggtctgggagtcattcctttcaaatgtaaacatctaagaaaatagcattcctatctccctgtcactgtgggtgtttaacctcgggaccttttttgggctgtaaccagatacttgtcttagaaacaaaagaagtttcattattcctgcagacaaattagctaaaacaaatggctacatcaattaccaggcaaatttaggatgaaccttatcaaagaatctgaagcaaatagtgctgtcaaatctttttataagactgtgctgttaatcttgagaatttatgtaatggctaaaaacag

SEQ ID NO: 28502 - DNA, 1619 bp, Bovine  19866881147015
  misc_feature (1)..(1): n is a, c, g, or t
nggtggggacaggttgcaatgggcctcagaggcctgcctctcaatccagatgtttttcagttggtaagagggagctatggacggtgtcagcggggagcaggcagtgtaactggtgtgggcttcatagctgtgggtgggatgctgggatccctctgggaggcagtggtcctcggggccacccccagagatgccttggcaatactgtgacccaagtttgcctgtgacctggctctggaattagggattccaggtagggcgaggatgatgctacagatgtgctcgcaggtaaagccaccatctatctgagagagtgagcctttggtccccagaatgtctgttcctcccttctccctcgtcctgccctgtggttgtgagtatgacttggactcaggccttctggatggtccctatcagctctcagtgggagctggactaggaccctgatctcactttacgtcagggttgctcatccttgcaactgttatcagttgggtcagctaatttgtgtggggatctgtctgtacattgtaggatatttagcatccctctaccctgctacagaccaatagcacctccatgcttagatgtgacaacccagactgtctacagacatagccaggggtcctctgtggcactcccattgagaaccactgtccagcgggccacctggaacctattggctcagccatgccaagacccagctcacatttgccatgcatctgaatcctagtgatggattatcttcaacagttatttagggaggatgaaggagcaaattccacctccagccctgaggtctggtggatggaggatcagtcagaagttgaggcctgcagaggtcacagttctatttgccagaagggttttctttgtcctctcctggatgtggagggtgagggagagaggtgaattgggggattactggctgtgctttcctgcctggagtgccaagcacttcctctccagaaaggccagcagcaaccaaggctgcagagacatcccagttgcagcttcatctcatcctaatttggcttctagacaagctcggatatactgcaatgtgggaatggttacgtgatgccatggccatacagtggactataatacagccattgaaaatgttttccaagtcttttatgatggaaatgctcacagcagaatgttaaatggggcacagctaaatcggggagtcggggctacaggcttaattagggctgactgggcaggggcgccaggagcagcagatgccagaggtggggcacaaaatcaggaaaagagggggcgccttccttgtgccatgccccagttttgagcaccatctgaggtttatttgtggctcccgataaaaatctctgctttttttttttctctttgctagttagttacaatggatttggggagctcccagaatgtagtttgacaaggaaagaacattttgggccacatcagcatcttaatgatctgactgtctgccaataagagcaacttgacctatgtaaatgtgtttttaaacacagtaaaatgatcttgtctaattttctgcgatcgtgttggagctggaagaaaacctgctcattctcagtctaccggatcctgtcacctccttcattggacagaag

SEQ ID NO: 28503 - DNA, 750 bp, Bovine  19866881170677
  misc_feature (1)..(1): n is a, c, g, or t
ncagttgaatgactaacacacacacacacacacacactgtctgcctttatccacgagaatgtaagctgagatttttgagtgcctggcgtgctttgctgcattctcagtacccagaacagtactgacaacatggtggatgcttaatgaatgttggatggaggaaccaaggaatgaatgaatgaacgtcctttccagatctcaactccccccaaagttgttggcaatacacttggacatgagccttctctgggtcacttgtgccccaggcatgagtaaagagaagaaagtctgctccatctaagcaaactctctctgacaacaggaaccccagggggctctgccatcctgagacttctgctcagacaagaatctcagccacatggtaaaaaaaaaaaaaaaaagtctgctcttgggctggctctgtctccctccctggtggtagtggctgatgttgaggcctcaggagcctgtatccctgggctgcccccaccagtgacctgaacctttttgcttccttgagtggattaaactgtcacgtttccgggtgtttgcagagcaacgggagagctgcagacagtaatgtggttttatttacaacataacctcttcagcaacatcactggatcctgaaaacacagaacagtttttagccccttgggggatttctaagacaggatttccataaaaattaaatattgataaatcttatcttgctgccgacctccttgtttcctgtacctccaccccaag

SEQ ID NO: 28504 - DNA, 859 bp, Bovine  19866881230256
  misc_feature (1)..(1): n is a, c, g, or t
ncccttctcctcctgctcttaatcttttccgcatcagggtcttttccataagttggctcttcgcatcaggtagtcaaagtattggagcttagaactgtctcttttcctctgttaccatgtcttctccaacattgccccagctctcaccctgagcacagcagaggccaagcatgggtggggggtgggaagccagcaggggtggtacaacccgcatcacccacacaaacacacagaaacatcatctcactttgttcagaccaggttctgtaggcagaatctgagtcagggtccagacatatctgctttgatccttgttctgtactcctcaggccatagacaatgaagaaaagatgttccagtttgtgcgaattcacaagccacccccgctgaccccactctacatgggctcccgctacattgtgtctggttcagagaagctggaaatactgcccgaggtgagcagcccaggtggtcagccatccctggggtcagagctcttgcttagaaatggtctcagagctttcccagggaccgggtgaactggggttgggcaaacagcaagtggggcttccctggtagctcagctgttaaagaatttgcctgcaatgcaggagaccccagtttgattcctggagaatccccatggacagaggaactggtgtgctatagttcacagaactggacaccactgagtgactaagcacaacacagacagcaagtgagatttagggtgagcaggaatgcttcaaagggtaggagacaggaagttggggagggtcacattcaggatggggacaacattgggaagagttgggctatagagtacaactacctccaattaaagccaccaaggacttcc

SEQ ID NO: 28505 - DNA, 987 bp, Bovine  19866881246997
  misc_feature (1)..(1): n is a, c, g, or t
nctggagcccgtcaaggaccaatatgttacaacatatgttgtacagcttcctggggtctctaataaatctctcaagacttctttatttgccttttctcccccaaggttatgaagccaactgtttccctctgctgacagatgcgccaaggcagggagttcttttccatcggaacttgtcctcagaggagggaagatgctgggggaggctggtgctccacctccaggaagagattgcaggcaggagttggggtggggaagtgtgtgggggactggtggtgggagatccccaccttggtcataattttatacatatatgataagaattcaggagagaacgaacaccaccaaagcatgatagaaactactttcttcttcctttttttttttttttttaatagctgtgtacttttgctttctatgcataagacatgtcaattggacacataccctgccctcagggcactggccaggtagccagggagtactgtgctgtgctgtgctcagtcacttccctcctgtctgactctgtgtgacccgccaggctcctctgtccatgggattctccaggcaagaatactggagtgggttgccatgcctttatttccacatttactgcatatcaggcacaggtgatggagacgataatagtattttaaaaaagccccaacttactgagtttctgatatgggttggccctttggaacagtctggattcctcaacaggaattgaatatatcctgtcttgctaccagaaggctggtcctggaccagtagcaatcacgttatctgagaaaaacagaatattagcctcagcccacacctgctgaatctgaatctgcattccaacaaggtgcccagggggtttctgggcagattgttattcctactgaggaaacacaggctcagtgggaactgaatgacttgtagaaggtcacagcgtatcagaagcttagtagggatatagacatgcttctcaggactcaagtg

SEQ ID NO: 28506 - DNA, 2021 bp, Bovine  19866881269704
  misc_feature (1)..(1): n is a, c, g, or t
ntgtgggatcctagttccctgattagggattgaacccatgctccactgtgagtacctccctgcagcctggggggaggcagcatctgggtcacccttttgcaccccacacccagtcctgaccctgacatacagcaggtgccctatacatgctgagaggtaaagatgcagcatgagctgtgagaagtcagtgatgtaagatgctgctggcagaacctcagctgcctctagacttcaggtgtggcacaggctgtcactcccatttcacacccttctccccggctccccaggtgagagccccaggccacttagggcaggagggcacctccaagatggagccacagatgacctactctgccccttcctctgatctcaacctgaagctcaggtcaaacagacaagtttttctgtctctggcaggtgtttgtttgctttaatctaaaatttcactgatgtacatacttcagtgaaattgaatccaacttcacaaagaagtttcaatccaggtccctaccttggcggactcaaaacctcctttcctgtcctccgtggaccctaaaacctaagccgtgtggccaccaagaccagcagcttcccccatgaagacccagtgctgcaccgcatcgttgactgtcttcatctcaccaccatgattcctagttcccaatggagccgggggatttccttacttttttgatagttcagctttgcatttacaacaacacatgttcagttttacccagcactttcacgggcttccctgatagctcagttggtaaagaatccacctgcaatgtgggagacgtgggttcgatccctggattggaaagatcccctggagaagggaaaggctacccactccagtattctagtctggagaattccagggactgtatagtccatggggtcgcgaaaagtcggacatgacagagtgactttcactttcaccagcatttcagggtgttgtatagctaggaaacattcctactatctggtccgccccgggtaatgaaagtctgcctcagcacttgacaaaatagactggaacccaaagatgggaggccacacagcatgtctgagaaacacctagaccaaggctctgggcctcctgattggtttttctctcctgcagaggacaaggaaagatgtggtttggtcatgaactcaagcgatctttggcagaccctaacacctcgccccctgccacaagcctgtccagggaaggtggtagggaaggcagagcacaggttccgtcccacagaatttagatgaagggctgtggatgcagaggtggcagagagcaggggcagacagagctgagggagaggctggcgcactcacgcttcctggagccgggctgcagctcctccacgcggtacacggagagccggcccacacctccgcacacggagctcttctcccctttgcactcgtggttacactcctctggcccgacactcatcgctgggagtcggttcccacagtagcactcggccccagcctccaagccagcatagatgtaggacctgcaggtagagcagggcctggggtgagtccctagcctggcccggggcactgaggtctggatccaggaatgcccactgggtctggggcctggataaggatgagtcctggaatctcaggacaggaaccccgggtctcctgacactgagcccagagctctttccacaatcccctgccgtctcgtcagtaaaccttctttgttttggacaactgcatctgatcggtcgagctctaaccacactccaaaagccaactggcagcagaagcaccacctcagggacaccactcctactctctgggattgcctattagccttatttccagtggagctgaccgttagggccccccacttaccgctcagcacatgcgtccttggcagtgggagacagtcatctttctcaagtcaaaaaacacagcccccttcagagtccgctcctggcccgtcgtcactgaagcatcccacataggtgcctgcagggagtgagggagaaccacagcag

SEQ ID NO: 28507 - DNA, 966 bp, Bovine  19866881350207
  misc_feature (1)..(1): n is a, c, g, or t
naacatagtaggaactcaacaaagacttgttgcttaaataagtgctttaaaacatctctatagtatgccattgtagggttatactctgtaacaaaaagtaagcttgttcagtagtcttgctgtgactttagagatgttgcttaaactcccttgagtcttaattttttcagctctacaatgtcagaacagcttatatcctatagagttgacaaggatgaactaaaatgaagccttaagtgatctgttggcgtctgctacttggtattgttgtttagtctctaagtcgtgtccgactctttgcgacctcatggactgtaacctggcaggctcctctgtccatgggatttctcaggcaagaaaactggagtgggttgccagctgcttccccggaagatcttcctgacccaggaattgaacctgagtctctgaatctgacaggcagattcttgatcactgagccaccagggaagcccaggcaaatgatagtggtggccatttagcttgttttcagctttccaccttctggtaaatatatgttcacacttttccaattatttccctcaataaatttgtatgcatggagctgctgagtcagggagtatgtgcaatttaaagtttgatgtatagcaacaggtcagacttggggaaagttggtgccatttacaacaccactgatcctggcataatgataaaccttttccatctggtgggttcagacaacttggcgatatcatgttattctgcatccctttgatctcaggggaggctaaacatcacttcatctgtgtaacctgtgtgaaggccaaggtcttgtggcccagcacgagggagcttcatcaaagaagcacagacaagtagcccaaagtaattaaaagggaatcaggctttattggtatctctcagagaacattaaaggggctctaattcataacttaaaaggactcttctcaaaagctattccctttc

SEQ ID NO: 28508 - DNA, 1135 bp, Bovine  19866881479824
  misc_feature (1)..(1): n is a, c, g, or t
naaaaaagctgtagccccaccttcacccatggtgaagggccaggtgagcagcttaggctttcaccctcgccagtttcttaacaaggtgccctaatctcctgcctcctcactaggcagagtggggaagaggtctttcatccccatgtcgtgttgatgagccccatccaagcccttggtgtcattggaaacttcatggggagcctgcactgccacctcagctaggcagtaaggaggttgaatcagtgggggtggtatcagcgaaggcctactggaaagtcagattttcatcacatagaggccaggcccctcttccaccattaccctcttgatcctcaacagtgctcaccgttcatggtgtggtatcagtgaaaaccatgttgggagcagtaaagaggcacttctaccccttccagcctgggaggtatccctggaggcttagtggggagccagtgatcccacccccacccagaagtaacaagccccccaggctgtcaacagattctagtaaggaacctggacttctgtttcaacttgacagtagtgaggtgatgttccacttccctgttggagaagtgctagaggaagccagctaaaacagaaggttaaataaaattcagagtcttagaatagtcaaaatattcagatctcaaacaaaaagcacagcttattctcaaaaaaaaaaaaaaaaaaaaatcaaattctcaaacaacgtcagagtgaatgaaaaagggcaatcaataaatgccaatatcagtaaggcaaagatgttaggattacctgacaaagattttataggagccattgtaaaaatgcttcagtgaacaattgtgaacacattcgaaacagctgaaaaaatagaaagtctcaccaaagaaataggaagtctcaaaaaagatatagaagatataaagaactaaattgaaatttcagaactgaaaaaaatgtaataaccaaaattttaaaactcaacagatgaactcaacacagaatagaaggggcagagaaaacaatcagtggactacaagataaaacaatagaaatgacctgatttgaacaacagagaacaaatagaattttttaaaaattgagaagagactcagaaacctgtgctactataacaaaatttctaatgttt

SEQ ID NO: 28509 - DNA, 901 bp, Bovine  19866881590543
  misc_feature (1)..(1): n is a, c, g, or t
natgagtggcttctgagagtggaaaatggccatgcccgttcttgatgactcactggctgccagattgccatattatgtggaagccctgcctgctagggggccctgggctgcagagcaccccttctctaaaaaagtctgacctgcttggagtcttaatttaacaaagactaagacagaggctgcaggatgcctttgatggtgggaggagagcctgggcaaggcaaactcggccatttatctaatgtatgcaggcggctttgttcagtgcatttgggggccacatgaataaatcacacttttatttgacagcagctccatccacacagaagagtcacttgggtcatctctctgtccaggacttggcatccacagggccctctcatgagcccagttattttgagctgtaatgaaaatcataacaagcagtgtcatggacctcatttttgctaactgatgcaaagtatctttttcttaattataaaactggctataaaaacttttaaattggggggtattttcagtgttcaaggaggaagccactctagccttcatgtgggatgacaggtagtcaatgaggagagaaaaaatccccaggctgcctccgtcggtccctctgttctcgccgcactaaattacagaattaataggctcttagaaaagactgacactcacttactgtgagaaagacaattaaatgtggaaacccacttttctcatggcattgaattttaacgggaggctttgagactcaataaatctctttcctatttcttctcttgtgttctataggttcttccaaacaacatctagaacactgaagaggctcttctctcctcttgatcctctcaaactcctcatgcaggttgtgattttttcccaggaattttctttgagatcaggt

SEQ ID NO: 28510 - DNA, 976 bp, Bovine  19866881800497
  misc_feature (1)..(1): n is a, c, g, or t
nactatgtacagcagcttaatgagtatagtggaatcttaagggacacttgggatctctatgaagtttcaatggacaagaaaagtcagaatcaaagggctcatcctctccggatgccaatttcagagcaagctccaactcaacacactcaaacacatacagtgatggaatgaggtcagccctggaatcccaggacttttctgatgtgtggtcatcttcttcttccccctccagcacaacgcaataatgaagcattcctgactcagtagtaatcaccaggatgttggcgacacatggtaagcaaagcacagcacaagcatggtagccatagttatcttcaacagcaggatgcatgggcaacgggccgaatagcttacccacactcccagggctgtgcaacagactaacaaacgtaaggaaagtctcctcattttcatataagatgtacagggagtagccactacttcttctttgccttttcatccaaatatgtgctttgggactgctgacaatggcccaaagtcaaatgcaactgctgtctcttccagagatgctgtgtaggcacttcctttgttgagtatgagactttcctcttctgcttctgaaagtacgatgaccttagtcatacgcaaagggtaaattcttatgacgttgtctgacgttaacggcacaatttgagtatctagcaactctctcggataccaggcaacatgcttcagagtcagagaggttgaactggtgaaaaatctctcagcaacgggagtcgtgctacaattcactgctgattttccaccttcaaattcagaattctttccccatcttttaggtaattctaatataagtccttttattcctacatgatgctacatgatgttgtgctgggcttaacaaggcttgatagatttcaaacaggggtgcatttatgcaaaagccgtctccggtactgcgagagggagggctcctcaccggcgcagctgg

SEQ ID NO: 28511 - DNA, 2108 bp, Bovine  19866880122642
  misc_feature (1)..(1): n is a, c, g, or t
ntgatttgcatttctctaataattagcagtgttgagcatttttacttatgcctgttaactcacagtatgtcttctttggagaaatgtttagatatatcttatatttttcaattgggttgcttgtttgttgctgagatgtatttgagctgtctgtgtattttggatattaagcccttgtcagtcacttcattggcagatattttctctcagtccataagttgtcttttcattttgtttatgttttcctatcctgtacgaaagcttggaagtttgattaggtccatttgtttattttgctgttgccttgggagaatgacataaaagaacattgttactatttatgtcatgtgtcaaaatgttttgcctgtgttctcttctaggggttttatggtgtcatatcttaagccattttgagtagggtctgaatgagggttctaaccctattgatttgcatgtgcctgattgtccagtctccaaacaccacttgctgaagagactatgttttcttgattgtatattcttgcttcctttgtcagaaattgaccaaaagtgtgaagatttatttctgggctctgttctgttccattaattaatatgcttgtttgttttttttccaatatcgtgctctttagactactatagttttgaagtattgtctgaggtctagaggattatgcctccagctttgttactttcctcagtattgctttgataatcctatgtcttttatggttgcatataaattttatgatctaagatgattcaaagaaattaaaagctatccatgctcttggattataacaattactattgtcaaaatagccatattacccaaagcaacctacagatttaacccaatcccaatcaaactaccgatgacatttttccacagaactgaaacaaatgttcctaaaatttatgtggaatattcttgatattagaattatataccttcactctttggggcagggtaagtgctctgactgctacagaatcaatggaactttcctttgtgtggaatagggttcctgatctctccttgcaactgtggatatgtcaaaaatagacaagtgggtggagaaatagaccatctttctaaattattatttaaaaataatgttcactagctttcaatagatagtgatagttcagggtactaagggagcatgtattcactatattcccaagtagcatttgaacagaaaataaaaccttaaagttggatcagcaaaaacattttaaaagataataagcatgagactaatgggaaaaatcattttatttaaaagaatgcccaatatactgaaaaaaataccttaagaaaaattactagtagtacttaaagaaaagccataagcttgttcacagtgtgtatacatagagcttagcattttactaggagctcagtaggtatgaactgaaaaaagtagtttaattccttgctctttgctttgttttactagtctgatttaatatatttgagtgagtaaaatactcatttaatttgctttagcatataaaacactttagtatctggtagataatctcctccaattatttttcttttaaaattttccttagctgtctttaaccatgtattcttccagatgatgtcagaataatttctgtaaagttccacttttttcatcagtgttaaatggaataaatttacatttgtatggagctttataggaaactaatgtctttataatattatgtcatcttcttcaggaacacaatattctatcaatttcttaatgtcttcttttatgtgcttgaatggctagtacacctgtcaaaagtgtgtgacagaggacacaagaaaattcacttcctcaggacttgccttgcaaaaatccaggagggacattttttttttttttttaaattaaaaaaatttcaggtatacacgtgctcccattcctgaaccctcctccctcccccctccccataccatccccctgggccgtcccagcgcaccagccccccagcatcgtgcactgaacctggactggcatctcgtttcatacatgacatttcacatgttttcaatgccattctcccaaatcttccccccctctccctctcccacagagtccataagactg

SEQ ID NO: 28512 - DNA, 2339 bp, Bovine  19866880590220
  misc_feature (1)..(1): n is a, c, g, or t
ncatttctcaacagtatgtgtaataggtgttgatggtacttagtagaatagctttttgacacgaaaattacttatgtccagtataatcattcagattctgacagttcaaatgcttatcctaacagagatgactttgctcttgctaggaagtgaaactgacataagggttgctgaaggaaataaaatatgcagcactctaatatgtgttagaaacagtcttctcattttgcttaagaattttgagatccatacggtgattcaaagttaaaacatttgaaaacgatatactagttttgttttagcccacacattttaaacattcactgagtagtccaaagggtttatagtaatacagggatgtctttgtaatgtattataagatttttgaatgaatttgtaaaaaatgcaaatgaatgaaaggttttaaatctttcagtctggcctagtatctagaggttggagttcaaatatatctccaaatacagagttcttttgagagttagttgagtatcttaattgcttaaaataatctgtgatcatcatgtatacctgtggtggattcattttgatgtttggcaaaactaatacaattatgtaaagtttaaaaataaaattaaattaaaaaaataagtacaggacaattgtatggatattagaagatgacaattattactatagatttaacattcagagaagatttctgtaattaatgaagacttaacctttagaatacttaatgagtatagtgaaggagaaagttattttaaatggaagaaaactattttcagtacaggtatacctccttttattgcactttgctttattgagcttcacagatagtgcaccgtttttccaatttgaaagtctgtggcaatcaagcatcaaacaagcacataggtatggtttttccaacagcatttgctcactctacgtttctgtatcacattttgctaattctcacaatatttcaagtttttaaattactattgtatttgtcatggtgatatatgatcagtctttgaccttactactgaaactgggtgaaagctcagatccctagtgagagtttagtattaaagtattttttaatgaagttttgtatttttttaatataaaatacaccatacaacaagaacagagtatatattcttctcaattatacatatagcattttccaatgtagaacatatttttgggccatagagcaaaacaacagaaacagatatcatgcaaagtatgttccatatcataaaataaactagaaatcaataacaaaatgctatctggaaaatttggcaattacaaataaagctgctgtaaatatcttcgtgtgggtttttgtgtttacataaattttttacatcatggggtaaataccaagaatcattgatgaattatttagtattacagaagtatgtttagcttgtaagaaattgcaaacctgtcttctgaagttgtacaattttgtattcccgctaacaatgaatataataaacccattgtagctcaaacggtaaaaataaaatctgcctactatgcaggagacttgatttgattccttggtcaggaagatcctctggaaaacggaatggcaatccactccagtattcttgcctagaaaaatcccatggacagaggagcctgctagctacagtccgtgggatcacaaagagtgggacacgactaagcgactaacactactagtactaacaatgaataaaaatctctgttgccatccttgccagcgttttgtgttgtcagtgtttctgattttggcccttctgacaggtgtgtggtggtatctaagatccctttaattaatattttgctgataatataatattagttcagttcagttcagtcgctcagtcgtgtctgactctttgcgaccccatgaatcgcaggacaccaggcctccctgtccatcaccaactcctggagttcactcaaattcacatccatagagtcggtgatgccatccagccatctcatcctctgtcgtccccttctcctcctgcccccaatccctcccagcatccagtcttttccaatgagtcaactcttgacatgaggtggccaaagtaatggagtttcagctttagcatcatttcttccaaagaacaccgaggactgatctcctttagaatggactggttggatctccttgcagaccaagggactctcaagagtcttctctaacaccacagttcaaaagcactcagccattaaaaagaatacatttgaatcagttctaatgaggtggatgaaactggagcctattatacagagtgaagtaagccagaaagaaaaacaccaatacaatatactaacgcatatgt

SEQ ID NO: 28513 - DNA, 1137 bp, Bovine  19866880691706
  misc_feature (1)..(1): n is a, c, g, or t
nattgcctttctttgggattggaatgaaaactgaccttttctggtcctgtggccctgctgagttttccaaatttgctggcatattgagttcagcattttcacagcatcatctttcaggatttggaatagctcaactggaattccatcacctccactagctttgtttgtagtgatgcttcctctaaggcccactaatttctcaactgaaattagaattctttcaaagaaaatgttactgattaagttatattttaaaataaatacaaatggatttgacttaaattgcactaatttatttttattctcccattttgccatcatataattcagcaataaaactacccttcaaaatttaaaaaaaaaaaaaaaaactacattcttcatttatttcttctctttagggaaataccagtctcttctatcatgaagcaaacctgttgagaactttgagaatgcaatttccaccatctgttttcatatttttagatagtaagcttattttctatgctgcaaataactgttgcttcaaatatagagtttcatttctttttcaataacattgaatgtttttattctctacatactccataggacctcaaggaatgaaagtgataaaaggaaggtaaatgaaatacaaaggaaataagaatgtgaaataaaaagaatatgtccaatttttatgtgcaacaatgtgatctaaaactcaaacatgaaaatgtgcagcattccttaatcgggtttagaattatagatgattaaggacaggaatacagcagcatattagataagcatgtggctaaaatttggttgctgtataaataagactaccactaggattttacaaatgattatcactaagtaatattttggagaaggcaatggcaccccactccagtactcttgcctggaccatcccatggatggaggagccttgtaggctgcagaccatggggtcgctaagagttggaaacgactgagcgacttcattttcacttttcactttcatgcattggagaaggaaatagcaacccgctccagtgttcttgcctggagaatcccagggacggcaacttagcagcagtagcaagtaatatttacatgttttcttgtgtgttatttcagttttttcataacctc

SEQ ID NO: 28514 - DNA, 2010 bp, Bovine  19866880701637
  misc_feature (1)..(1): n is a, c, g, or t
ntgccatttatggcttgagtcctaattagaccaaatcaagttgagtacttctatttgtccttcaggtagctcttagtctggatagtacaaacatttacagtaatttgtaaaaaagatttgttatgctccctccaaaatcagggatatgggttccacactaggaacagtctgtagccatatcaagactgctatcacactgggacttgggtgtaacaactgcaagtaaaactatccacaactttcttactcttttcaagttgctctttcttgattcagtatttgctgggttgagtaaatctctgtcttccagagttctgacaaggttctgatgaattgccttttgccatatgaatgtacgtgtgtgtgtgtgtgtatgtatttctgtggaatgtgaacatttagagatgcttactctttacttttctgatgttcctatcccacacatcttctgttatttttatggcaaaatggaagcatcatatgcaatgattcctttactaggagtattttttggacagttgtgtaaagaaaagatgaggctgttacctttgccctttaataccgtcttacttttcttcatagagacatccaaattctctacacttccttccatttcacataaaacagtaactttttcccaaagaatacaaagtaccactttaaaatttaaaaacatacttgcactattattacatctgtgtaaacggttactatagcatttgtcattaggttttactcagaaacagctgacatgtacatgcttaatttttatgctaagtgccattaatggtgctctgataaatagagaaggtaactttaaatatgttatttaaaacttttctgagaagtctgaatatgttaagatcagctttatcttttttaaggaaatttcattgttcatggcataatgacatatatttatttaatttagctatttatacacatctatgatattgaaaataagttttatttcttatcttatttttgaacaaaacaaaaagaaaggaaatatggtgagttctttgactgaaaagcactcagttcttcatgacatcagtctaaaagtatcaaaggggcaggtgtcggaggatgatttcaataggaaaaataaaaatagaacctaagcctctgtgacagatgtcaagcatgctgacaactgttaaaagaaaaatcattttcctgatcctgtgcaaggagacagcttgtaagattaaagatgtatctctttatctatgttttcagcagatcatttgtactgaatagggcatgaaaggtacttcagatggagaaaaggactccaggaattttcatcatctcagccacacaaaggctataatgaaaagtcagagtgtaaagaaatataaaaataagaacaaaatctaaactgagcagaatttactgtgtgattttaagcccaaatattagtatgaaaagttatttctgctttaaaaatccttaaaatgctcccacaatagataaataaatcatcaaatagtgaataacatgtaataaatgcttaataaatagttgagcagtggttaatgttttactatgattttttaaatttaacagtgcatctcagtaatgttttcatattagaatacatagagctacacaaattggcatagtattccaaggtatgggttaaccaaaccttatttatctgtagtcctactgatgggcattaattatttatgttaatttttgctgttgcaaatactgctgccctggacattcttatatatgttttcttttacttgttgagtattttcataatgtaaagtctggcaagtagaaatattgggctactggaaatacacattttaaattttaatttaaatttaccttatatacattgtgcaatgtatttattattattattgcagttactaacaaggacacttatccactcccctgctgctgctactgctaccaagtcacttcagtcgtgtccaactctgtgcgaccccatagaggcagcacaccaggctcccccatacccgggattct

SEQ ID NO: 28515 - DNA, 1600 bp, Bovine  19866881080636
  misc_feature (1)..(1): n is a, c, g, or t
ncctgatgcaaagagccgacttatttgaaaagaccctgatgctgggaaagattgaaggcaggagaagggggcaacagaggatgagatggttggatgacatcaccaactcaatggacatgagtttgagtgaactccaggagttggtgatggacagggagggcctggcgtcctgtggttcatggtgtcacaaagagtcagacacaactgaacaactgaactgaaactttcactctcctctttcactttcatcaagaggttctttagttcttcttcactgtcataaggggaggggatgccataactgtttgcaatttcttaatttttattttctatattttccttactacagttttcttccttcccttctttctttttccttccctctgtttattcttgcctttccttcatgctttctctttcttcctttcccagaaacattgagtgactgtgtttcactctgaaaagacttaatatgttgaaaaaacagcatcatataccttaagatccatgttattagaaactgaaaatgtttaataacttttaaaattctaaataagatcaccccaggtaaagcacactaaaaaaaagtgtgtataatttgctgagcagcaatacatttagacatatctgatagtctctatctgagaatttatgctacaatggctacgggatagaaaccgcttttgtaaccaatttaaaaacatgaatgttcttctctttaccctagagcttaaagacaatttacagaagtaggtcagtatgaagtattgccacaataaaatgtgttttacttcccttttgtagcaaaaattaggaaaacactgcaatgctgtagagttataaaatatgttagcaataaaacaaatacaagccatcaagtttatttaatttctactattattgtcattattcagaaacctttttaaagtcttccatatatttgaaagtaatttattttgaaaaaatatgtcaaagttggaataacatttttaaaatgttatttgttcagttatgaacaaaatcatccttcataaaacaaaatataagggttattttactagtttcattgcaggaaatatttaaaaataattttatttcaaaacttttttttttttttttgccagtgagctttctgtgacaatataatttgtatctctctttgaaaacagttatctaccttttgacctcatcagattgcaactaattgtatgcagtaaatctgtgttaaatatggaaatgtataggaataaaatcattacacttcccaatattcaaaatacacagttgttcaaataccaaaaatcaaaccttaactattgacatttttgcatagtaaaggataattttcctattctaagtgctaataattggaataaaatatagataaatgtgttttgtaattgattcaagtttcaagagttataattagtgggaatgacaaaaaataaagctataaaacaatcatataaatgtaaggaattgttttaaagttatcaaactgtattcaaatggttgaacaaaagacacattaatattctatgtacttgtttctaattaagaaataaaaatgtttttgtaactttaccaagaatatattaag

SEQ ID NO: 28516 - DNA, 1007 bp, Bovine  19866881128429
  misc_feature (1)..(1): n is a, c, g, or t
ntcaaggctatggtttttccagtagtcatgtatgcatatgaaagttggactataaagaaagttgagtgcagaacaactgatgcttttgaactgtggtgttggagaagactcttgagagtcccttggactgcaacgacatccaaccagtccatcctaaaagagatcagtcctgggtgtttattgaaaggactgatattgaagctgaaactccaatactctggccatctgatgcgaagagctgactcattgaaaaagaccctgatgctgggaaagattgaggacaggaggagaaggggatgacagaagatgagatggttggatggcatcgccgactcaataaacatgggtttgggtgtactctgggagttggtgatggacaacaaagcctggagtgctgcggttcctggggtcacaaagagtcagacacgactgagcgactgaactgaagaaggggcaacagagaatgagatagttggatggcatcactgattctatggacatgactttgagcaatccccaggagatcatcaaagacaggagacctggcgtgctgagtccatggagtctcagagtcaggcatggctgagtgactgaaaaacaacaagactataagattcatatgaccttgaaggagaaaatctggattattctctttgtttaagactgaccacacctgaaagtgcgtctgaatagcacatttttaaaagattactaaaaagaatgcataaatgattagaatcagggacatgatagagaatgataagatatggtcaactgtgtcatatgaataaaagttgttgaaatcagaggtgttttgcaaagagaagagaattgctggatgaagggaaaaattatctcagtcctagttttcctacattgctcatgttcattagtattcatggcaccaataactatttctctgattatttcacagcacatgtagccttgctgttcaagttgtcttaaaatcattgatcccaacatcaaaatgtagaggttttaaaaat

SEQ ID NO: 28517 - DNA, 1600 bp, Bovine  19866881390037
  misc_feature (1)..(1): n is a, c, g, or t
ntagatagaacctagtggtactatgactttatcaaacccaatccactttcttaactcttctttttctttctttcttttttaacagtatatgttagttatgctctgtctcttgtattttaacaaacattcatcagcacatgataaaatcagtctaacctactattctaggttttaataattcttcataattcataatatgagagtcattgatcctgtctagataatctggcatgcaaaattttataaaatatgtttgaggataatttaatatcaagatgaagattcacattttctactagagctggtgtctgtgggagtgattatgaaagaaagaggcatgaagtgaaacaagataagaactggcacacacagtgattcatgaaatgactcaaaaataggaagaagcctataaatcattccatttccttctaaaaataagtgttaccagatttttattgatgctattcaaagttctccatgtgataacatctctatctaaatttggaagaaatattcctgcaagtgaaatagggaaaatgccaaaataacggactcggttttgttgaacaatcccaactgaaggattcttttgatcctttgagtcttgtgaagcaatagcacattggagttccataaactcgaaaaatggagcccgtagaggacactgctgagctcctgaactaaggtgtcccttaaagaacattcctgggacatttctaatttcaatgttgaggtcacttcaaaatttagatttgttcctgtcagtggaatggccctgacttttctactagaattgtttagatattcatgaaatcaccttttcatataaatctggggtttaaatctgtttttagatattttcaaaggaaaaaaaatcatctatcactcttctataaattatatatgaatttataatactggttcatctaaaattacatgcgtccatctgtaaaactaaatcttgatcttcctggatgacaagggaacttctaagattcatataatataccttcctattatccatattggtcttagctcaaaaaaatgcattctattctcaatatatgtctgtcatttctgtgatcaaagaggatgttcctgtggtaccttcccaccacccacaccccccagagagtaataaggggaaggagagagtgaagcagctagctttgctttcaaggatgtgaaagcatgtctcatatacttgcaaagaagttgtaaacctcacttttgcttagttctgttggcctgaatttaatcacgtggctacatgtagctgcaagggaggctagaaggtgtcatcaccaccttgaaggcaatatgttctgctaaaactcaaagtagaaagaaagagaaacaggaagagagaatggatatttagaaacactaagaaatttctcatacattgtgcatatgttgaaataagttactggtattcatggccctgtgtggaaatttattttacactttattgacatacattatattatccaaggtggcactagtggtaaagaattgcctgccaatgcaagagacttaagaggtggtggggttcgatccctgggtcaggaagataccctggagaaggcaatggcaacca

SEQ ID NO: 28518 - DNA, 857 bp, Bovine  19866881814881
  misc_feature (1)..(1): n is a, c, g, or t
nagcctaaattgtatcctgaaggggtcatgacactgatcttattccaatgccacttctcatttcagcatctcaaactgtggtataaatgaaagtctggatttctcacctgtcatagtttttaaaatcaaagtcgaagagcacattctagttaatgagcataaacttgaaccaaataagtttatgaaattcacagaccgtattgttcagctgctgcttcttcatgtatctgctaacattttgttcctttaaataaaatctacatttgcagggtattcaaaactgaagaatgcaccagaaactctgatgtaaatttgtagtttctatcattattaaaagtgactgctgctactgctactgctgctgctgctgctaagtcgcttcagtcgtgtccgactctgtgcgaccccagagatggcagcctaccaggctcccccgtccctgggattctccaagcaagaacactggagtgggttgccatttccttctccattgcatgaaagtgaaaaagtgaaagtgaagtcgctcggtcgtgtctgactcttagcaaccccatggactgcagcctaccaggctcctccacccatgggattttccaggcaagaatactggagtgggttgccattgccttctcctattaaaagtgaaaggacctataaatcttaattgatttttggtttaattatagtatattatccatgctgctcctctaggccctcctgcacccgcgcagccacggctccctggacgtggggatggtcctcctggccatcgcccctggcctcggtcatggggttgctcctccctgccgccgcccatggcttcaggcttagaggcgtgggatatctcctcccggccg

SEQ ID NO: 28519 - DNA, 751 bp, Bovine  19866882132826
  misc_feature (1)..(1): n is a, c, g, or t
nggagcaagtgagaaagagggaagaggcagagagaagaatcaaaggggacatatgtgtgagagagaaaaaagtgtgagggaagtggcaaaagagagaatgtgctagacagtgtgagagacaaggagaaatgtatatcctaatggagaacaaagaatttaagtctattggattttttttttaacagcaatggaaacctaatgaactattaccacacctagcagcaaatgctgtgtgtgtgtgtgtgtatgtgtgtatgtgtgtgagtgtgttggggagtcctttagaggatcaaagtaagggttagtacaaaacattactttctggatagaagagaaagactaagtgctcgcctctctccaagaagcccaaatacatttacctccacagtagtccctcagcatctatgggggattgatttcaggactccagtggatatcaaaatctgtggatgctcaagtccttcatggaaaatggcataggatactcggcccttgatatctatgggttctgcatccctagacagcaagggccaattttatcattcttcttcctggataactcattgaaaaccaaactttaaagagaaataaactcttgtatatataaatacagtttcaaatgctatacatgggtgttgccaccaaattttctctttaatctatttcttgtttgttttgacttccttgatagcaggtgatcataattaagaaaggcacaactcattatgtctgaaaatgaattgatttcttg

SEQ ID NO: 28520 - DNA, 616 bp, Bovine  19866880352702
  misc_feature (1)..(1): n is a, c, g, or t
nccgccccctctccccaaagcctttgttcatttttggccccgatgctgggcaaccagagtggaatgcccatccccttccggcttatctaaatcctcctaattcttcaaagaccagctcaaggccctccccactcagtgcagccagctgattgctcctgggcccatctgaggccgcctcctcttaccgagataggtgggcctttctaccttccaaataggctgtccaagaccaccaccgagaagggaagcacctgagcacaggcttactttctagctccttagaggggttcccttcctgctccccaaaggagatcaggcacacccactaagtcaaggttttgccaggcataaggagtggatataaaagccctgagctataggagtctcagtcacttacctttttcttcaaatgcacttgaatatctcccttaaaaaagtaacaggagtgaggggactagggggcctaacctaaaggaaacctattaaacgaaacttcctcaaaaaacctattgctcctaaccttaaccctttgttttttattactcacccagagagctcttctaaacaagtctagcgtcaaggtctccattttaaaacctaaattaagggcgggggt

SEQ ID NO: 28521 - DNA, 2177 bp, Bovine  19866880430591
  misc_feature (1)..(1): n is a, c, g, or t
nacaggaattttttgtctgttaatatattcccagcatgcaaagcagtgtttgactcataataggggctaagcagtgatttgttcaatgaacaaatacatcaaagtcttaagtgttcaatctgtaaacactgaaagaatggaaacaggtgtatgatagggtaattaatgatggagaatatctggccaagttaatattaactatagaaatccttgtgtccatgttaatgttatatggtgttggagcataaatgagcatgatttaggcgcttagaagtacataaacattttttttttcattaaagtaaatggaatttacacttttctactaagaagaattcactctacaatggatttttcaagactcttcatcaggcaggggtagcctatagtgagaaattagaaccacctatttagtaaccacccttatttgttaactatggtctaccaatactatgagatattatgcaatggttaaaaaagactagaaagaatgtgtcttagtttgtttgggctgctgttataaatataccatagactagatggctcaaacaataaacatttatttctctggataagatcaaggtacgggcagatctggtgcctggtgagagcccacttctggctttgcagatggctgtcttctcattgcatctttacatggcagagaatgaagagacagaggaagcaagctctcttatgtctcttcctataagggcactgatctcattcatgaggtctccacccttacttgtaacctaattacttccccaaagccatcctccaaatataaccacattggcttcaacatataattttgggaggatataaacattcaatccatagcaagatggaacagctgtctgtgctaacagagctccagaatcactgcatgaaaaaagaaacctgtggcatggtacttatagtatatttatctcaaataatatgtgcatacacataaatatactacacacacatacacacacacacattcctggaagaaagtctggagagatacacacaaaactattaatgatgcttatgaccaaagatggatagggttgtagtaggattgggagaacttcagaatttgacataataatcaaagggaactccagtgttatttgtaatatttttataatgaaaatgtactaatggatgacttatgtagtgaaatttttaaaggtcaaaacaagaaggaaaagaaaatagcttctgttgaagaagataagaggatagggtcctgccagggacttaaagtgtaaaatacaaaggttatttttcaacagaacggccataactgtgagtgagagcatcttaatgatttggatttctttgtcatcaatgtgcctataaagctctaagacaattcaaaggattatacagatctctccttgttttctcagaaaagcccaaatcaagtattccaagtgcatagtttgtaaagattgtgatgatataaacagaaaaaaattgtcatttcaatctcactggaaaaagccaacttccttagccaaatagtgtagtgtgtctaatcttcctgctaaacctgaacaattctaggtctatgtaatgactacagaagcaatttcagaaacttctggagggaaacaccacacaaatgaatgagtctgtggttcccggttattagcttgatgcccaaatgcttatcatatttgcaagaggcagtttacaatctgctcatcttgacaaatgtagcccaaggggatttaaatccctgcatttgcaatttctatctcttcctctccaaatttatggagaaatggtagacacgaataatgtgtcagggatgaatgaactgaggtctctgttccactcctgcagctctatttcactcaaaggagagtaataaatagaaaacaaagaaaagtctcagcagataatgaatctgagtcctaacgaccttcccaaactacagaaatggattgtaacttacttggcattgcccaaactatttgatgcctgtagagaagtatgaaaatatttttgactgtttagggccacagctgggcattttaagtatgtcctctatgattcatgaagagtcaaaactactcttccacaaaaaggtgaaagtcatccatcagtggtaatggaaaacttgcttccaacctgccctgtctattgccttgatggtggtgtgatgattattaaggagt

SEQ ID NO: 28522 - DNA, 1265 bp, Bovine  19866880438865
  misc_feature (1)..(1): n is a, c, g, or t
nttgctcagtcgtgtccgactctttgcgaccccatgaatcgcagcatgccaggcctccctgtccatcaccaactcctggagttcacgtgcttgttttagtagatggtaatttaaaatattagagacactgagaatttaagtgttctatttctttgtcaaaaaattctcaagagccatgtgaatgtgcttgtcttctcatcatgtaactttataatagagaacaagcctgttttcctatgccttcgcacattgtcgtacttctaagtttagattagcttccaacatttcttcctttgcattctcaatgttacaaaacacatccgagaattcctttagtttttgctaccatcacttctcagatagcttcattcttctttttaatcacagccacattcctcgtttaatgttaataagttccccttcaataagtttctctggctgcatgtgtagaacctctcacattcagctatttcttctatttccatgcaattcgaattcacttccagcattattttgttgttgttgttgttttcttgcttccctttcgttttcgttggccaattccttcttctgattattcatgtttgtaacatgtcatatagatttatcacttggagacaaggaagcaacgcaactgaagactttgctgtcagtatatgaacttaacaacagatacccagtgaccattcacaacagactctgaaagaagtgatgtgattgttcatggtcatactgcacatgttatctatgtaggaatttgtggactaaagaactagcagcaaagcttgtaatctcatacagggcttccctgtcaactcagatgataaagactctgactgcaaagcagaagacccaggtgcaatccctgggtcagaaagatcccctggagaagggaatggctacccactccagtattcttgcctggagaattccacagacagaggagcctggcgggctacagtccacagggtcgcaaagagtcagacacggctgagcgatgaacactcttcaatatatcatgtaactgaaatttaaactgtgtcattgagatctggtgctattgaactaaactgtgataaactgaattttgtccgtattagaaccaggcaaagtgagaaccagtggtacttaaatatttcatctctggctcagtcccctctgctttaaaaagaatctatttcctattcctgtggaccatctcaccactctttaaattagggaatgcaaatatgggcaagggggaaccaatattcagactccattta

SEQ ID NO: 28523 - DNA, 1861 bp, Bovine  19866880444646
  misc_feature (1)..(1): n is a, c, g, or t
nattccacatgtgagaagacgaggcctagagagagtcaaatatcactttttccttcttcctttccttggaaggaacttgaacttcctttgaagttcagtttcctgtctgaggccctgcctctccccagggaatgttactgggcttctcacaggaggtccagaggatactgccctgtggcctccgttggaaaaacaccccagagcacagtcaacctgaggtgcacacaaaagagtaacatacaccatcaaatgagtcaatagttttgaagtgctcagattagtcattatataaatgccatgtacgtattaagtaaaaacacatttggacatggacatgcataccacataaatccttttttaaaaataaaaaagaaatcacaagctctgctgacttctactcttcatgttttgtttctctgggatcacagtgcgagggtgtgaatgtgcagggctgtgaggtaatttcccagagttctgttcaggagcatccctaaacagagctttaatgcccagtaagacagtcctgcccttcacggcccaggcattctaacaaatgagtgaataaataaccataccacccgtgaaactaagtgtattaaaccctgcagtctggtagaaacatcagctgctttgtttccaccgggtagaaatgaggacatggccagtacctctgatgtgggtaccacggcaccaaagagaggcacaggccaggggccgacagtcaggtttctgcacgccttttgcgcagagaggtggggtagtgatgatttgtatcaggatggccctcttgggactgctgacagggaacagcttggcaaggaacagagaggaaataatacggagcctgagcagctcatcgggccataagtgattgtgacctcagcacagaaacgaggctctaaaaatgaggtattttaataacagattttctttcacgtttaagaaaacacagtcatgaacatgctacttccaacgagaggacagacataccttgctttcgctttcattggacagaatttccaaggcttccaggtgtgacaaaccttgatactcatcgaacagcatcccatagtgtgcggtcctctcggctgtgagctgctgcgccagcctctgcttctccttctctttggcctcccgtaacatctgcacaaacacacatttgtacactagatgtatgcttaaaagccccatttactgcaagatgtagggggagatgaacactgacttggtactagtgaagagtaggttttagtcactttggaatttctgcaaaaacgactttttaaaaaaaaggtaggggagtttttatttctctattttttgaccacatcacacagcttgcagaatcttagttccctgaccagggaccaaactcattctcccttcaatggaagcatggagctctaaccactgtactatcacattcccctataatgactttttggattaatttttgaattcttcatgttcatatgtacacaacaaaacaaagcaaaatttctactcccaggaataagattgaaaagaaggaaagcaaaacagtggtttccactgaagtgttttctgtgtgtgtgattaattttattttttttaatgtccagattttctatatgagcaaatttaatgtacactggaaagctcaatctactgtgacaggattcattgcaacttgtacacctaggcagacttcaaaggaaaaataagttgatctgatttaatttgaattatttaaaaattttttgtgtgtggttattaaacatcttcaattaaaaaaataataaaacataagctcatagtatattcctcaccagatacctaatataaatgtaaatattaatataaataaatgttagcttatcaa

SEQ ID NO: 28524 - DNA, 872 bp, Bovine  19866880590535
  misc_feature (1)..(1): n is a, c, g, or t
ntattctgaaaattgggtttctttctgaagtgcttcagtatctatggtgctaactttaaaaaagaaaatccctagagtcataaaacaattgatatctggtagtatatccagccagaattcatgttggagtgagttggaaggaaaggattgtggtgacttctagcattctcgtttgcaagcctgatctgtccccttattagacctggtttctcatctgaaacagtaatgccgccgctggagacaggaaaccagacagcagtctgccctgataagggagggcattgtctaagggagggagccctgcttccccctcaactctccttccttgaaatttagtagcaataaaagagatacaatactacaaacgcggtttcacaaccagaactaagactgttttctcccaaagcaaaaactggctctgctttctctggattgtcaccatagtttaatggcacattagaaaaaactattagtatattttgtgtctgttggtcagagtatttaataaatagtaaggtcctttctctagcaaagcaggttcctagagcgattggaaactcattccattgtgttggcaggtcgaatacattaccatttccccatctcattattaaggggagccagacaccaaatgcagtcacttacatggcccttcagcttctatgtaaccctgggtttcactgttaccctctcctgggaagagggtgctcctttgagatgcagccccctttcaggaggaccagcttactctgggacatgtccaagatggtggccagtctctggaaggcctggggctttccagggatggcctggagctagtctcaggccagatcagtggagtttggccaaatctagacagaagagatccagtg

SEQ ID NO: 28525 - DNA, 1724 bp, Bovine  19866880648145
  misc_feature (1)..(1): n is a, c, g, or t
ntcagttcacttgaggcatatacttaggagtggtattgctggatggcatgttaactctatgattaacttcttgagaaacggccacactgttttcgaaaacagctctataagtttgcattcccaacatccatgtatcaaggttctagttagtttacaacattgccagactattataacatagtcatttttgatttgcatttacccagtgaccaaaaatgttgagtatatgtgttgggcatctgttctgaacctttgcccatattttcattgggttatttataattcatttgtaagtggtttttcaatattctggatactgaagatatgatagagagcaaaagatagagagatagacagataaaacactgagatatatcatgtccagatacatctattgatatatatgatttgtaaacatttactccctttctgtgaatatactttcattttcttcatgatgtccttggaaacacaaatgttttatattttgttatcatccagtttatttttctttgattgcttgtgttttagatatcctgtctaagaagaatgattaatctaagggcatgaatatttgcacttatttattctaagtttaatacttttaatattacatttagatatttgatttggatttgggagaatggcattgaaacatgtgaaatgtcatgtatgaaacgagatgccagtccaggttcaatgcacgatgctggatgcttgggactggtgcactgggacgacccagagggatggtatggggagggaggagggaggagggttcaggatggattttcttttaaaaatttagaaaaaaaaaattaattaaaaaaaaaaaaacaaaaaacaaatagatggtgagacagggtggggcagagggaaaaaaggattaaacttttttcttctctgtccagctttagaactgctgatatttctggatcatagtactacattgtaaattttattttcccaataaatttatatataatagttaaaaaaaaaaaaaaagaaacccacccatctcctttttagtgttattgtaaggaccaaataaaacaaatgtgtaagcattttgtaaacactaaagttttatataacgatattgttatatgctacaaagatataaacatagggagattaaaaatatttgaaagtaatccatactatattaggatatatgtactctgtgtatctccagttttcaaatgtgcatttgtttcataaaacagagaaatacaccaataacttagagcaaacattttaggaaaatcatcacagagaaaaatgaaagtagataaaaatacagataataaagagtgttgcaacaaagaagacctattactacaattcttggtctgtacatgttgctgagaagtttttcaccaaggcagtgaaaagaggaaatagcttttaaaaatctccttacaacagtgggaaaccaaattagagacccatggcagtgtaataaaattacatgttgctagaaagacaaacatgcaaatcattagctaacattattaaaaacagaggagcccaatattaaatttatctaaaaatgacagtttattacattttctgagacgatcaaataaattatttaggtgttagaggtattatagtaacataagtgcttacaagaaaaaatatgatgaaaaagctctggtttctcctagaatttggctcctggattgtctacttgctctcactgacgagattgttcttgacag

SEQ ID NO: 28526 - DNA, 731 bp, Bovine  19866880681242
  misc_feature (1)..(1): n is a, c, g, or t
ntggtgaagttattttagctttaaattaggctcttgtgacacattctcatgcttgattaaaagctctggaagtatactgaatagtaaaatgcatcactgatgggcctacatcatttaccaaattaatcatagtctccggtactaaaaccctattcatatttcaaggatacaattaatgggaacattttataccttaatattcctccagtatgatcatgcaatagttgggggaaggggttgatgacaaaatgagtaccattagaagccaatttagctttttgattaataaaattcttattgctccttattattatatggttatacagctgtcaggcaagaatgtaaatgctatttccttaaagccactctgacttaacttttcagcgtacacagtggtaaacactggtgcagaaatctccatggcaacccagttccaagggccttggagtgacccccatgtctcgtataaacagttttggcaggaacctccatagccagcgcataaggatgatctaatttttgcaagcgtgtcattaccaaccttcagagccacagctcaggccaagtttttccccttgtgagtattttccaagcccgaggaagaaaagagcaagacagagttgagagcgtggccgtgttatttcgtattcactaaaccagatcccctcaagtctcaaccactcccggcttttgcagttggacacctttctgttgtcagccctgtccagcct

SEQ ID NO: 28527 - DNA, 1749 bp, Bovine  19866880735316
  misc_feature (1)..(1): n is a, c, g, or t
nttatctgtgctctatactgggattccttgtaaaattcattcaggaggaaaaggtggagaaggtttaggttgtcaaattcagtttaaagttacttgtttagtcaaaattaagtttaaaaacaaacttatgtttcctaacatccttattttataaataaggaagctgacacccagcgaagttcaaatgatttgatcaagtggcagactacacctgagttcctcaatatcctcccctcctgttaacagtatattgctattctgaattaatgctcaatttctacagattgtgcaaaagagaatttcctccaaaggttcgtctctgcaggagtggatttccttgggacagctccacgtacaggaacctcacattaggaaagtcttagcattgtaaatccgtcatcaaaaggaaggatgcagcctgaaaattccagatgtagatgggcttcagatttggtttgatcagagctctcatcctgtaatcttccatgggctaactcagtctgattccccacatgacagatgtctgaagggacaaacataagcaaatcccaacctttgctctggaccatctatgaaccaataactgcagcaagctgtcttggttgctcaggatgattaccttgcattgttggtgtctgcctaatgcttgtgcaggcattgatcttacctgtgcttattacagtttacaagtatctctttaactcaatgatcttacatgatctagtgatcaatttccttattttactccattcttccttttctgctaaagctttacctgcggtgtttccttcttagtacctcatgattcagagttccacattgtgtccctttagtgccagcttcatttttaacattgtccaacctgaaaatcgaggtgggattgctcaacttttgcaactttcaccattcaagtgatctggagagtggtctattcatcttccctaattgatgctggtgagtttgtattccctgtgcgccatttcacgagtatcctctctatggagatgactgtggcgtgtgagaaacacagcaagcatcatggtgagctgaggttgctcagggacactcatatcaccagatctctctgacttcaaacactgtgttttcaaacccccttccccacttccccagccatgagcagggacttgggattggggctgtgggatgtgtcccagactctgaactgtcaggacatccctgcactttctatcttgtctggattagcagctaatccattaaatcaaaatgtcctgagtctttgttcctaaggataatgaaaaaggatgaacctggcttgaggaagaggacaccttaaagcatgagtgaggggtgatgagggaggttggctaggagaaagggatgagagtaaggctccaccagaggatttgggaatggaagacctgggttcttgacagagttcttggttctgagggtatgtaatgggaggataaaagagacagttgggggctttggggaaactttgaggaatattttagtcaaaacaccacccagttataatttcatttgcaggaggtttaacttcccaggtggcactagtggtcaagaacatgcctgccaatgtaggagacataagaggtaagggttcgatccctgggttgggaagatcccctggagtaggaaatggaatccaccccagcattcttgcctggagaatcccatggacagaagagactggcaggctacagtccatggtgtcacagaggaagacacgactgaagcaacttagca

SEQ ID NO: 28528 - DNA, 1295 bp, Bovine  19866880904152
  misc_feature (1)..(1): n is a, c, g, or t
ntcatggatcaaaaaaggccagagccacttcacaagtgtttcatgacttgcaagaatttgaggtcttaagctgacctccgttttacatagtgtttcataggagttaagggccaattaaaaaaaaaacaaaaactatgaaaagtataatgttttgaacaaaaatacttaaaatcagtaatgaactggctgagagaaaaatcaaaatgaaaaaatcccttatccttatgatatcatttaagaaggaaaaaattgaggtcaaacattaactttcatagtactcatgtttcaggaatctcagtatccctctctctctctacctttgtcctttctctcaaacttggaattggcaaaaataaaaaataagagtagggctttgataggaaaataacttccacattctctttcctctcctcatgtgtaaacaggaacaacctcaggacccctgaacaaagaaataaagacagcgatgcgcaaggcagcaagcggtactgtgagcactgagactttgaacaaacatctacatttactgggctgtactctgtcttgatacctagaaatgacaagtggaggacagaggaagggaaagagcagtgacacccaatatgttctccagaccaatgaactgtagcacagttggctccccgtttctctaggacactttccgagtcttagaaaatgattcaatacatgacaattcacatttcgttctgaatgtctggaacaaagaaacctatggacaggacatgagccaaagaaatgggtgtgggcaggcattcagggctttacaatgactcctcattatggaccttttaatgacaggactcttaagcacttttgtagaaggatgaaggcataggtggggctaatagtaaaaatcctgcctgtcgatgcaggagatgtaagagatgcaggttctatccgcaggtcaggaagatcccctggaggagggaatggcaacccattccagtattcttgcctagagaatccccatggacagaggagcctggtgggctatagtccacagagtcacacagaatcagacacaactaaagtgacttagcgtgcacagatgaaggcatagaccaggccttccttgggactctgttgtccccacagctgccatttggcacttggcatttgctgccttgagttatgggtaactgtcctcatggacatgacttttctactctggctaaatcttaagttccccaagggcaagaatacccacagtgaaagtgaaagtcgctcagtcatgtccgactctttgcgaccccatggactatacagtccatgga

SEQ ID NO: 28529 - DNA, 1149 bp, Bovine  19866880929047
  misc_feature (1)..(1): n is a, c, g, or t
nacatgaccattgggaagaccatagccttgacaatacagatttttcaaataatgaatttaggctcggaaaggtcaagtaaattatccagcgccattcacatataagtaatagagtcagcattacaatccagacattgagaagcagagcttacattcacccaatctgcaatgtttcttctcctttacatgtgacatctttcttatttgccttactattcatacatatttgttcacattttgaactgattcttcatctcccaacttggaattcttcagcagaagtttctacaaatacagtttcaagctcctagtaaagctccttaagaccactgacaagatcagttatttacataaaggattgatctaacttctccaagtcttgagtttgttaaataaactttaactgactttatgactccctttaaggattttttttagactcacaagaagtaaccagttgaattgtgttctccaaaactcttctgctgacgtcctaaaccccagtacctcataatgtcactttatttggaaacgtagtcaggtagtatattaaactgggttgtcaggatgggccataatccgatgtgattggtgtccctataaaaaagggaaatttgggcacaaagaggcatagagggaagaccatgtgaaggaacacagagagagacagtcatctgtaagccaaggggaagaggcctggagcagatccttccctcccaccgctcgagggaaccaaccctgctggaaacttgatattggatttctaccttccaggactgagagatgatacatttctgttgtttaggccacccaggcttggaaccctaccaaactgatgcgtgactagtactaagcaactgaaacttggttgtgaaatcttaaagttcaatacaggaagggcaatcatcctagagaaaacaggaaaatccagctctaatgactgttgcaacatcccttacagaacaagcgcgttcatacatttttagcatatatttcatggttttaatttgctttctactattaattctcatagaagtataaatgataactttcatatagccctatattctagtcaagactagactagtcaatccctagacttctagtcaagtctccatagcttgactttcaaacccctgacaatatgat

SEQ ID NO: 28530 - DNA, 1232 bp, Bovine  19866880990659
  misc_feature (1)..(1): n is a, c, g, or t
nagcttagagcaacgacagggggtctggagcaaaagcagactgtgtatgcccttgcacacaacaccaaaggggtcggtaaaccacctcagccacccctccagccccacccctggacatacctctaacctcacccccatagaaggaaccagctcacctccctctcaagccagtgaacaaaggagcctgttacttgttctcactccctctgctgcagcaggggccccaatgaagccttgcctgaatttcttgtctggcctctagtcagtttccaatgattggggaaggctgagaaccctggtcggtatcaaactccctgtcttcaagcattgaatgaaagcatggcttcagttttctgcctagctgaattggttgactcaaatatcttctatttgctcaacttccattttgccctttcacttgcagtcactatttgaagccctcagtttattaaatcatttatatttctataattaagaagtcaaagtgttgcatatatgtgtttagtcacttcagtcatgtctgactccttgcgatcccatggactgtagcccaccagtttcctctgtccatggaaatcctccaggcaagaatactggagtgggttgccatgcccttctccaggggatctttccaacccagggatcaaacccaggtctcctgcgttgcagacggattctttatcacccgagacaccaggtttaggcacttaaaggagatataaattatatatatcaaacttgctatatcagtgaaaatcaatacttttgtcaaggtcctaatgaacagcacagaatctcatctatagtagcagctcaaaattactttactgccagacaaaattattatttgcaaagttaactagtaataaattgctgtaatttgatagtataaaaatatctccagatgtgtttatgtctattttcatgattgttataggtttagcctcaccttttatgattcagtgtatcaataaatgggaattgcatttgccggaagactctggaggcagggagtcaagactttgacttgtcttaatagctaatactcatacaatcaatctggcccattaagttcagtcccacaaatatttatttagagttttctttgcacgagggcaactagctataaattttaaccacaggctgaaaggatcaaaaccagttcaagagcttttctgctttgttgtctatgggttttggaacttttgctttctgtgtaaagaaaaactcac

SEQ ID NO: 28531 - DNA, 1484 bp, Bovine  19866881026679
  misc_feature (1)..(1): n is a, c, g, or t
ntatggggtcacacagagtcgggcacgactgaagcgacttagcagcagcagcagaacattcttatcttaccatctaaaaatcttactaaatagcttattttgcaaaatactttggttaacaagtcaactcatttcataaggagctattgttgtggttaaaaattgccaccaaataaaaaagacaaaacaattgtgcatccttagtttaatcaatatagaactgtataaaatgagtctatataaatttgctcctggtgatccataagccattataagatataaagcattattattatactatcatatgtgtaaaacattttgcctaatcaacttttcacttatgtgcaaaattcctgctaccacaaaacggtatcaggacaaaatggtggttttcaaatagttttgttttttggccccaaggagagttccttcaaaacaaaattctcaaataaatccatcactccaaaaagagtgggagaaaagttcgacattgcttttggaccagggaaagagacatggctattttaagttttaggaagcagtaaatgtagtattgaaaagctactgtaaacaactaggaaactgagagtacaaagttgttatcatgatggtagattatttgtcaatacatctgcccccaaaagaataatttttaacatgcttttttaacatgctacttgtcacaaaacactaaccagtcattaacagatcaattaaaatatatgctatgattgcttaatctaagcaacataatgccagaaaaccaagagaaatttaaaaattttaattattcacaaaatgtacattcacagtgtttattaagcaaagaaattatctgctacttcacatcacgtatatgcaatattaaataacccttgcaatatgacattaaatgtaattaacaacagcatattcatcaagtcacttagtatatgtatatacaacaataaataatcattgtaaaaagtcatcaaatacaaggttttctctgattttaatcagttcatatgataactttttaatgaccgaatacagcattttctttttaatttttcttcttataaaatgctaggaagcacaattaccattcaaacaatcatgataatatattttcaaatcttactgacatataaaagtagtttaaatttacatctatttcttttcctactctaggtctcagcaatatcacaattttctgaaatataaacagataattttaccccattattctctagttacaaatatatacaggtatatagccacttaaatttttacccatcttattttagctgtattttgaaaaaacgtctttatacttttttttcaaaaagtaacagtgagcaatttgtgtgaaatagttgtaatggaaaggaatgcaagcatttttaacatagtaaatgttactttatgtataaagtaattccaggatataaaggcatatttaaagctgtttgaaggaaactttcaaagagcaagatcatatg

SEQ ID NO: 28532 - DNA, 1300 bp, Bovine  19866881038069
  misc_feature (1)..(1): n is a, c, g, or t
natggctggtttgcattgttgtatggcacatcactgtaaagcaattttcctccaattagaagataaatttaagaaaaaaatatataaaaaattaaaaaataataattaaaaaatttaaaagaaggtgtgtaatatgcaacctaaactctccctagagttttgaaaaggaagataaaattgcggacattgatggggaaattctttagtgcccatttttaataacacgatttctatcatgtttttgaagaacattttaaactgcctgcctccctttgtgctttttaaattcttcaaagggctgtggaggctcatggctaggtcttcagggagatagtaattagagacataagaatagtgagcacaacttcacatggaaaatgtctcagctatggtcatcatgacatgggtttgggaataagccacctcattccacaagacaaaattgggagaaaataactgagtcatagggatgtagaactgaattcccaggaagacatgaaccactcgctccagggtgcaccttcgatgatgccacatttatcacagggccagggattgtttacagaatgttgtgtcattcacctccagttgaaatgagagacataggaagactatttttaggctgatgagtttcagatttttacattttcccatcttcagcccccttgattactcatgtggaaagcactttaaggagagaaatttcagagttgtttaccatgatgaagagactttgggtggccctcacgatccccacatcttggttttcctgtgtttgtgtaattccctccctttgagtgtagctgggacctatgacttgcttctaatatggcaaaagtggtggggtgccatgggcataattagattctgttatatggcaaagtggatgggctgccactgtcatgattacgttacactgtgtaagactctgtcttgttagcagatacactgtgaagccttactctccttgctggctttgaagaatcaagcttctatgagtcctatagcagtaagtggagtgagctgagaagcccaccttttcctggctgattctctagatgagaacccagtcctagctaccatctcaactacaaccttttagaaatcccagataaggtatgccaagactcctgacttaaagaaactgtgagatagcagatgtgtgttgttttaaattactaagtgtgataatttgtcatgcagctgtgaaaattgaatactcttactttgataacttgtttttctgaccaaggattcttggacaggggtttatttctttagagtttgaaaaccactgggt

SEQ ID NO: 28533 - DNA, 2575 bp, Bovine  19866881104340
  misc_feature (1)..(1): n is a, c, g, or t
ngaataatttctagagccgaagctgtagaaattaacctgtcttattccatgaatatactaattataggcagttattgctagtttctgaaagtatgcaagagccatcgaagcagcctgagggtcctacactctagggcccttagattaaagaattccctaaattggcatgactatttgacatttttatagactgctccaaataattctgttacttgtgttaaaattgtttcaaacaaaatcgggaactgggtcatctattaattttttgtcttagaagcgtacctattcatgcacaccaataaaattaatccttaaaatgttttggttttcttaagcaccttttaaaaataacattgtatgtcctacaaattatatgatatatgctcttccaaggaaaagaaaataggattaaatcaatgataaatctcctgatgagaaaaaattgtgacttcatattgcttttaatatttgaagatagttcattctaggaggtgctgactgcctcgaaatagcaaaacgtaaaaacctaatctcatgcaattacctcactggcagggtaaaagcgtcttaactggtggtcttgatgctttggaattcatcggcaagaaaaccatgaatgtccttgcagaaagtgacccaggttttaagcggaccaagacactcatggagagaactgtttctttatctcaggtgggattatgtacttttgtgatttgttctttcagtcaataaagtaaataagattttatttatcttctttaatagatattttaaagcacatgtcaaattcaaagacctgaaatagcagggagtgaaaattgaaattttaatatgctactttccccagccactcttcatgggatacaatcattgttaaccattgttaacagcttcttacagattctatcagagacatatagacaggtttagatatagatatggctgtataggtaaatatagctaaatatatatatatatatgtatatgcacatgtatacatacaaattttttcaaccaaatgatagcacactaaccaactcttttgtatcttgctttattaaatataaattatacatacttaataatttcttaaagataattccattgataccatttgtctaagtccattcagctgctataggagaataccataggctgaggttataaacaacgaacatttatttctcaaaattctggagtctggcaagttgaaggtcagaacagcagcagattcaatatctggttaagggcctgctttatgattcagagactgatgttctcccagcttcttcacatggtggaagaaggtggaggagctctctgggtttcttttataaggacctgaatcctgtttgtgaggggtccacccttgtgatctaatcacctcctgaaggcctcacctcctaataccatcacaccagggattatgtttcaacaaaagaattttggggaaacacaaacactcagtttgcagtaccatcatattctggctctaccaggttctagctccatgaccttgagcagatgacttgaccttgagcagatgacttaacccttctgtgcttcagattactcttctgcacactgggaccatcaatgcctattaacagctttgttgtgaggattacatgagttagaagagaacctgactcatagttctcacccaagaatgttagttcttatcattgtcttttttatgtgtcacgatgataggtaaacatgctatctcaatggaatcttagtttacatttctcttactatatgcaaggttggacttctcctgtcacacttccagctgtaaagttttcctccttgagaagtatgatatgaagaatttaatttatgttttgctttacttacagtagtcaattaaattaaaagtaatatttatcttattttccaaatacaaaactctaatattgaacttgcttcttcatactatacctcttccccccttaagagtctgacataccaggtctctctatgtcttaccaaaatcagaagcagcagatgcaggattttataaatttcacaggcaggacagacacgccttcccatgactcagtgctagaaagccacaaaggagatatcactgaaaacaggtcatatcagctgtggcagctcctaaaaaatttgatttctaggtgatttcttcttggctcttccactctaggggcttctctggtggctcaggtgataggaaatctgcctgcagtgcaggagacccaggttcaatccctggatcaggatgatctcctggagaaaggaatggctacccactccaatttttttgcctagagaatcccatgaacagaggagcctggtgggctacagactatggggtcacaaagagtcagatatgactgagcaactaacacacacttccataataacccacatgtaaccactgtgatattatagtcctggtagagacttggcagagtcagctagaccattaacctcttgatctttaaagaagaaaatagattttgtattaatcagtccattaacatcagatgctataaaaatgcaaaataaaacaaaaccaataatagtaataataacccaggtatca

SEQ ID NO: 28534 - DNA, 1708 bp, Bovine  19866881173436
  misc_feature (1)..(1): n is a, c, g, or t
ntgccttgggctctaagcctttgctgccgatgtagtgttgaagttaaggagataattctttcctgaggaggaatgggacaaggaaacaacatcctagaatgcagttaagaacgaccacagaatttggaggttgagctgtgctaagtggtcagattgctcatctgcaaagcaggctgacaatgcccccacccaccaccttgggcacctctagggagcccaagggctatgaaagagtttggaacagagtaggctgaagaccttgaaatgaggatgtgcagcaaaaccagggctacctgaaaacacgtgcctgtaagtcacatgtatggactaatatccctcagagaggttcaggtggcttctctgaactccgaatatttaacagggtcttttattttttttttttttaatttaaatttatttattttaattagaggctaattactttacaatattgtattggttttgccatacatcaacatgaatccaccacgggtgtacacagggtcttttaaagtggattagccatgtcacagtgcaaatgcattccccaacaaggttctagaggccatgcttcttctggaagaaagaagcttctccctctcatctgatttagcacctgcattatacccagcctcttgaaacacagccagcaaaaggcaaactgggcaactataaaaattattttctaataataattcattcttagcttccagctaaatgtgactggctctgtggcaggctggccagggtccaggccagggagaatggagctgagagcactgtgaggggagttggcatacttccgcttgaaactggggtgctgggttggggaaatgaaaggtaagctctaggcatgactgggaaacagaagatggagccaaactctgcccctcacctccatcccccgaccccagtccatggttctctgtgagctagtgaacagagcaaagaaaccatagccaccgccaactccttttctcctaggaatcatgtggaatagacccttgtttatcattgttagaaggtaatttttcagtcactaatttctaatcagaaaagtctttagaagattcagaagacatgtgctttcactgaaaagaaaaggtcaggatcctggcaagctgggtgggttgtgtcatcactgcttccaatctcaggaagccactaataaacataactcaatttactaagtgcttaaacacattcctctttaatcaccaatcaactctgtgaggtaagactttattattcccattttacagatacagaaactgaggcacagaagttaattaactagcccaatgtcacacagctggtcccatagcaatcatacctctgattttctgaaaacataaccttttagaatatagagacttcatttcccagcctcccttgcagctgagtacagacacaaactaagatctggcctatgggctaagaggagaaatggtacaggttgcgtaacttcctggtcttggctttaaagggaaggagcatccctgctctctcctcttccaccctcctgctgctggaaattttaaaagagtaagatatcttgggccttacagttgaaggcatcatcctatagatggtggaataagatcaaacgagcctggttcttgggagcctagaggtgtagaccatcctgggtcacctacctcagagctattaagtaatggaaaaaaatatacttctctcttgctgaaac

SEQ ID NO: 28535 - DNA, 2455 bp, Bovine  19866881194591
  misc_feature (1)..(1): n is a, c, g, or t
nccagggggacagaaaatcaaagtaactgttctaatgaatcccataaaagaaaggaagatcctcagggacaagaatcggttccttacctttaaggtgagtctgactccactgcagacacagggaaggagacagtgaatgatgaatggagatgagaagtaaacaaaaggataagcactttcctttcaaatccaggcctaagcctccacatgaagggatgatgtactaacacatttctacttctgaaatttttgctttgtttcttatacctttttcctcttctctctcttaccctaaataaatatactctacagctgaccccatcttgtgaggaaaatatctgaattcatatacacactacaatgaatatatgaaataataatatatttgtcatgatcactgctattttcttagtacccacaccagtaaaatgcccatggaattttctttgagaataaaagtcctaagtttgttgacttcaaaggtagaaaaatttcatgagtattcaaaatcagctcaaaaaaaaaaaaaaagctcaatttttaaaggaagcaaccaaaataaaggctacactgatacagaatgtaaaaacacattaaccacaatatgaacttttaaaaggtgagaatttagtttatactctttttatattaagatatgttaatgacttataccctaaagaatttatcataaaatactgcccagtgcacttgtgcaaacaataaataattcactgacagtattaacattcacatgtgtaattaagagtttacaaatgtacaaaatttggggtaataaatactttaaactcatttgccaaacattcagtaagcccatccctccaaactgtttgattacaaagacgcacaaaggattactaattctggcaaaagataagaaacaaggcaggagaggcaaacacagacttgagaacataggaatatccaaacagttctttgatataaaaagacaaaatcaaaacatttttaataatataaaagaaaacaaatccatataattaaatgctacttaggtgaaagaaccttagagggtatatagcatttattttctccacaaaatgtgcatatcttgaatttaatgtaaaacaccttgtttcagttccaaaggaagaatatcataatatagagttcttgatgaatctagatggaatgaatatttaaatagatcccaaagatcaaaacaagcttttatttggtcattgttctaactctttaatgttcattaaattgattcacttagaaactttagaaataaaactctacaaccaaagcacagaaaattcagctattcctgaaaaaaactaaatgcatagtctttagtatatcattaaaatagtggttgtggttaagcaaacaaatgaataaaaattactacaactcatgtatggtaaagttacaaagcaatacattagaagttttatcagatgtatttgcactataataaaagaaatctggataatagtattcagtaaaatgtttttgattattaaaagaaatgaaattcccaattaaccctgggttgtgttaggagcagtgcatttgtcgtcatattctatatatcaggaacatacattcacaatccaccagacacagttttaatctcctaagaagtgaaagtttttaatcctggttcttctgttctttccttccgtgttttaacatcttcatttagagatcaggcactttgtgcccaggaatgtggcgttgcaaatttactaaaaacatatccattgatagcagaataattatactaaattcataaaggaagaagatatcttcatttagaaaaacaagcacgaagttatagtttcacagtcacaacgcaagctccagctcttccaaggcacagtggagcaacctaaaaaaacaaacaaaaaaccaaaaagacttgtgttgggattgtgggtaaaaatgttgataatactacaacagtcaatgaaatattgaaacagtttgctcacagtggttgccaaagagctgctgcccaaaccctactgtccgagctcttctgctggctcttttcttaaacgagatcctctttcctgatgccacagcttcacggactaaatcgttttgggtatataacacaatgtagcattcacttctctttaaagatgacttttaaagacagatcaggaactggtctacgtgaaacactattttggccaaaattatgtacaatatggatgtgagacaaggttgaacacttagagtaactttgtgaccaacatggagaaaataccaagtattatccagagctgccgttactttgctgtctcagagagtacacaaaatacactgctgcctgggatctgcttactctggaggaaccactgacttcacagttattgatgaccttctcagcatggctgagaagtctaaactcattctactacttgttagcagagtgaatcaataacacatatcatccacccag

SEQ ID NO: 28536 - DNA, 1073 bp, Bovine  19866881242832
  misc_feature (1)..(1): n is a, c, g, or t
ncaggcaaaaacttgacaaccaaaggcaccagcaaccttccagccaacaaaggcagtcattatgttttctgcacttaggagttttcactctgccaggcagatacagagagcactcatctccttccaaatcctaaacctcttcacttcctctttctccttctctgtctagagccttttgagcgagatggccaataagccccttgtttccatctctgcaggaacaagtgggtactgctctcaatgtccaccaaaccgtaagtccttggaggatacaggaagacatccaccaatctcaagatcaaaatgcaccagagaaagcctgcaaacaaagaaaaggctgcccaccaccactttttcttacaaaactaaccgaatccctgggaataggaagcagcttacttttgcatggtgtatatactgacaaaaggttcaagaatacttaattttactttttaaaatgttcttattatacaataaactacactattagaaatcttattctttgctacatattctctctctgaacctgatagtaatccttctattcacagcaataggagccaatgttttggataggattcgaactcatgcccagcagaccccaaggctcctacactttccttaaaagcagattgtcccttactggattccagagatccagagtagacatttatgatcatattttcttaatcagtttatcctaccttctaaaatatgtgtaattctacattttcaggaaaacaacacaaaaatgttctagagaatgggagcaaagtcttttttctttatttttcagactttaatcatgaaaagcaacatatctactccaaacacactctctctctttgattttatgattcctgtaaagctcacctagccccaaatgctaggaaggggcaattgggtaaactcaatcaacggacaaccaaatcaacagaaaaggtcattttgaaaataaaatggtttatgatgggattgactactggaaaagcagggtgcatgcatgttcagtcactcagtcatgtccaactctttgtgactccatgaactatagccctccaagctcctctgtc

SEQ ID NO: 28537 - DNA, 1850 bp, Bovine  19866881254973
  misc_feature (1)..(1): n is a, c, g, or t
ntccttccgtatctggcttgtcacttgaatttgtcacttcatctaaatgtacatcctttaacctcctttgtgcctgcagctacttgggaggtctttgccaccactgggaagggagccagagctgctgatttaggtgggtgatgtctgtcagttgaggggatggatgctctatttgcctagcatggagttggagcaaagaggcatggaacagaagcagagcagggtgggcagaggaggaagccatctattcctgctgggcaagggctttctggtgagacttcatcattttgtagctgggcagagcattcagagtttcagtctctctgcatgttcagctgtgcagaatcctattgcaaaggacttctccatgcacctgtctccgtttctacaatgtccttaatgtggatcaccaagcgttgatcataggaatgccacaaaaatatctgcccagaaatggtaaaaaaaatcttttgggtaaggatatgaatggccttcttttatcccacctatttaatagcttttttgcaaacaggaaaactttgagtggtaattgtattcccctatccaattaatcatggaaccttcatatggaaacttttctgtttgagctgcaaagtgcctattggctgtcatctgtgttcaaaatacatatcataaataagcgtctgctaatgctttaatagattccttcgatctaagacctgagtgacactatttgtaaatataaatagttgtgaagcacacatacctttcttgatttctgaaaaatctggaaaaccacagttcagggattcataaatgtagctcaaattcccaaatgtttactgtcagagctggcgatttcctgtcattatcaaatatcccatcaggaaagaacaaactgaaaatgactcgtgtttatgttgaagattaatagcaccattattttaggggaagtttttcaaaagcaggcttttgagcactatagtgtaaatgccaataaaaataatctacgcatagaaatgccattggtcctaaatttgaagaaagtgggcgacggtggtctagtgtgggagcatgtaagtaaatgcgcattcatccctcgataaaggaaggaggagcagagagaaggacggaatcctgaagattcatcccagccacaactcaggatccaacgcaaccgtaactgggaggaatatactgttcagttgtttttaaaacaccagtgcatgagtgattctggaggcctgcgatcgtgtggggagcttactttgatggcgccatgttaataaaagtgagttgtagggactgcgcacctaagagatcccgcttatcagccctcagatccaactgaaaggagatgtagttgagaaatgcagagtaatttgttatgtggcacttggttttattttctttatttttttcttaagcactgcaaaatttgtttagaatattaaaccatccttatgaggcttttttttttttttgcaactatgacgtgaattgagggatttcttttgaaaaatggctcttggaaaagtaggtattgtctatattgtagatgcttagtcacattcatgccaaagtgtcgatagtttgaaatggttcttccacaacacaccgaagaataaagttggagtgcaaagaacattttttttttttttaaatgagctaaccagtttgtgcatgttctaacccatcttgaggatgggaaaagagtcaaaaaagggtagaaagttgatctttgcataattagctttgagtcaaagtccagctgatagaaagcttcatgggttctcatgaaatttaattcgtgtttgctatagcatatttaaatttttttcaaaaaagcaagcaggaccctgcaaaga

SEQ ID NO: 28538 - DNA, 643 bp, Bovine  19866881273506
  misc_feature (1)..(1): n is a, c, g, or t
ncaggatgtatcataaatctatttatgtgagatatacttaataaggtgatactgaatgaaaaaagtacttaagctattcatggatgaagtgaagtacttaacttgcacagatccaacatgaaaccctttgtggtggtcaggttttatcttgaagttatggtttagaacatctttttaaattgctattttaaaataaagagtagtgaattgacctggatgataagaaaagaaaatctgtgtcattcattcttctatcagcctggcaagttgtctcagagcctgacgaataggatgtcagaatgtaccataacttctagaaagaagccaaattgggtcggcgagtgacacatttggggctcttcccagctacaaagcagacactagttttgttttttgtttcatggaatacgtcataaagagaaagattttgacaactcatataatcagtgatatctcttctgagtgttgaattcaagactctaatgtaaaccctgaaaatgaacaaggtcccaaaggagtgtccggggccttcgcaagtcactgtggataaaagtcgttccaatgccagaggggagaacaaagcatctattcttttcagtacaacagatagatagacacccaatctgggtaacggctgtgtaca

SEQ ID NO: 28539 - DNA, 788 bp, Bovine  19866881289763
  misc_feature (1)..(1): n is a, c, g, or t
natgacctctgcctgtaacaggcaaccaagaaccaaacaggatggacaccaccccaccctccatacacacccaagattttacagttacaagttacaatgtgtttatttcctttttagttatccatcagccatcactgacagtcttgtggttaaactgttaaccgataatttttttttaaagcaaaatcatgactcatgaagatacctccaaatgaacacaaattaaagaatttatttagctcattaattaaatgaaagaaccagtcagatgttataactggttcaaaggaagagccaaataagtacaaattcatataaaataaagcaattttgaaatgaatatgcaaatggatacaaatctggttttccataggaggggagcttgtccctccactggacaaaatttgttcccatgtctatagacaaattattttgcactgctatcagatatctacaatttacagagttataaaactgctcccatggaatcagaatctgataatctgctaaactgatctagaaaatgccattttccactgaaacaccaacttttccctacaaaagcagggtttggggtcagacatgatgtgatcaaatgccacttgtagctgtagtatgattttggacctatcttacctcaatctccttatctatgaaatgggaatgataataatctacttcataaaagtattaaaaaaattaaatgagataatccatgtgaagctagctgcaacttgcctagtacataataagcagtcaagaatgttagctgccattttatgcatata

SEQ ID NO: 28540 - DNA, 1670 bp, Bovine  19866881328531
  misc_feature (1)..(1): n is a, c, g, or t
ntgacttaatttatcttcaatacattcctttcttataatatcaagataatgtaactctcatttaccaggttgaactattaatcaattgtaattgcacactatgggtactgtccttggccatggaattcattaaaattacttctatcccttaagtaaaatttaaagtctgttgtagaatgcttaaaaaaaattaaactcaacataaaccctttacttgcatgcgttttaggggaacatattttcagtggtaacatgtcaagtctgcctgcagaggattacttatatttagaatgttttatagtaagagtgaaaaataacatactgtgcctctctcccggctctaaagttcgatgcatttgtgattctgaagcaacactagctcacaatgcaactgagaaaacccactaatgggaacttataattgaacagcttaaatgcactattaatttctgaaccttcctggccccttcggtggccactaatatgagttattaataactgtgggacagcagtggttttgactgggattactgagatcacaccctttcttctctgggcctcatcgggtgaatctccacctggctatgcatccaactcatcagtgcggctttaaaatcccattcctgcactttcaaaataactattatattcaaaaacagttctataaaaaaaggcaataaaaattactaaataaatattagacatgcaagtgtcatgaggatatgtcaaaactggatattcatcttctaggagactgtgatgttaagattagaattggacccaatgagatgcctatgagatgaacttaacacacacagtggtcccagagtcttttcttcctgctgtatacgacaggtgtttacttcagtgggctttgatgttatcaggtattcttcagactttactaagcacacagattcacctgggaatcttgttaaaatgcagattctgagttactggggaatgactcaagatgccatagattgaccttggactagcatggctctaagtgatgagatatagaacaaaaacaccaatttttcttactaacatttggtaaattatttaaatgcaatttaaaggtggggagggagaattttcactaataatactgcttaaaaaccaggacatgaggatataaaatcaggaaacacaaaacaaattgttgtttttaaaaatagttttgaattatgtatcgaagatcaaatgaagactatttctacctttctttagaataagacacacataggtgcaacacaagatgagaggctcaaaatatacagtaatatgaatatgcaatagattgaaactgaaatgttaaaagaggcaaaagcaagaggcacaaggtttgtgaacagaaattacacattatgtacaatgagggcttaaggaagtaattaactacaggaggaaaaaagatttctcctagttctaaagtttagccagcttgatataattttctaaagggcaaaagttctggtacaagaaacaaaaactccaggaaatgggaggcagtgttcattgtttctactcacagaaatgtagcttctcccttattttcagccctagtcttaaaagacatccctatgaccctagattttaataccaagttattggcaaccacatcggaagcaagatgaggacttgctgtcattgctggatttttctat

SEQ ID NO: 28541 - DNA, 868 bp, Bovine  19866881341214
  misc_feature (1)..(1): n is a, c, g, or t
naatagtgccttgcatggtaactatttgatgagtatattccatattgaacatcgttacacatttatcttaataaacttttgtaaagagtcaacactggggctgctggatagaaggctcatgaatttaggatttcatcggtagtactaactgctcttctgagggttacaccaatttctactcttcttcaggtgaattttggaaatagaacaatttaaaagtattgactgcctttcagactctactatcaatgaattcaagatattataaaaagttgtgagaagtagctgtttagaaaaacacacagatggtattgctacactcaacatgaagcaaacttcatgacagtaaacttcatggcagaaaaagtggagcccgtcaaccttcctttcgggaaagtcttctctctccattatgctggttgatgtccagtctgtaatcatgtactcacttctctttgggatcaaaatctacaaaaagagtttctgaactcacagtgtttgctttgccaccacacaggaattcattaatccctgggccctattcatagtttgaaaggattgtgaacaaactccaagcattaatcctatgatcttttgtactgatatttgagaattgtcacatcatcagcaatatcacctttaaaacaaatccatgtgataccgagagtgaaatacctggcaaagggttcttactgtagcgtcattctgacaagtttgccgttctctgtgataaacactgtcattacttctgacagtgctggtagaaggtgttcattaaaacgtgcagaaggaaaacgccacgtaactcacgagggatagggaaggagaacaattataacttgaaaaggtaaacatacagatcagctct

SEQ ID NO: 28542 - DNA, 1321 bp, Bovine  19866881342805
  misc_feature (1)..(1): n is a, c, g, or t
ngctctgggaactttcttagctttttaaactgggaggttctcagagccctaatttgaggaaaaaaattgggttgggtgcccctaaagagctcaattaaaaagaaacttagactttctatgctcatcattagcagtaaaatggttaacctatggcaaataagaagcattagctaagtcatcatttgacatcagcaacgtacaggaacttgggcaaactctgggtgatggtgagggacagggaggcctggcatgcggcagtccgtggggtcgcagagtcagacacacagggtgacttggacagcaacaacaaaaacgaggggaaggttgatgaaaactgcatgcggtcagtgccaattttgtttgatgaatgaaacagacaacacagggtggtttcaaatggcgaaagtaatatttatttgtggcatagcctctgctcgcccttcttacccggtgcctgtgcctgccattcatgggccaggcatgttctaacccagtgctcctgggctttgggttgacttaagaattctggtactttctcattttaagtcataattctgaaccctgtagccttgtctgagaaaaagtcagtagttcccctgtcaacctgtataatcaggggaagcacaaatttaaagtactagctaaccacaagactcacctcacaggttctatttatgagcctgtgatttttatgcaccagagaactctgcctcagccatcctttccctttaatggttctcattaaaaatcctctgactttactaccaggcatataatattaatgtttagagtgggccaaggggtgatggcctttttttaaaaccaagaggtctttggaagtttagcatcttaaagggaggaagaagcagatgctttcttgttataaatattcctctaaccttaaatgcagtttccccccttccatgataagttgctctttctgagagagaaatgggaaggaaataatgtctcccccgagtgctgtttctaaggcctctctttgtaatgatggatgatcagcaacagtgagaatctaggagaaaaaatgtgccagcatgatcctctggagaagcagtaacataagtgaaaaagaaaaaaaaaatgtagttcaaagagagcagtgactatagtcacattcagcagagcagcttgctgtcagccctgcctgtacgttccagaaggtctcttcagttgctcatgtattacaaagtaagtattgtgacacacatacacacagagatatagatagctcacaccctcaagaagataagagagaaatagcacccttgcactgcacggggcctggcacgtgccgggggca

SEQ ID NO: 28543 - DNA, 956 bp, Bovine  19866881407430
  misc_feature (1)..(1): n is a, c, g, or t
ntaacctataacttagattacaaatttagaaaatttgatggtctaatccaaagaattttagatagtatctaaaaattatttgaaatttccaaattataatgtgaagagtatgagttcaatattttcattatgatttactgatggaaaaagtaaaaaggttgagactaagaatgaaatcctaaatccacccctttcctccctccccctaagatcccttctccaagattacctgaatcaagtaatcaacatcccatggttatgcagttaaccacaaaaccaccaactgggccataacttagttctcatttctcatcagatctacttttaaggatattatgattctgataaatgcactgttgaatcaagcctcgctatatcttaagagaactttcttaatataaatatctaataaccttatcaaactctttgactcttttataataaagggaactgaagccaaggagattaactgctttgccaaaagtcggagagtttgatcatggcagaaatagggctgttgcagagaaatctgtgtgttcaccaaaaccctttttctcctagaatatagctagactgcatttccagcttttcttgcagatggggtggtcttataacggaaatgaactgtgtcacctcccagctaaaatggccaagagcaggtgtgtatctcccattctttctttctctaaccatgaggacggaggacttacatggaggaagaggcaaaatatacacaagtgtttataactaggattatatatacagattctactcgtaagaattctcatgttgattcagatgtatcagttttgaaagttaggagggccatgaataataaatatctctacctaaagcccctcccagcccatcgcagtttcaatgccatacaaacatgggtcctagagaatgttcttagaggatccctgtgaataatgataatagaagcaaaatataga

SEQ ID NO: 28544 - DNA, 1166 bp, Bovine  19866881410427
  misc_feature (1)..(1): n is a, c, g, or t
ntggtctctgctcattcttcgttcggtttttcgtgttactccctgaatgagatcctccctgccctgctaatcaaccacaccctcctcccctgcccattgttctctggcaccgaactcctcctatctccttcagagcacattgttcaagttatgtacttatttgtttaccttcatctaccttccccaactagactaaaaagtccaagaaggcagacacacaccactggttgctcagggcccattagggcacctagcacatagtaggagctcaataaatgaggaaggatggtgtcttctaaccgaagtaggtgaagcctattctcactctcatacattgttcagaattaattctgagtgtgaattagatggaagaagcaatcaggcagaaattgagaaatgggagttttcaaaaacaccccaaatgagagattggaggtacaaactattatgtatacaataagctacaaggatctattgtacaacatgttttataatacctataaatggagaatgaactttaaatattgtggatcactatatttacatatataatatatatcaaccatacttcaataaaaagtaaatttaaaaaattatagataattttttttaaataaaaacaaaaggattggaaatgtcttaaagataagaaaaaataatattaaccaaagtgttctcaaagagaatagttctggtgaacctatcagtgaaatatataatttcccttacttagtctgcttggcttgtatttgctcctgttttgctatcactttcttatctcagaagaaccccacccacatctcagtttgccccagtcgtgggtgctttttcaaaaattcccttcacactctgattcaagccctgggtgagatgctgtggaaaaccaagatgtcaaagtaaaagggtaaatttcacggttagtcatgaagcccctgaatttaacatctgtttgattgcaagtataaattttgcaattctgagacaaatgttatgatgtttaacctgaaagctaattatagcaagaaggctgtatgttaccaaatgcttgtcactgagtgaagaaattagcatccatgggccctgattctgctccaggattatagcacgtatccacgggatcagttaacttccaaaattataagataccaacagcttttgagggcttc

SEQ ID NO: 28545 - DNA, 2685 bp, Bovine  19866881479007
  misc_feature (1)..(1): n is a, c, g, or t
nagtaggacacgacttaacaactaaacaacaacgacagcatctatgcttcttatatttccttcatctggagcttcctccttccactctgttgtctcaattcattcccatccttcaaggcccatgtccagtgtcatctattgcctacttctgctatacaggagaccactcttgacttcacagaggctagtgtttgggtctcttatcagtttgcttttggaccttctctgtaatgccttatcttccttgctgggtagtaatctccttgaaagcagggatgtgcatttctcttcttggattctctgctgcttaatgactagcacataggaggagcccagtaaattattgctgaatggaattggatgttatggagaaggctgtgttgtgtaagggaattgaactaggtgttctctaaggctagtttctgctgtaagagttcatgattcatttgaaaccatggttcagaggtttccaagttgcctagttttgcacttgattaaggattgtatggagaatgaaatcttccttcaatgccagtccaaggaacactttcattaaggaaatttggggtttgtattaatagatacattcaatgatggttttctgagagcaaatacaaatggtttcagattgtgtacagttttatgctatacaatatccacactttctttctgttccttcccctctccaattaatggggacaatcttataaaaggtcaaaattaggaaataaaagtaggattccagtactgccttcaattattccatttccacaactgtgcaagagtctcacacgtacatgtatttaatgatttaattttggcagcacacgtatgtatccatttctaatgccaagattgcttaatgcaagtatatattcaaagattgcttaatgaaatgtggttaagggaagttattcttagcaacaatttatacgggaagttgttcttagcaacaggttacatttatgcatgtatcagttagcttttgctagatgacaaataatcccaaaacatcatagcttaaaataatagtcactaatttaattcttaattctgtagtgtgcagtttggcctgggatagccaaaagtctggtctgggttggcttggccaagtccactgtgtatctgtgatcaactcatgggttggttgggcctggatgatttgatggctcagtagaggtggttgggaaaactgagttactctccagtttttctcctcctgcataggctagcctgggcttctttatatggtggcagcaggattccataagtgagaaaccaactgggtaaagcctcttcaggatcaggctctgaacttttcaacattgtccaaagcaatcacaagcccatgttcaaggggtagagaaattatctcctgctagaaggagaagcaaagttgtattttgcacaggccatagatacagcgagtggtgaagaactatggccatttttacagtctgtcaccatcagttagggggcttctggcctaagtaacagaaaattcagttccagttgcataaacaataaggatacattatctcacaaaataagaagtttggaggaaaagtgattacaggcttatttcagctccttagcaatgctatcatggatctaggcttttctatcaatcaactttcaactctgttgttcccaacatgttcatttttgtccacattttaacagtatgtccataacagtttcaggctttatttatagatgacaaaatccagagaagaatggaatgtgtctccttatagaaatgagaaaatctacccagaaaaggaatcttgcatctccttttagaaatgagaatctacccagaagcccttgtggtcttcctgttggatcccatcacatcatatccctgtgcctgaggattgaatagccctgcttatcaatcttatactaggagcttttgggcaggaaagatggggattagaggtggtgagctggggatacatttccctcaataattacagaaacttaggaatgttgaatggaggacaagtagttctacccagaaagtggttttggatttatcattctgctattcttaccattttcagtgattcctttcataataataatgacaacaatgacaacagcaaaaatagatggtaaacatatgtgcaagcataaaactaattcaattggtaggacgtctttgactcaaggcaatttcaagtaaattaaaacaaacaaaaaaatactcttgttaagtgagccttatttggactacttgtgtgtgcttcttgagccatgtaacacaaagtataattctttaaatcttagaggtcagtgataaaatctgattttcacagtcttaaacagtcagagtaaagggatgaaaaaaaacagccaccatctaggaaactttaaagcttttgtttacaaagtacatttgtccttaatttaattaagtcaaagaacatccattagttctcctgtctttaaaatttgacctggagtgacataaatggcaaatgcaagtatcgtttttctagaaagtcgtgagtaaaatatgcctctcctttaactatgctccataaataaaatgtcttgtaaaaaggctatcaccttagcaactgtcaactgaatcagctttatgaagacaaagtaaaactacaagtaaacctgcagataaggcctgaataatttttttttaccattaaagaaagtgaattt

SEQ ID NO: 28546 - DNA, 1035 bp, Bovine  19866881719870
  misc_feature (1)..(1): n is a, c, g, or t
ncaccactcactttgagagacttcattttcatcatgaggttgggccccttcggaggagccagagttcacactatgaatccggagggtggcccctgccttttccttcactgctgtcaatccatgacctgtcaggaaagaaaatacgactcatagatacaatagaagtccacggtctgcaggttccataactcatgtcccagagctcctgtaagctggaggagaatatcccagttgtgggagaatgtggtgagcccccgggcgtgggctccagtctgagctcagcttcatgtctgcctagctgggggactttcgagaagttctcaacctctctgtgactcagtttctccactacgctgttgtgaggagcaaatatgataaacacatgtaaagtgtttattttttcctcttatttctcacactatccaatgagcaacctggggttcccagcccaagatgttatctgtgaacgatattcctgtcttaccctctttcttcttttctaagtctctcagggtgagtatgcatcatttatgttttgattttttgcatgcctatcccattgtaggtgctcaattaccattgaactgaaatcagttgcgccttaacaagctctttcaaagtgctagtcatctgtttagtacagcctctgtgtgtgacagcccggtctggagatatgtccagatccaaaggcaagccggtgggaaaaccaggaagggcacactacagttgccctgacatttgtctttagcagtaaaacagtccaaacacaagaatagtcaggatgaggggcactgatcttactccatctttgtggggacaatgcctgtatttcctggagctcagcacagtgggtaatcaataatgatttagtgaatacagagctgaccttcccatctaccctcccactaatacacacacacacacacacacacacacacacactgcttggcttgatagaaaaatagttttgtctacattttattttggcacaatattttttttctctttagaggatcccatgattctcaaaccaaa

SEQ ID NO: 28547 - DNA, 1650 bp, Bovine  19866881754842
  misc_feature (1)..(1): n is a, c, g, or t
naataatttttccttgaccgtaaacacatcaaatagatcctgaatggaaagttagcttgcatcacatttaaggttaatattctaggaatggccacttgtgacttgatatccgagtttccaaaaatagggctaaccttctagggtttatattcattgtcttttgctgtatacaaaattacatcaaaacttagtagcttaagacaataataaacagttacctcatacagtttttgtgggcaaaggaattcaagcatagggctgattgaataactttgtgttacatcagctgctttcttccagatgagtgatccaagaaagcaagacagaacttgcaaatacttttataagctggtcatgaatgttacataaaatcctttcaaaatatttctattaattacacagatcagcccttgctcattgtggaaggggactgactatacaagagcatgaattccgggagagaatcatggaaggccatcttagagatggctaccacaatccatcctctgaattattcatggcttctcacatgcaaaatatactcacctcctttcgaggaccccaaactctcatttcatcatagcatcagcttaaagtccagactctcatctcatctaaagcaggtccaattccttgagtagagttaatcttgatttgaaggcctgtgagcttatatgcccatctctcatcctcccaaaatccagtttataatggtagcatatgagtgaaaaaactacagtgtggaaaggagagacctactagaatcacccctctctctctgtgaaagtcattcaattgtgtcaaactctttgtgaccccatggactatatgaaccgcacagtccatggaattctccaggccagaatactggggtggataaactttcctttctcaagggaatcttcccaacccagggattgaacccaggtctcccacactgcaggccaattctttgccagctgagccaccagagaagcccaagaatactggagtgggtagcttatttcttctccagtgaatcttcccaacccaggaattgaaccagggtctaccagtgtcactggtctgtgaaaattctgaaattcagcagggcattttttcataattccttgattgggagttaagttttggtaataattctctggctactgacttcaccctctgggctcacgtttttgccctctgaggcatcattcccttcccaaaaaggtttacagttcaatagctttctcagacttcttcctgcctataaagtttggggtccttttcttcattttatattatttttctctttttcagctcaagcaggagatggttttgccaatacagtactattctcttaaaactttttcaataatctataaatattattgatagtcattatattagtcaaaaccatgcccacaaaactctttgagataagcacttctatatcttaagcgtctatgaagaatacctggggacatcacccttaagcttgttagaagccctgttgtttgacccaacagttctctaagacactgacttagatctttctagatgttagcaaggattttacaggcacatccttgccttcatctctatatcaggctttcctgagaggccttggatttgatctttgctcagaagtcatttcaaattttagtgtca

SEQ ID NO: 28548 - DNA, 1363 bp, Bovine  19866882025986
  misc_feature (1)..(1): n is a, c, g, or t
naaaaaatagagcagatatatatcttttagtgggaatcgaggaagactttctccaaatgcacacagctagaagctaaagtcaaaaatgggagatgatcactttaacccatatgtttccctagagcaaaccacttcctttccaaacatgaatttctttatagattgttgaaactagttaaggctccatataaggatataaactgatgcctgtctttaccagatgccaaatctctgaaaggactatctccgaaacaaagtttttaactcctcaaagcaaattatgaatttaggggagaaatgaaaattttaaggtcaccattctgtattaagtatgagagaaagaggagtaaggcaggctgtggtttataataaaaaggaatgaaaataaaaagcaggctgcactaccctggacaaaggagaccctgtctatttccagttctgtcactgacaagctctgtgatgtgaccttgagagaaaccctcaacctctgggagattcaatttcgtcagctgtaaaatgagggcactgaccagatgatttctaagatttcttacagctcaaacatcctatgattttatgaaataaaatagatgttagaggttgtatatagcaggctactgaagcaggaaatgatctttttgcaaggatgttactggtagcttgtggaatcgaagagaaggctggagaaccaaactcaggatcaaggcagtttggagggggtgggtggatcctagggagtctaaaagcaggaatgatgcaatttaactgccagaatgaagaactcaaacaatattttccattctcatgtcactataaattcaaagtcctgagaaagtgggtcagattcatctagttcaggtcacatgtcaccccttggctgatgggcaagaaacctcgatttacatacagccttgccaagacatcgttcaatggacaagacataattcctacgaggaaagtggcataagatcacaaaagaaagataatgacaaccattcaactcttcactacaaacactgtgcctgtctttgtactatcacacactgataatcacctttctatgtagaaatagttgggctattttcacagtccatctgaaaatagacatatctttggaggaaatgatggccctatgacaaccctgtggacacccatcatgaaatgctggacgaggacacatgctgatgaagagccttgctgctgctaagtcacttcagtagtgtccgactctgtgcgaccccatagacggcagcccatcaggctccctcgtccctgggattctccagacaagaacactggagtgggttgccatttccttctccaatgcatgagctttagtgtgcctcaaaaggttgtcccgagg

SEQ ID NO: 28549 - DNA, 1010 bp, Bovine  19866880918231
  misc_feature (1)..(1): n is a, c, g, or t
ntttccaggcaagagtactggagtggggtgccactgctttctatcttaccaatttctttcataatgcttcttccataatataagatttatacatgtcagtttgataaatattaatttgcttggttttgatacctggtatgtctaccaagttcccttgggtcttctatttaacaggattaaaacttaaaatctctttgggtcttcaaagttcacttttattggattatttttaaaaataacaaagtatattattgatattaatttttatcataatccagccactcttgtgaacttcagtctagaaaaagtggtttctctgcacaaatgaaatatagttttaaatgttaacaatattttcatcagaaaagataacaactttatacagggcaggaaatgtactcattagctttataattataacatcttaattagaagcaaaagtaagaaggcatagcctacttttatttttcccataggatgctgttctttcagagaggctcttctgattgtattagcatatcctgtccggtatctaaaacccaggtcattacagagttttcttcatcttgggaaatgctcccctaggaaaaacactcccaggtggagaaatccgcggttagagccaaagcagtgtgattctgctcaagacggccttgagatggaacccattcatggattttagcatccatgaaattggaggaataagcataccttgaaaatggttttattttctttagcaagcagaatagtactttcgtgctttgctgcttcttgaaagtttttggatcttcaagtggcattaaaagctagagaacggaaaacaaaagctgcgagcaattgcccagctaatgtgtgcctcagatgcaaagtcgggaaaaagtggaacatcttcaaagagtgtaatcagtttgaaatgagtgataaaaatttgattatctaccagtgcaaatttgtgcagcaaattgctatcagccttgtactggcctaggaacctatttgctactttcaaa

SEQ ID NO: 28550 - DNA, 1490 bp, Bovine  19866881078092
  misc_feature (1)..(1): n is a, c, g, or t
ngagcgagaaaaagagaagcagcaaattgggatgccagaaatcatggtggtttttgctgacagcaaccaaagagagaagagaacatatgaatatattattttgaagatatttaggagaagaaaacttaggaaaaaactttatgagaaaaactagatttgctttcatatactagatgtaaaaaaaaagcaaacggcaggcaatacattttctggtctgaaacaaaattccttatagctgatgttatgtattatggtattctgtacactaagtgtcttaaatgattatttctttatttaactaaattgaggcatgtaattcaattataaaattgaaggagggagtggtaaagggaatgaaatattcattaagaatcatttcccatcaaccacttgttcatgcttagatcaaacagatctaataatttcttgttaaattcatcagttttcattagaagagtaattgtagttggtaaaaggtaatggttacagtgtattacacaattaacacagtgtgaaatgaaataaaatatgttctctatagagggttttctgcaaacactagatactggatttaggatatataaatgtaagattttgctaaacactatcattttgttaaatcaaatcaaggcctatttatatttcaattgaaaactcatgctgtcatttagacattacaaaagttgatgttttaacagattggttaaggctaagggaatgaaatttgatttttgtaaaagatcatgatgtctttataaagtgttagttcctcagttgggtcctactctttgtgactccatggactgtaacccaccacactcctctgtccatgcaatttttctggcaagaatactggagtggatagccattccctcctctaggggatcttcccaacccagggactgaacctgggtctcttgcactgcaggcaaattctttaccacctgagtcaccagggaagcatgctgtctgcataaaatgccagaggaaatagcttggactcatgttgataaacctattaggtcaaaatctaatgtgcatatttcaaccctgaaaaccccaaacagaaaatgtttattttctattttaattttttctatttatcaagacaaaatcatttataaaagtatataaagggtaataatattgagaataaaacatggtaattattattaaaaagaaaatatttgcaaaaagcttaagtgataaaagactgttaaccaaaatatacaaagaacacttaaaactcaacactattaaaacaacccaattaaaaaataggtcaaagactttaactgacaatggaatattattcaacactaaaattaaatgaatgaccaagccatgaaaagacatggatgaatcttaaatgcatattactaagtgaaagaaacaaatctaaaaaggttacctatagtacgcgaccaactatataacattctagaaagggggaaaagaaaactacagaaacatgaaaagatagtgcctgc

SEQ ID NO: 28551 - DNA, 2174 bp, Bovine  19866881119598
  misc_feature (1)..(1): n is a, c, g, or t
nacatgaatttgtaaatcataaaaatcaaatcataaatatgagcaggttcttacagaagactttttctaatatatggtataatcaaaagcaatataatagtatcacttggaaatatcccagtagaaaacaatcaaacaaaaggaactcagatagttatatataacggataaatttaaagtatatgtcaagctgaagttccaacagaatctggtaatcataatgcacaacattgattttcatccacagaaactgagaattcacttacacaaatgcttggaagcttaatactaaatataagatctgaataactgactatgacctgtctcccagaattctaacacctaaacttttgtcctttaagctatttcattattatatcacaaatgttcccttcaccttatactaagatctctttcctttgaaatacagatgctgatactcaaggatggtttggtttgattatgtcaatcttaatcatagcttaaatcccatctctcctttcctcttcagacactactggattataagctaaaaaaaaaaattgacattctatctctgttaacctttagagatgctcaagaaactattccttgtttgtgaaggcatctaattgctaatctataatccttttaatatgctctgccttttggattgatccattgccagctgacctaacactgcccatagctatattaatcctattactcacatcctattacagagtatcagtgaaactcttaatgaatcctgaaaagcttgcttgccagataccaatattaaggatgattacacatgtatttattcttttattcttaattataaagcttctgattgtattaattttattcagtgggattcagcgtttttcttctccacagctatctgggagctgacactaggttctgggaaatatcagtttctaaacgttattatcatacatattgttttgattcttcttaatgtaaataaatccacaagataatatattgttatgtattttgagattaaatcctgttgtaaggtaaagtatgttgcatatggtagaattattaaatagggtttattgaggtagataacatatcctagcaaaaagtctgcattttgtgttcctgatatattcacagtaccattaatcccctaataggatggataaatctgtcatggatgataagcctacatgttaagagaagtacattctctattgaattaatcaccccatacgaaagtggaaagtatcatcagcctgaaaaactatgatacctaaccatcaattttagtctgatgagtaatcacaagagaatagattttttttattgaaatgcattggcaataagattcattttatttaaaaaatctgaaaaagaaggtgtatagaaaaaacccactatcactgttgatgatgatataactgtgtctcaagaaagcataaatagatggagctttatggtgattcaaggtcctagagactggagcttgtggttagaagaggagtttggaagctgcagaatggaagcaagtgtctgtataataagagtcaagccagtgccaaggaaccatggatcctggaagtacttagaatcttgagaaacagttaaagaaatataacacacatgggtgtcattgcagcctccctctagaaattttaccatgtatgttttataatataaagccatcactgccctctaatatatatccattgtcccttcgccaaatcacaatgataccataaaaagcagatacatgactgccaacaaaggtccatagagtcaatgctatggtttttccagtagtcatgtatggatgtgagagttcgacataaagaagactgagtgtcaaagaactgatgttttcgaactgtagtgcaggaaaacactcttgagagccccttggacagcaaggaaaccaaaccggtcaatcctaaaggaaatcaacacggaatactcattggaaggactgatgctgaagctgaagctccagtactctggccacttgatgtgaacagctgattcagtggaaaagaccctgatgctgaaaaagattgaaggccgaaggagaaaagggcagcagagtatgagatggttggatagcatcactgattcaatggacatgaacttgggtaaactccaagaaaatagtggaggacagaggaatctggcatgctgcagtccatggg

SEQ ID NO: 28552 - DNA, 2061 bp, Bovine  19866881181355
  misc_feature (1)..(1): n is a, c, g, or t
ntatttcaaagggactttgaaagggcagatgggtgaagactgaagcatattttcttctaatcttgaatgttggatcacagggcagattagaccacataatgaaagtcacaggccactaatcaaatgataaaaaaataaaagatatttgctttctgacttactctcctttttgttaagagagaattaactcctaaatgaacattttgataaataaacccctgaatagtaagatttatctgtggaaaatatgttatgcagctgggacttaagctcttcttgccaatcacgccagggaagtctgttctagcattagcttctaaatcccatggcaaattaattgatacattgatataaatggttgtctagctatattggagggatttgggagatggacagtgaacagaatgatttgcctttaattggcaattgaaggctctgtttagtcaaaccagttactgagttcttgctttagaactctatagtatggggttccctgtagtacttctatcattttctatacgaaacatacttattcctatgtagcatgaagggaagatgagaatgagtgaatgttcttaatttgacttctttggttaacctttgagacttttcatatcccaatccccagtttgtgaccttaaatatgggatattaccttaacgtatttattcttctgtttattatgctgggattgtataccataattactttttaaaaataaagtttaatgtccaaaaataatgctttatacatacattggccccttttgctgtatgtaaatggagcatcgaagccctccactactactgtcatttccttagttgagtcgatatggtagaatcgggggaaatcagccacaatcttcaggcatcttggctttcttttaagaaaaaaaaaaataccttctaaacatcctactaaataaagatgttgtacaggaaaagtaaaaaacaactagctataattaattcaggagacctcaattatctctttatgttcattgatttttttggtgttcttgaacaactaacatgacaacaaaccgaaaatgtgtgtaatactgaatgccacaactgtttcccaggcttgagactgagactcctaagttgttttgactaggtaactaataacaatttagataggtctatacagatttagagacatgagatgcaaaaccatgagtgtcctccagcacattcttcttgtcagaaccgtttaaatcaccatcttacacaagtacatattgaaactcaactttaagcattttatttttatgtacatttcattttgtccagaaataaaatgtctaaatacagacagactgtaatgttgtatatgtataggtttcaacaatacttgagctgaataaatgctttgtacattaagtttgtctttttaatggagttcacagctacatcgatagaatggattcctcatatcctttttttttttattctttttaaaccaataacaagcagagagacaagtacaagttaatattaataagcagctcaaattacacttggttaaactatgtacaatacaaaccattcatacaaatgaagactaggatattgaatttgttacaatatgtttagtaaagataagacagacacttataacttacatggtgtctgtcaggcatttcccttcttatataatgatcagaacttgttttaagcagccttagctggtctcgactttgcaaaagtccaatgactggtgatgaaagctgtagtccagtgtctgcccacatgtaaattccaaatgtttgctcatctttactgagaacaggctccctccatagaaaaaagagctatcttggatcaccttgaatgtgcctactgaatgctggaaaaaattactacacttgttgtgttcataaaataaagaatactgagctctaaaaacacatttttttttccattttaacaagcattatactcctacagtagtatttaccagtacagctactccaagcagtagaaatgcatgagtggggactattgattagcatgtactcaagacattaaagagagatttccataacagcaagtgcta

SEQ ID NO: 28553 - DNA, 1783 bp, Bovine  19866881263320
  misc_feature (1)..(1): n is a, c, g, or t
nagaacttttctagtaaaaaaaaaagtagaaaaatagggacagtaaaagcaatgggaaaatactttatccctaaaattctaaatgcatgttacttttgaccaggcagtgtgttttgttttgttctagtaaaatgttaattttaaatactagtctaaaaaaagataaagatttgtccttcagcaaatgacctaaattactgctttaacttttttagaaagtatcttgctgtcaatagttttatttacagacttcctaagatataaattgaatgagttgggatagtatattattacacatctgttggtctattgcactgaatccagcttgattttgttttgttttttaatatatacaaactatatttcagaagtctttcaggatatgtattgatttccttaccaagtgtgtatgtgatctttgtctttgaattttacactatccttggaaaatatttctaaaattttgaacattaagtgagcaaactgtaggatgctatgagatttatacaacttaatgatatctataataagttactaataagacataacaaaattatgacaatgacaaacagtgaaagaataattactattataatagagggctgggaaattatgtgaacgaaaacattaaaggaagttggaaaaaaaagcctcagtgtatctgtgagtgaaagaaagaaaaagagatatcatacatttggatgtctggatttaaggtaatttctctgtattgctgctgctaagtcgcttcagtcgcgtccgactctgtgcgaccccatagacggcagcccaccaggctctgccgtccctgggattctccaggcaagaacactggagtgggttgccattgccttctccattgtgtgaaagtgaaaagtgaaagtgaagtcgctcagttgcgtccgacttgtagcgaccccatggactgcagcctaccaggctcctccatccatgggattttctaggcaagagtatttggagtggcttgccattgccttctccgatttctctgtattaaggacttccaaaaacctcagaatggccaaactgccgagtaaaattaacaacagtgccataaaagaggaatttgtgaaactcttggattatcttaaaaaaaaaatcatagaagactcattatttctattcaattcaaactgcacctcagttctctttctaccaaagctagtgactttaagtaactgtggacaatgtgcaagagtggggtatgtgcatttatttgcctacttcaatgtaactttgtactgttcatcacatctagttctagttctgtgataaacacatcaggaaagaagtagggctggcaggtggcagaatgtggacctggcatattccctgcataactggctcagtgtatacatttaccattctcctttacgattacatgcagctctacactataaaaagaaaagcagcctactgtttaaaatgcatttagggggctatgaaggtcacaattgaagtgtgaatttattttagttggtttgagtttcaattctaaatgcttttactttactgtgtaaaatctctctctcgtgctgttttgaaaattgcacctgtacagagaaaggtctcatttaattcaatattactttacttttatatatagtctttcttttaaatcatgttccaaaaggttgagttaaataatactgcttcaaagtgaaaattaaaatgtaaagccagggagagaaaaagcaagtgtccaccaaaatggtgaaacactaagatggataattttaatgtgcttatgcacaaagccatg

SEQ ID NO: 28554 - DNA, 1130 bp, Bovine  19866881343075
  misc_feature (1)..(1): n is a, c, g, or t
nattagcagagcttgagtgaacctgacaaaagttcacaaaaacaattcacttcagataatgagaaagaagttcaagtgtgagggaagcagaacgagattcagattatttaatattccttagttattgtatttaaaaaatacaatctggcctgctcctaaaatgtcagtgcacattttttgaaatttcactgcacatctagtcattacatagcttctttaaaccatttaatgctattgtgccggttctcaggattttcagatatttctgaagctacaaatgtagtggtgttaaagaattaggaaaaagcaaaagtgtaaaaaaaatagttttattatagttactttgggcttccctcgtggctcagtcagtaaagaatctgcttgcaatgcaggagacctgggtttgatccctgggttgggaagatcccctggaaaaggaaacaacaacccactccagtattcttgctgggggaaatctcatgcacagaggagcctggtagactacagtccatggggtcacatgagtcagacatgacttagcaacttcaccaccaccatagatatttttacaataatcaaaggtttaaaagtgataatatgttttaaaggaaggaatatgataccaaatgaatacatgagatgaacacatgagctgtttcctactcttaagtcagtgtttcacaattaagaagctggatgtgatggtggaaggatggatttttatgatataaggagaacatgagctacttgtaaagtaagaacttagtgaataaccttccagggagtgcattaacttatgtgcattgtagaggggcctgaacaagctggggtgacagcaatgcagacaagatgataatggcaaggacccacctttgatcaagtagccagtgcctagggagcaggttatcgttcttgttcagtcactaagtcaggtcctactctgggcgatcccatggactgtagcccgcaaagctcctctgtccatgggctttcccaggaaagaataagtattctttccttctgccctttccttctccagggaatcttcttagtccagggactaaacccgcgtctcctgttttggcagataaattcattaccagtgagccagatgtagcgaccaaatctga

SEQ ID NO: 28555 - DNA, 1471 bp, Bovine  19866880221381
  misc_feature (1)..(1): n is a, c, g, or t
naatgttgagctttacgccaactttttcactctcctctttcactttcatcaagaggctttttagttcttcttcactttctgccataaaggtaatgtcatctgcatatctgaggttattgatatttctcccggcaatcttgattctggcttgtgtttcttccagcccagtgtttgtcatgatgtactctgcatagaagttaaataagcagggtgacaatatacagccttgatgtactccttttcctatttggaaccagtctgttgttccatgtccagttctacctgttgcttcctgtcctgcatatagttttctcaagaggcagatcaggtagtctggtatatacctgtaatttatataatactgtacatcaactgtatcccaattaaaaaatgcattaattttaagaggaagaaaattatgttgaaacagcaggaatgctataatatttaagtattttgggaaaaaagagtccaaagtcatctcacttgaaaagcagtggatataatttctttttaattacatgtgactcacccttctcacggagaaggtaatggcaccccactccagtactttttcttggaaaatcccatggatggaggaggctggtgggctgccgtctatgaggtcgcacagagtcggacacgactgaagtgacttagcagagcagagcagaagataatcttcagaagtactgtttccttgaccaatctgaaaaatcctaggacagattcgataggcccagtttgggtcatgtgtccatccttgaaccagtctttggtgagggagatggagtattctgattggtcaggcccaaccctagcgctattgacaatgacgtcaactgcaaaggtcccataagcattttgcaactgctaaagtgtagtgcaaatgtaagtagcatttatcatctgctgatagtagattagaaactgtattagaagggaagacagtctgtcataagtaagctctacctaagagcaaagagaagtgggagccaatattagggaaactgataagaaaaacgattaaaatcctgtatgaaactttagacgtgcagtattctgagacatttgttgtacaaattgctttataatctttaccctattgttatcaattgagcaaatttttgtgtatgttgaaaaattagtgcttgcctatgtgtttaacttgtccatctacaatgacttttctcgaagtttccagatagttggtgatttaacagggactctgtcctagagaaaagtttatctcatggggaagattgtgtagatttattacatggcagtgtagaatcagaactaaatcaatcttttacacaataaactctacacaaaaatgaagttttcactcccactctcaaagacagaatattgaattgggtgggtctatgaaataggacaatactcatgttttcacgttaagcttgctggccagatctgctagctaaaaatatacccacttacctacgta

SEQ ID NO: 28556 - DNA, 862 bp, Bovine  19866880410867
  misc_feature (1)..(1): n is a, c, g, or t
natggtggccccctctgcagaggccatgcggcatctggatggacgtcattgtcacgggggcagagggctacactcagtttatgaactgactgaatggggccccctggacccaggagccatgcccagccgcctgctgccccgcctgcctccggacagggagttgcaccctgggctcccagaggccctggagggtggagcacgactggggcttttgtacaagaagagactctgtaatgttctggaaggagctcgtcctgtgggtttctgagctctggccccccctgaaaaaccagccaggagataaaagttgaggagggggctttgctgcctcctgggagcccggaacttgcaatagcctgttagggtcctgccccgggacccacccaggctgaggcgccgtcagagggggcccctcctggcacctgtgctccctgcctgtgttctcttttctaaaggacacattatggtaccagaatctgccaaagatcccctcttgcctcagcctccgttgcaggggccttgagggctgagtagcaccacatccagagtggggtaacagctcaggcggtgtaattctcaaaccctgctctatcccattcttgtgccgcatttgtattttttatgatttttgctcaaggaccagagactgagtgtcatccttgaggtcccagccctagcccctttttgcagacccatcaccacagtcaccatagtgactgcttcatcgccatggttacatactaattgccatggctgtggctcagcccactgcttcagctgtgggcccatctgagggtacgtgccatcatctctccagcccaggcccttgggcatctcctgctggggatgggggaagggacta

SEQ ID NO: 28557 - DNA, 1117 bp, Bovine  19866880446058
  misc_feature (1)..(1): n is a, c, g, or t
nacccccagaacagaaatcagctgaccccaagccatgtgatccacacagatcgccacctactgaagttgctcaaaagtctacttttgaaccctaacacaagaatgaaggtgggcagaaacggtctcctgagagatcaccatctccatcaatgccaaatggggctgagtgctgggcccctttctctttaagtgatgtgacatgaccagatattacttttagattagatggctgtgtggtgtctgttgaggcacacaggaagataaacatcaccttctgtaccgagaggagagcatatgaagaatcaggaggtaacctcgaagaaattctaagtgctggttcctgcccatgcagaagagcaatttaaagtcaagtgggtctctgcctacgcagccctgagcctcaatgcacccctatgtatcttggatctcagctggagatggagtcaagtttcccccacgatttagacaagtcgaggaaggtacagagcaggtgttcccaaatgcttaaggatccaccaaggatctttcagagtggagctactccagatctgtccagtccacttctgcagagacagagcccaggaatctgtcattttcagtaagttcccccagaggattctcttgaagccaggctgccactatttgggtctgaaaatcaggggactggatctgtcagcgtctatcgtaggagagtcagtatagggagtttcccaaagaaaatagttctgattatctcacattgaagaggaagaaggtgagagtcatattgaatatacttaaggttagacacaaagatatttgggtttggaaatgtattgttttgagtaagagtttaagataaataaacactttagatttcttggtagatgccagtcccaagaacacttggttttagtactttctgagcaagataaagtcaatgagggacttccctggtggtccagtggcaaagagtccatgctcctaatgcaggggcccaggttcaaaccctgcttaatgaaccagatcccacataccataactaagaggtcccataccacaactcaagatcctgcatgcctcaaaagaccaggccacagcttaactaattaatacttttttttaaagatacagtcaa

SEQ ID NO: 28558 - DNA, 1158 bp, Bovine  19866880488915
  misc_feature (1)..(1): n is a, c, g, or t
ntccccaaggtccccaaaccccaaagtgaaagcgtgaggggttgtggaaaaggcggggtgggggggcgctcagtataggcccgagaggtcgagggtgtcaaatgaggcacacctgagcgggctccactcaagtcaatcagcaccaggggatttaagaacgtgcctcccaggcctcagcctcagtctctcccgactctctcaccctgtgctggctggccctcctctcctaaccgtggacctgaaactgcagcacgtcgacttctgggccagcctccatggccaggtcccggggctgctggactgggacatggggaacgagtcctttctggccttcgccacgtcgcacctgcccttagccgaacagaaccgtgagtgtcctggacggggtcgtgggggatgggcgcgccgcgacggctgaggggggcgctcatgggcgcgccaggcccgaggctccggcgcttggacctcctccccgcccgccctcacgggccccgttacgatgttgcgattctggactccttgcccctttgctgcgcccctgccccgcccctacttttcccaagaggcgagggggccccatcctcgactggaagcccacggaaggcaggggcctgcccgaacactgcttttccaccctcgttcacgggcgccgtcgcaaaacttttaggtctcttttcagccttttctccgtggcgcccaggccgtttgggcccactactgatttcgatcatctttctctttaaaaagatttttaaaatcaattttgtctgtggccgtatccccctcttaatacattgtctgacacctagagccgctcagtatttgctgaatggatagttgaccgttgtctttaaatttttttttttttttagtttgggggttctcgggtgtttctcaggtattgagagttgaggtaattgcttactacattcttgatatatgactgccatctatttgggcagagtagttggattaactcattttcttccttcagtccccaccctctttcctcacttcccacactcccaatccatttaatgtctttatagacaaacgtatctttgaaaactgtttagcattattttgcttttataggtaaccttactatacataaatactctttgcgtccccccattcacattgtttttgagagtaatt

SEQ ID NO: 28559 - DNA, 1828 bp, Bovine  19866880503303
  misc_feature (1)..(1): n is a, c, g, or t
naactgcacagactaaaactatctaattgttgtcttaatgggcatttctctaatgattagctagattggattttttaaagtaatttgagtatatataaattgtccccattttcaattagttatttttttcttattgatagaatccttttacttttttataaagcaacttaaaagagagcttctcagaatggtgctgatgctaaaggggtgtataagtagtgttgctcactaaaaggcacatgcaagcctgtatctgcattttcctttgctgataaaatggttactctgaaagtctgggcaaaattctcaggtgcaagagttgcttcagtgtggtgaactgagcaaaagtgaagctcaatacaggaggtcaaaggttttgctagagtactaactgctggaggaaaacaggttagacctggtgacctggcaaagtcagtgtaaacaaactaagacaatgaggtgccaaaatagtaacagaagggcatgcacctgacttgttcccactgcaatgctcccaatcctagccagccttacgtgtttatggccagaaggatgagtgttcagttgctctgttcctataccattaaggtctcctctgaattccaagagtgacaagcgctgattaccaaaactttccccaaccacatacttaaaatttctcatttccttattttcccaattccacacttttcaatctcctaatccaagggttcccattctgagcctatattttagaaatctgggaaagttttcagagactgagactcagagctgcctctttccatcacgttaaaaggtcagcattacatgtatttcttctgtttcatctgtctctgtctactactcatctgtcttgctctcacttcctttttattcaatcctaatcagagagtaaggccatatgtacacagtagtatacatatctgaacacttctgaaataaacacaataaaggcaaagtataaacgtttctcctttcctaaaaataaaaacacatcttttttggagggaggagaaagggagcaatttctggcctgaaagtttgtgtatacgctcagaaaactaatatatttgggaaatagcatcctaattcttctagttcatatattacctatagggcggaagctagacttgatctttactttggtcccagatgaggaaaatcacttttctgattagtgagatattgtcctaatttttttcacatgaagggtaaggatcagattttcctacaagtctgttctaaaagcagtaagctatgaaagtgtaatgaaaaagcattttgcttgagataagactctgaagcactgggcttaagaacaaacctcatttctctataggctagaaggctctaagtcttcctttaacacacctgctgtctacagctgcatgtgacttgtttcccacacctacaactataacctgtttcttatgctaaaaaaaatttagcatctttgttaagaatctttcgctaggtgatttgtaaaacaagaaagcttgacagctttgggagcatgatgggcatctgttattccagaaccacctgttctctggtctttttaagccagggataggacaaggagaagtcccccaaaccaaacaaacaacaaatatgaacaaaatgccaacttctgccctaaatataaattccagttgcaattaaggacccaaaggatatttaatttgggaagaccccattctaggtcatctcatccactgctactggctcctccacttaccagactgctgcttcagctgctctttttggattgctgcaaactgtttggcatcagccaaggagccaaaaagagcagcaaaggggttacttg

SEQ ID NO: 28560 - DNA, 1248 bp, Bovine  19866880550465
  misc_feature (1)..(1): n is a, c, g, or t
nttgctgcctgtgggagcaattgttactataaattcttaatgaagaatctgattgttattgtgggggtttatattttcagaagcaccgataaaatgtaagatgtaaaaggaggacagaggcataaggtgtttgatgcctgacaacaactggacttatgaactgaggtgaatggaatttagtggattcttaaaagagactgacctggtgttttctaggttttatttggaaatgattctgaaattatgtcaattctttccttctacaattggatctagctgacataaaacgatacctgagtctcaatctacaagatgttgcaaacaaaaaaaaagcaattacttaaaacctgctaacaagtatggctctacatcagatgacccacttactgcctcagggcattcatgtggtagggctcctgtcttctctccacagagttacttactgatatccaataggaaagagcttatcctcacagtcagagagatcattcagaatccctaagcagtcaattgtcatggagcctgagtaaggaaagaagaactgattagaggtgactatgagaaggcccactttgtaactgaagacttaagtacctcaatgacacagccagcctccccgacaaccaaggcccatgtcctaccaatcatcatgtggatattttctggttctaatccattgagaaacttccttctcaagctgattccttcaaagtccacaaacactcttctaaaaacttcaaatccattctcaggaaccaccttaaatgaaaggccagggtagctgttaggctctccctttatacactattctcaggatattgactcagcgggaaagacaaggcgtatctctaaatcactcttctgtttcactagcagggcctttgataattctcccaagagaaggtgattctaggagcacctagtaggaaggtgtaatacagctcaccaccttgctattaatatcttcagcctcttttcccagagaactcaaaaagcaactaaagctcacctcgcctttgatcaaatcccgatgtcgttggcaatacacttttttatcatccagaaacacacagttcttggctcgggaacacatgaagtgatagttgctggtgcaggatgtaaggcagcaacccacagtggctcctggcttttggcagaattcacatctctaacaatccagaaagaacagagcctgagtcagacttttcagatgttttagccattctccatcttctctacagagtcacc

SEQ ID NO: 28561 - DNA, 1459 bp, Bovine  19866880592283
  misc_feature (1)..(1): n is a, c, g, or t
nagatagagacagaaaagtataaaatatatgggaagagcagggaatagctggactgcttcatgaaggcaagtgatgaactaagacccagaggtgcatggggccatattacatcgaatgccaagttgtttgtacttaatgggtttggtgtgatggaatctcacttaattttgaaggtacatttttgcagtctaattgttttactgttgtttgctatagaaaacagggagggggggaatcttttcccctgagtagtgagtgactagaacagtaggtaacaggtgtttggagaattcatatgagaaacacttagcctcaagttgtggtacagaaaagctgtacaattcagttagttaagatgatgacaaacagatctttgtaaagagcagcacttttttatttttttacaaaatgagctagacactggccttttatgagaaaacctgccaatctttagattgttttttaaaatggtcatgtagtagttgcatgcttatattgacacatcaaggttaaaatgaccacaaacttaggctctaatataattcagtgtagtggcacacttacatttagtaattctaccatttgggaggtctagcaggaatatgatgagacttctgacaccattttggatgtttttggttaacctcctagtgataggagctgcagctccctaaaatgtgagacatttctgtttggagctgtggccttttatgcctccatttgtaagttatttccccctacttctctgctgatcagagaaacagtctgttgtttgatacgctctatttaaacgagactgaactccttgataatacagactggcagcttgaatttttttgaggggaattttaaagtagtataattgggaatagaagcttagttgatttctgtttttttattagaatccttttctgccaattttagaagtaggtgatttctatgtattgatatggcatatcagctggggataactagagttgtatgtgttgactctagactataataagttaatcaactataccttggcttcattcaattttgttttcaacacagatggttgttattgtttgttctgggcttgcctccctctcagggtcaagaaagtgactcctcggagacctctgtgcgaggaccccggattaaacatgtctgcagaagagctgctgttgcccttggccgaaaacgagctgtgtttcctgatgacatgcccaccctgagtgccttaccatgggaagaacgagaaaagattttgtcttccatgggaaatgatggtaggttggggatgaccttgggtttgtgtgctgatcatcctgcgggtacgtagtgggctctgcacagcattgtatattaggctgggccccccaggaaccagatgtcaatgggaggattgaccaggtaaagatcttattagaggaaatgcctgaaatacagggagggagttgggaaagcttgggggag

SEQ ID NO: 28562 - DNA, 1312 bp, Bovine  19866880613609
  misc_feature (1)..(1): n is a, c, g, or t
naaaaaataggttaaatagagaggattattaaagtcaaagaggaaactgagctactagttataacaacaaaagtagcacttaaacatgacaaaaatttcccataaatctctaggctggttgactagttctcattcagcatgagcataaagtggtgcttgtgcttgctcaggcttctgtgacttaagggttggagccaggaactcctcaggtacacagaaactaaatggaagcctatatgtcagaagtggaattgcaaaccaggataggaatcagattaggagcataccatgggttttaaatctatattaagcaatccatctctacctcctggcttatgactactgatgtttcttcctccaagaactaaatggtctttgcttaattctacatttaaccttccctgtttatatggttttgacaatactgaagaaacacaattcctgctgtgtaatatgaaatagatatatacctcaaaggtatttagaggagctgactgagcctgcatttgcactcttctgataaaatttcctcatccaagcgccaaggggactcaggggtataatgggatgagcagagctccctgaaaggctttctccccttttgaaattttaagcccacagcatagaaatacaaccctgaaaagggtgagaagagacaaagggtatgaatattctgctcacgaggatgctgaactgctacaaggacagaggttcttagaaggagtggggtcagggatacaaggcaggaggcaaaaagaacacttggtttacctttaattgaggtaagattccttacggaatcacactaacaaaagctaatacaagttgaaaagttactcttttttggagagagactataacactttttttttgggacagtgctgaggcatctctacctgttgcttcgtgctcctctgttgagctttctgcctaaaagctaatggttactgagctgtaatgacagtctagtctcgtctcagcatgctgctggtcttgactacttcaaagaactcaaaggttagatgttgctctatatattttactttttattatgtatagtttagttgagcttaatcatgcaaaaaagaaagacagcataacattggagttaacaatccttgcgaggtctttccttccctttaaacactgcagtgttgttcagtcgctaggttgtgtctgactctgtgactccagggactgcagcacaccaggcttccctgttcatcactatctcccggtgtttgctcaaactcatgtccattgattccgtgatgccatccatccagatcgtcctctgttgcccccttatcct

SEQ ID NO: 28563 - DNA, 860 bp, Bovine  19866880623444
  misc_feature (1)..(1): n is a, c, g, or t
ntaatattagcttcaagagcttccacccttccaaatgacccaatatccaaagtatcttgcaaggtattataattttagtacttatattcatgctatattttaagccaagcttggtaaagaggaattaaatgtaagtttcatgaaggaagagacttattcagggctaatgccccaacacttggttatctgcccggtacataagacattcttagaaaaatagctaagatagctaagttgctatctcttactttgtagagtgctatgtttatgaatgccactggggggaagataagcctctttacaagctgttcatcatttgtaaaagaaaactatatagtgacacttgtaaattatttccaaatgtgagtgtaacaataatttgactgaatttataagaaaaagagtataaaatattcaagcatagtcaaatacacaaatatcaggagataaacttcttaagccaagatggtttctgaaatccaaccagctgagagatgtatacagttattgaactgacatcatcatctctcgtcaacaaactggcagtggcagggccaaggccagattctctctggctcttggtgcatcaaagagaactatggctgtttgaatgtgtaacacaaaggaagagatttcaactgttttaaatatgttctctatctgatactgaacccccaaaagtcacctaggattaaagagtgcaaagacagtaatacactgtccctcagtaacgacagttggttaagttttcacctacgcaggaatgaaaccgttttcaaatatttaattcaattctacctagcactgttacctacaaaacacaaatgctacccacttgtaattagagaaagaactgtctc

SEQ ID NO: 28564 - DNA, 1028 bp, Bovine  19866880626230
  misc_feature (1)..(1): n is a, c, g, or t
nttttcaaatgagtcagctcttctcatcaggtggccaaagtattggagtttcagcttcagcatcagtccttccaatgaacactccaggactaatctcctttaggatggactggttggatctccttgcagtccaagggactctcaagagtcttctcccaacaccatagttcaaaagcatcaattcttcagcactcagctttctttatagtccaactctcacatctatacatgactactggaaaaaccatagccttgactatgacctttgttggcaaagtaatgtctctgctttttaatatgctgtctaagttggtcataatttttcttccaaggagtaagtgtcttttaatttcatggctgcaatcaccatctgcagtgattttggaaccccccaaatagtctgccactgttttcactgtttctccatctatttgccatgaagtgatgggaccggatgccatgatctttgttttctgaacaaaaattgttttgtcaataaggagttttaaacccttttatgctgatgctgataatctgtgataggtattctttacctccctctttggaacactcaaagagtgttccagctgtgtaaatcaattagtaaacagatattgtttactaatatctgtatttcccactagctggtaaattcctgccctaatcccactgtatcattttgctaaacacagtgactaagggcatgtagtaggtgtgcaacaagtattcattgaatgaatgcctgaaccaggaagtgatttagtgtcctctctgggaaattgcttttcaaaattgggcaatgcagtttgtaaaagcctgggctcctaagtggggaggataccaagtaagaaaagaacgaggaaaggctagagtcttgcaaaagagagaaagatgatattgtattgtagggcctgcccaacctaccatcaggtgtaatgaggtgttttttggcgattaggtatgtgatcaccaatctgaagcagtgttgttttaattcagtgtatattcatgagtacaaatcacacatc

SEQ ID NO: 28565 - DNA, 697 bp, Bovine  19866880711375
  misc_feature (1)..(1): n is a, c, g, or t
ntactgagagtaagatgatgcagtgtgggaaatgtgatcgatgggtccattccaaatgtgagaatctttcaggtacagaaggttggagtcttttttattacaatttccttctttcttggtacactgcactagtagccccaaagtactataaatataacactgcataacattacagtagtgctgttacttgaagtctttttaagtttattttttggtctctaaaataagatcattgtattacattgtgttcatttaccttgaacacattctttaaaatacttaaatgttgtcctttgtggataccataacctgttggctctccagtagctgaatcctgagttagtggtaatactgtccctttggagatcagtacataggagttcttagggggtgtgagagacttaacgtttctaacatacagcctgatgttaagttcagtggaataacttcctcttttccccctcttccactctgagagcaccttgtcacagtaggtttttgtctccccagatgagatgtatgagattctgtctaatctgccagagagtgtggcctacacgtgtgtgaactgcacagagcggcaccctgcggagtggcgactggcccttgagaaagagctccagatctcgctgaagcaagtactgacagccttggtgaactctcggaccaccagccacctgctgcgctaccgacaggt

SEQ ID NO: 28566 - DNA, 818 bp, Bovine  19866880747280
  misc_feature (1)..(1): n is a, c, g, or t
ntttgggaagaaagggcaaggcaagcaaggggctgtggtgggaacatagtggtctctgctttgcaccagttaagccggagattgctcaggttggggccaagtaccaggaagctcagggcccgggccttctggtcatcctctttgccctcgtgcgtgccaacccgcctgccaacgtgacctggatcgaccaggatgggccagtgactgtcaacacctcagacttcctggtgctggatgcccagaactacccctggctcaccaaccacaccgtgcagctgcagctccgcagcctgccacacaacctctcagtggtggccacaaacgacgtgggtgtcaccagttcctcgcttccagccccaggtgagcactgccagccacgggcccagcagagcctcaggtgggtgtagggtcatggtacagaaatgggaagacttgtcttttgggtaagttctcatgaaagctgtccccagccaccttgggcaaagaggacagagtagggacctgtggtgtctccaagtcaggggtcatgcccacttggaactaaccagaggaccacctgcagggctcctggccacccgggtggaagtgccactgctgggcatcgttgtggctggagggcttgccctaggcaccctggtggggttcagcactttggtggcctgcctggtctgcaggaaagagaagaagaccaaaggtaaggccaaagcaaggcaggtacagaggatgctgggagcatggagatgaggtcaggggtgggggggagggcacgggcaggactggagctgggcaggtctctaacaagtggtaggacaggtctt

SEQ ID NO: 28567 - DNA, 1745 bp, Bovine  19866880763324
  misc_feature (1)..(1): n is a, c, g, or t
ntgtctcttcctgctggctttattctgtgtttgatctgattatttcatcaaatccttttcagatttccatttgatttcagtggactttgaagatgggtcaccgctctcattcagatgaaattggttggagagaattttgttttcaaagtaagggttttcattaaagtaaaaatctattctgaagcctgattgaatgttttcaaattctgtcactttgacccttgtcaaataatgtagtgcgtcttcatcctcctccccaagctgtgcagacacttgtgggtggttatcaaatattgttaccccaaattttgggatttttgccatcaattctgacctcttttgaaaaaatggttggtgaattttgttatatttctattctacttttaaaatctcctcactggcttgttcattaagtctatctcattttgcacttcatcaatatgttcaattgcttcttgctattctttttcttccttcagcaaagttgaagaagcacatgcctcgtctggcctggaggcaggagttggcctcgctttctttggtttcttcacttggggtggaagtgaagactggtgtttggtggccatgctggggaaaaaaaaaaaaaaaaaaaagaagccaagaatcctcccaggggaggagagcagtactgcaaactcagagaactcagacttttttatttttaagttttattttgaaatatagattaagagaagttgcaaaacagtatcaagcgctcttgtgtaatcttcagtctttttcccacaaagattacattttcatataatgatagtccaatatttaaatgaagaaactgacattgctacgatgtatgtgtgcaattccatgccattttatcacatatgtagattcctgcaactgtcactgcaatcaagatccatcaatattccatcaccacaaagatttccctcatgccaccccagcatccctaaaccttggcaggtctaaaactcaggattttattcttcaacaaagctcaacagagttgagattcatatttggtggtgaaagaaaatattcctgatatgtttttaaagataagaaaaatatatccctcaaattttctggaagtctgtgtgatggaattatgataattttgtttgtttgcatttttaaacttttactgttttctatgtgactatgattatcagttctgctagagctgccacaacaaaatatagaatgagtgtctcaaagagctgaaatttattttctcacaattctggggctggatgtccaagatcaagtgctggaagggttggtttctgatgaaagcaagccctctctgggcttgtacctggccctgttctcattgtgtcctcatatgaccctttcccatctatgtggaaaggcagtgatcactggtgtcctctagttctaaaagtaaagctcttcatgctccatctcttggacatgacaacacccggtgtcctattccctcactcttcccttggcctccattcccctgataaagtgcttctgtgctgctctgtagtgtcactgacacccccaaatctccatactgttgtccatagtggctgtaccagtttacattcccaccaacatgtagggaggggtccctttcccccacatcttctccagcacttgttgtttgtagaattttggtgatggccatcctgaccagtgtgaggtgatacttctttacagttttgatttgcatgtctctaataatcagtgatgttgagcatcattcatatcctttt

SEQ ID NO: 28568 - DNA, 4904 bp, Bovine  19866880763642
  misc_feature (1)..(1): n is a, c, g, or t
naaccatcatgcaatctgcaaagagtaacagttttacttctttctgtccaatttggctgtctttttttccttgtctaattgttgtggctcagatttctatgttgaataaaagtggcaagagtaggcatccttgtcttgttcctgattttacagaaaaaagcttttagtcattaatcactgactatgatgtttgctctggcataccagacaggataaaacacacctctcaacagtgtgggtatagaggaagcataccttaacatatagagaccatatatgaggttttactggagaaggaaatggcaacccactccaatattcttgtctggagaatcccacggacagaggagtctggtgggctatagtccatggggttgcaaaagagtcagacatgactgggtgactaacacacacatgagattttatatatatatatatatatatatatctcactctattttaagctgatcatcacaaggttgaatgccttctaacactacactccacattttccacctttgacatcacattttacatcatttgtttgtgtatcttcttccaaatttttgtagttttcgttgatttgactacgtttgtcttttaacctttacagtagccttgtaagtggttgatttcactacttctactatatgtttgcttttaccaatgtggtttttcctttcatgtattttcttatctctggctataaatttttcttttctgcttgaagaagtctctgtagcttttcttgtttggcccgtttaggtagtggcatactcctttagattttgcttgtctgtaagactctctttccttccactctgagcgataatcttgccaggtaaagtattcttgattgtaagtttttgtttttgtttttgttttccatcagcactttgataaagttccatgccattctcgcctgtatatagtttctgctgaaaaatcagctctctctcttttttttaaatggggtccccttgtatgtaactagtttttttctcattgtgcctttaagattctctatctttaacttttgacattttaattataatgtttggttgcatgagcctctttgggcttatcgatttgagactgtctttcctgtactcagttcagtgcagttgttcagtctcgtccagcactttgtgaccccacggacttacagcacgccagccttccctatccatcaccatctcccagagcttgctcagactcacatccttcgagtcggcgatgccatccaaccatctcatcctctgtcgtctccttctcctcctgccttcaatctttcccagcatcagggtctttcccaaagagtcagttctttgcatcaggaggccaaagttcctgtattcagatatctgttttcttcactaggttagggaaattttcaggtaacattaatatttcttcaaatacattttgtccctctcttctggtgtctctgtagtacagttgtgagtatcttgagatccattaaactgtccttatttttctaaatttttttttttttctttttgatgtgacaaatgggtaattttctagacccatattcctggttcattcatcttatttttagtgacttacttatttgtttgttttggctgggtctttgttgctgcctgggttttgctccgctgcagtgagtgggggccacctctagttgcggcacactggcttctctctgcagcggcatctcggttgcacagctcaggctctagggtgagagggcgtccgtggccgcagcatggggactgagtagctgtggctcctgggctcccaggccctggctcagtagttgtggcacattggctgagttactgcgcttccttcttctgaatcatctaatccgctgttgactcattctactgtatgtttcatttccattattgtattctgaagttccagttggttcttttttatattttctacctttttgttgatgttctcactgtgttcatctgttcttctaatgagttcagtgagcatctttatcactgtgactttgaattgtttttcagataaacttatctgaataatttttgccttcattccacggtttatttctgagactttgtcttattctcttctttggaacatattctgttgtctcctcatttaccctaactttctgtgtctgtttctatgtgttaggtggatcacctatgtctcctggtcttgaaggaatggccttatgcagaaggtttcttgtggggcctgaaaaagcaatgctgcctctttatctttgattatttgtagtttgaaagtgatatgcaaaggtgtattttgttttgttttgggtttttttggcatatatcctgcttcatgttctgtgagcttcttggatctgtggtttggtgtctgacctttatttgggaacttctcagtcattattgtttccaatatttctcttcttcctgtccctcttctctttgaatattcccattatgtgtatattgcccattttatagttgcttcacagcccttagatattctgccttatatcagtctgtgctctctttttaatttttgaggattctgttgacacagcctctagaccagagtttctgccctcagctgtgtctggtgtactactaagcccatcaaaggacttcttttttacggcagttctgatcaccagcgtttctttttggttctttcttagagtttctgtgtcctgctcacatcgaccatctgttcttgcacgttgtctactttacccatcagtgcccttggcattttaatcctagttattttaaattcccgctctgataattccaacatccttgccatgtctggctccactgcttgctctctcttgttttctgttttgggggacagcaagtaatttcttcttgacagacagacatggtgcactaggtaaaaggagctgctctaagtagccttttggttacgaggtcggggggggtgcgctgccagccctgtgattagctctccgtcttctagtgagcctatgctgtgagctgtacgcttcacaagagtttctcagtttgtttttttcctcatagtttaggtgggacaggagggctagaatggggtggggttgggtatttcccttttgcaggtagttgggtctgatcacccctcagcaggacaggctttggttgactagcttccactgcgtgtgctgctcagtcgcttcagtcgtgtgcgactctgtgcaaccctatggtgccaggctcctctgtcatgggattctccaggcaaggatactggagggggttgccatgccctcctccaggggatcttccagacccagggatcaaatctgagtctcctgcttctcctgcattgcaggcagattctttcccggtgagccaccaatggggaggcagacttgttagaaaacagtcctctggcaaattccagaatggtttcttttctcctccccctactggaaacacaagggaatttttctctgctctttactgtgggaagctggtcgagctcctgggggtaaatctcacagtattgtgggggtctgcctgtgactgggtcccttggagattttaactctcaaagagtcatctgagtaatttgtcaattacgtttccattttttctaaccctgcactgctgcagtggctcccactcatctctgccctcctgagctggtaatctatgcatttgcctgtctgatccctccagtcttggggagagtgttttttcctgtgtcctcttctctcttgaagatccaaaaagagttgctaatttttaagtctggtcagctttttacttattaagaaagagaggccttatatgtgtagccaaaaaccttctgcttctctttggcacagcagtattttggcattgtgtgtgaaggtcctgtgatggtaagattaaatcttatattcctataaatactccttattgttttgctctgaagtttttttagggattatattcttccagtctgtccctttctatcttcccagatcatggctctaaggttaaaaaagtttcccaattgaatcaaagaggccattcctctttttctcccactctagcaatttgtggttaaacctactgtacatataacattgcactgttcattgtgaattgtgaattctgccacaatgtaatctactggttgcttttataggtcttccattgttttgaaaaagtacaaataaatgaaagtttagcattatttaaaaccatatttgagcccataaaaacatgttttgtaaatataattaattctaatgaacactgtccccataatcaaactggaaaaaaaaaattcccgattataaaaattcagcacttacttttcttccaattgttgattgctatttgagtctgtctgacttgattgtttatgttgttcataacttgtattttataaaattattggttataattgctagcctaaaggcagggatacagtgtaaataagtcataagtcaaagaaatgctatagaaaatgaaaatatagtagctgaaatagctcagttgggagagcgttatactggaggaaatgaaaatatgcaaaaacgtgataaggcattaattgttagtttctgtaataaatcaaggcacaaatggtattgttgaatctttgttgactgaatatattcttgaattattttttcaggaatgattatattcacatcttaactctgtaaggtttagacccaagtaatgttataatcacaaagactttctagaatatattagctcacatttgcctctttctgtgattcctactgaaatcagagggtggatcacacagctgaaagtgttattatgtaatgtcttgcacgttagttgcaattggttgtccaaatgaagtttaaaatctttaaatcacacttcatcattttctctaggggagaatggagcataatttcaataaataataattatcttgatgcctat

SEQ ID NO: 28569 - DNA, 1805 bp, Bovine  19866880786166
  misc_feature (1)..(1): n is a, c, g, or t
nttttttttcttatggtaagaacttttaagatctactttcttagcaacgttcaaacactcatgtaatacagtattgttaactacagtcaccatgctgttcactgcatccttatgactgttttattaccggaagtttgtaccttttggaagtcttcacccattttgtcacccccaacccctgcctctggcaagcccaaatctagtctgcctggttttttttttctttttaaatattccaatataagtgagatcatatggtatttgtctttctctgacttatttgcctcacacaatgcccttaaggcccatctactgtccacctgaataatgctgcaatgaacatgggggtgcatatatcttctccaattagtgtttctgttttctttggataaatacccagaggtagaattgctagatcatatggtagctttatatttaatctttttaggaacctccatgccgatattttccacagtggctgaaccaacttaaaatcccaccaacagtgcacaagggtaccctcttctccacatccttgccaacacattatttcttgtctttttgataataaccattctaacaagcatgtgtggttttgatttacattgccccaattaatgatgttgagcactttttcatgcagatgttgaccatctatatgtcatctttggaaaaacgttcattcagatcctctgcccatttttaaattggattgtttggcggtttttgccattgagttgtatcaggaaacatcttaagtacagaattctgaaatccctggttataaaatctaccatatttcaaaaactaagttttattttttctactcataattaattgtattccataatgccaaaagtagcaacactatcttccctaaagaatcctagtgagcaaagaattatctaatagatcaataagcctttacttatattaaatatatggtttttccctgattttaagagaacacgtttttcttatttttaaatttttatttatctatttttggctgtgatgcttggcttgtgggatcttagttccctcaccagggatcaaacgtaggtccttggcagtgaaagcagagatataaccactggactgccaggaaattcccttgccttttaaacttaatcagcaccaacacctctctgttaggtcatttataagccaacctcattcttttcaatagctgccctgtattacactgaatgcatacaatgtgatctatgtagcgacttctcaactgatggacatttgtattgtttccaatttcccatgatttcaaacaacactataccacatataacttattatttttgtgcacctgtataagtacttctgtaggataaattcacagaagtagaactgctggattaaaaagcctgaatatttaaaagttaacatatatgtattaccaaattactttaagagagactactctgggacttccctggtgctctagtggctgagatgctcccaatgcagggggccagggtttaatccctggttagtgaactagatcccacatttgttgtttttgtttagtccctaagtcacgtctgactctttgtgacccccaaggatggtagcctgtcaggctcctctgtccatgggatttcccaggtaagaatactggagtaggttgccatttccttctccaggagatcccacatgccacagctaaagatcctgtgcagctggacctcatgcagcaaaaaagaaaaccaaaaccactacaatttacatggctacgagtatatggggcttcaccagtactcagggtaaaaaatccacctgcaaagcat

SEQ ID NO: 28570 - DNA, 1833 bp, Bovine  19866880801445
  misc_feature (1)..(1): n is a, c, g, or t
nccactcagctcccacctccccaactgttaggtgagccagaatggggttattaaaatccaggcctgctacacccctggcactgcgattaacttttcatgtctcttccacctcccaggttaccccaccccaggaggagagaagctccagggagcccgccgctgtccccccgcggccactgcccccctgccccagccaagccaatgcacccagaaaataagttgaccaatcatggcaagacagggaatggcggggcccaatctcagcaccagaatgtgaaccaaggacccacctgcaacctgggctcgaagggcgtgggggcggggaaccatggggccaaggccaaccagatctcacctagcaactcaagtctgaagaacccccaggcaggggtaccccctttcagctcgctcaagggcaaggtgaagagggaacggagcgtgtctgtggactccggagagcagcgagaggctgggaccccatccctggattcagaggccaaaggtaccacatttcctgatccctaagaccccagcatcgtccatcgtcctagacacacagaggctgggagagcatctttctgcacccctggcctaatcctcacttgccattcctctccggcacttatgcaggggcagcctctttcgctatcctccccacccccattatgcccattctcacccatctgctcattctcaggactgggtggagatgtctcatccttagggccacacagggtgatggggcctctcctcaggcctctcttgctttcccaccatagcccccagagggggaacaggaggtgctctggggtgaggcgcagacccacacacctcccaggaacctcctggtgttccagctggtgggagcaggcactggggcctggaagagtagcagcagcttcccccctcccccccccccagccctaattagaaccagttgtggttggggattacgttgggcttggtgctgggtgggggaggggagacaggcagcagggctgtagagagaaatcagaaacaaatggtgttgtggtgggggtcaagggctggcaaagtgcccactgtggcctgggcagtgccccctgggcactgggcactggggcatctgggggaatgggcttggggaggccccaggtgtgggaggacgggccctcctggggactcgctcactcactctgacccctgcctgcctgcctgggcagaggtggcaccccggagtaagcggcgctgtgtgctggagcggaagcagccgtacagcggggacgaatggtgctcaggcccagacagcgaggaggacgacaagccccttggggccgcccacagtgagtgcccatgctgccaggatgctgtgcctcatggtgtccctggggaacagttgccctgagggagcctcctctcttcacctagggctttcaaggacccaggctgggccaaaaggagcaagggatcaggagcctgggctcctcctctcccatctcccatttctgactcagtccctcccggcactgacagttcaatccctgccttccaggtgctcagtagccccctgtccttagggacctgggtggggtaggtggaaccttagatggcctctcaagccacactgggaggcctcctcccgtgaattcctggcctctgctgccacctactggtcagtagaggaagggcagtgagggttcagcatccctgggagctggacagctggctggaccctgcaaaactgtgcggaagaagcctgggtgtgagctgacattgactgtgtctctggtgcccttccctaacctctaattgatttctggagtgcatcaccaagacgaagagtgagtgtgggtg

SEQ ID NO: 28571 - DNA, 1258 bp, Bovine  19866880825063
  misc_feature (1)..(1): n is a, c, g, or t
natgacagcagtgaccggagaagcagaaggtattcggtgtcggagagaagtttcggatccagaaccacgaaaaaattatccactctgcaaagtgccccccagcagcagacctcttcctcgccccctccacccctgctgacaccaccgcccccactgcagccagcctccagtatctctgaccacacaccttggctcatgcctccaaccatccccttggcatcaccatttttgcctacttccgccgctcccatgcaagggaagcgaaaatctattttgcgggaaccgacgtttaggtggacttctctaaagcactctaggtcagagccacagtacttttcctcagcaaagtatgccaaagaaggtcttattcgcaaaccaatctttgataatttccgcccccctccactcactcctgaggatgtcggcttcgcgtccgggttttctacgtctggtcctgctgcttcagcccgattgttttcacctctccattctggaacaaggttcgatatgcacaaaaggagcccgcttctgagagcgccgaggtttactccgagtgaggctcactctaggatatttgagtctgtaaccttgcctagtaatcgaacttctgctggcacatcttcttcaggagtatctaacaggaaaaggaaaagaaaggtgtttagccctattcgatccgaaccaagatctccttctcactctatgaggacaagaagtggaaggcttagcacttctgagctgtcacctctcaccccaccgtcttctgtctcctcctcattaagcatttctgttggtcctcttgccactagtgccttaaacccaacttttacttttccttctcattccctgactcagtctggggaatctgcagagaaaaaccagagaccaaggaagcagaccagtgctccagcagagccattttcatccagtagtcccactcctctcttcccttggttcaccccaggctcccagactgaacgagggagaaataaagacaaggcccccgaggagctgtccaaagagcgagatgctgacaagagtgtggagaaggacaagagtagagagagagaccgggagagagaaaaggagaataagcgggagtccaagaaagagaaaaggaaaaagggatcagaaattcagagtagctcggctttgtatcctatgggtagagtttccaaagagaaggctgttggtgaagatgtggccacttcatcttctgccaaaaaagcaaccgggcggaagaagtcttcatcactcg

SEQ ID NO: 28572 - DNA, 743 bp, Bovine  19866880839913
  misc_feature (1)..(1): n is a, c, g, or t
ntttgtcctcaaggggacactggccggctgtgtggattcccctggctcaaagggcagggagatgggacagaggggtttggatctgtggggtagggtgtcccctcctaggtccttacagtgagaaagggagagacacggctgctttgggggtgtggggtgaggccggggagctggaggtcctcccctcacggtcctccttgcagctcccctgccaaggccgaggcagggacccaagcggggctcgcacccttcttcccttccctgcgggcatgcgcacccagtctggagtagaagctgctcatgagcccctccgcctggcacaagaaggcattgaggtcaaccggcaccagcttgctggttcggatgctgctgagcgaactggggttcgggccgcccacgagccagcgtgaggagaagtcccagccagactcggcgctggccttgagctcggccagcagagtgtcccggttccctgtgaggagagggcagcgacagacagcaggctggggcctgacgcacggcccaggcccacgctcagcccctcccttcctgctgctcaccttccagcaaggtggcggccagctctgcgtctttgctgtaagactctggcctggtgggaggagagtgggggggggcgtggcactgcggctctaaaccctccatgctcttgcaggaggcccagccacgctggctcagctgtcctggggccccagacggcccagggctatcagctcatcatctga

SEQ ID NO: 28573 - DNA, 1154 bp, Bovine  19866880852265
  misc_feature (1)..(1): n is a, c, g, or t
naacattcctactctcttggtctaaaaatgtcttttagcttctgtctatagcaatgcagttaaatctttttagcttggtcatgaaatcaccaaatattaaaaggaatgatagacagcactgtagatttttccaggagataggtaatcatttgttactattttgtgcttttttgtatataagattatttgcttttgagcatgtgttatttttataattagaagagctaaaaaactgggaggaagtacataataattaagagtgattcattctcagtggtagaactaagagtggtttatttccttcttttcacttctctgtattatttgagttttctccaatttggcttcaacattctttctccccaggcttatttcctgccagtttccataccccttcccccagctaccccatgttctagccatgtggagcttcccactgttcttagttgtttcacagctctgtaccttcacagttatttcctctataaaagggattcctttgcttgataaacccaacacatttttcaagactcaactatgaagacctccaccttctgcagaattcatcatttactcccttctctggattcctagccctagaccgtattatgatgatctgttaacatatctgcctccttttggagcctttgagttcaaaaaggacagggactgtcctttattcattttcctaagaatgaatgaatgagtgaatatccaagtctgccaaattcagagagaaggtctcagtaaagcataacatctaaaactatcagtttttaaaagtctgccttttaaaaatttataatggcttttctttttgccttatcttctttgagaatgagggacctttgtggaaaaggatatggaagtgaaggccttatgttacacacacacagttttgagaagaccagctcccccctacctctcatgtgtacatttttaatttttcgttcttcatcattcaactccttcagggcacagtaagtaggattaaaggtgaggagccgagaggatctgggtttgcaaaatggctggcatagcttcaggagagcagcacccagattcagaaagaaggcatccgaggcatacatttggaagaagatttctggcatctgattggcccaaatcttggtgcggcctgcgtttgcatgcaa

SEQ ID NO: 28574 - DNA, 1868 bp, Bovine  19866880859368
  misc_feature (1)..(1): n is a, c, g, or t
nactgatatggactcaattaggtccatattagacagcccaaggccttgaggcagcaagagaatgaaccatttatactctctgagatccatgagctacacttgcatgaaaacctgaattttaaaatcctattccagtacctgtgctctcaaccatatctttgctccctctggacagtaagggggtgagaggaagaggttgggcattggaatagagccaagtccctgctccccgcttctcagctgctcaaactagggatctccactttccagagctttgacaagctggagacagttttctcaaaaggttgtgctgggactcagatgtagctcaatgagcaggagtttccttcccaacaatctacatgaggtttctacagaatgtcttttacagaaaaagcacactagattttgacattttgtggtcttcctcagattcctttggatgagggtgatgagcttgcattctcaggaaaggcagatctcgctcagagatgtatgggtttgcacccacccagcttatgatgcaacctcctggggaaaccccacaggtgtcctgtaccaatcccatttcccttcacaaaactcactgtctacgttccacttgatgctccgaggaggaagtttcagggtttcattgatcttctccaggacagtctgcagcttttgcttctgggcaatctctgactgggtgacctcagcgacgttcagcttctcactctcgagtttctctggggcgacaagggaaagagaacagctattacttttgctacacaccaccctaagccatgcactcacaccttcactcattcactcactcaccaaatacatactgacacctagtaagagggttgctgctgtcccttcctcagctgatggtggcactgtgctgctggtatgtattgtgaagacctagggattgtgtcttgaaaccccaaaatgataaggccttaggaccatgagtgagtgagtgaaagtcactcagtcatgtctgactcttgtaaccccatggactatatacatatacagtccatggaattctccaggccagaatactggagtgggtagcctttcccttctccagagaatccaggaccataggtgggcatttaacccagtttatcatatttgagctatttcccctcatatctggggtttaccctcttttttcatgtctgccttcttctccagggacattcctgtgccccgactggaaagccttccgtgcttcccccgggcagtggtcaagtcctaattcaaggtgttctgaatactctcgtagcgcagtacaatatgaatcatatttatgtctcaataaccttctttccttttaaacccacttggaagataactaattggatgtgtcctatttaatcaactctaacgcacacatcctttcacattttaacatccctgaaatcaggctgtcttaaaactgatgggaccctacaactgctgacagccagatggaagctgtaagatttaccactgcgtctatgtggatgaacttggtcataactcttcacagtgtgggcacgtccatgtctcagtaagcctacaagatgctgtacagcagaaattaacaaaacattgtaaatcaactatacttcagtaaatttaaagaaagcctacatgagcaatttcaaaaagtagaacataaaaattccaagtcataagaaagcatcaggtaatagtttaattgaaggttttttttttctctttgagtggtacttatcctggtatcttttaaaatcaatggttcaggtatgcaatgacataaccccttaatagttcctcccctcatcccccttcccgccctcagaggtgtcatctcaccccagacagagccatccacctcctctctgtaccca

SEQ ID NO: 28575 - DNA, 1610 bp, Bovine  19866880876302
  misc_feature (1)..(1): n is a, c, g, or t
naacgtaacaagtatgtcacaatacaatgtgataaatgttttcacagagttaaaatcaaactgttgcagcagcaaaggggagagagagattagtttaccctgaaagagtcagggaaattcaagagaaggagaagctgcagcagggtcttggaagataaggaagagttttccaggcaaacaagggaaggagggaggggaatccaggtgagagggaaagcacattgaaaaaaaatttttttaatatctaaatagggcttccttggtggtctagtggttaagaatctgccttgcaatgccagggacaccagttcagtccctggtctgggaagatcccacatgctgtgaggcaactaggcccatgtgctacaactactgagcctacgctctagagcccatgctctgcaatagcagaagccaccacagtgagaagcccgtgcaccaccactggagagtagcccccgctggctgcaactagagaaagcctgtgcacagcaacaaagacccagagcaaccaaataaataaatagttatttttaaagatctaaatgagtatactgggtttggagaaggaaacagctcactggaaccaatgagaagaaatagcaagaaacaatgtggttcaggcttagatcataaggaggtcttattagaccatacttagaaatagacattttagttattttttaccaagagttctttgccttgtgggaggccacagattcctttaaaggggactcttactcccattatataaatgtgtacatgcatacacacacacagagaaagattttagactctctcaaagtcagatttttctcccaaggttccaagcccctgaaattgacaatggagaatcaacagagttttatgtagacttttgctaccttttttttttttttttttagtggatttgttcttagggaaaatactggatcacacctgctcacctgcttttgataatcagaatccagttaacctctttggagcatttgctgaccaagaatagtgctcgcttatttaaattatgttgccctccatggctgttctacagcctctctcactgctcaggcatttctgtcagcttggtgccaaaacaaggaaaaggaaaaaataattgacttggtgatctcctgttcatttggaaagaattagagattcatttcagaatttaccctctgaaccacagcactgtacaatcttatttccaaaaaaaagagactaggaccatgctattaactcctctatctctttctctccaaattaatatccacaaatttccctttcagcagaactgaggtcagcctggaagaaaggaaggcatggatgcagaggtctggtgctgtccagaaagcacggctctgaagagggttgacggctcaggactgcaactggacttactcatctgaaacctcaatagacgacttcttatagccagacttgctcctcttcttcagccccgcagacttccttcccattcgcaccagtagcagaataaccactacagttgagggaatgaagacaagaatggaaagaagggccacagaggacagcatcgtgccaaaacctgaaggaggaaaagagaaggtaaaagaggatgtgcaaagtgcttc

SEQ ID NO: 28576 - DNA, 1777 bp, Bovine  19866880922710
  misc_feature (1)..(1): n is a, c, g, or t
nccagaggaggaaggaaaagggttaggcccagtcagtctccctccctccacctgctgaggacagagtagagaaagtgtttggctcagagcagggcctctgcgtctctgcctcctccgcggttcactggcacggtccctctgcccagagctcggggctccctgcccgcccaggcacagccactgccttccagtcagcccccggccctttcccagaagagctccctcctcctctggtcagagctgaagccatacacagttgggtgttttgcccccaccttggccccaggagtaaaacacttctccttttctcacttcctttcttgccttgtgaggtggcggggcagttccctggctgaggccttccgtgcccgcctccaggacccagggccatttctcggcgaggggtcttctgcctgtccctggccttcctgacctgagggggcctggtctcccgtcggcagctgtgatacaaagggaatttgtcttcgcttctcccagtctggtgctgtcctcagtcccccgtcggccaggtcaagcgcttcctccggggctggctgtgggctcctgcctcccccagcccctccccggggaccagggcctggggctctgggttcagggaccacctgccctccgccccgccagacgtgttccctccctgtgtccaacctgggccccgtgcccttgagcctcccacccctgacccaagactccccaagctgactcttaagtgtttcctgcccagaggagagacgggtcaaactgaaaagggcctgacgccctccccctgcccctctcgtcccacctctgccaccagactagctttccgaggtgaactccacaggccagcttccctccatccgtggccacacccccagccattttgtaccattatataaatatatatatataaatataaatatataaatacaatatgtgaagacatcttcgtttttattttgagacaatttttaggcttgttccggggctctctgtgctgcctgtactgtattgacctgttttataggtgcctttttattaaaaagacaaaattaaacatctagtttcttgctttcttctttcatgtctggctcctccattgcccagcttcctactggaggctgggaggaacaggggaccccagggttctccagtgttccatggtgaagacaagagtcccctgggtcatagatctaatattccctgcagagaggcttcttaaggacctccgctgacgggcttgagtgggcctgagcaaccaacgtgtgccctcggcaagtgcgggagtccctgatgtcccattctggtcagaccagaggccagggtggcaggcaagggggcaggagcaggactggcacggagcagcttcctccggttccatatgagtagtaccctctcgggacagggctcagcttcctggagcctgaggacttccttgcccaggcctgcttgtcacactgcccagcccaagggggtgctcctcggctctcgctgaggcacagaaagatggcccggcctgcaggcagggggctggatgcgatgacccccagggactctaagtctgtctcctcaggaggtcttgccccactcttggctaagtgccccctctgctgcggctccaggggtctccctggcactgtagcttgtggggagaggggtgggggggacgtatctatctccttccccatcggctcccacacccaccagggccctgggtcatactgggagctctctgccctgggcagagaagacagctggctttggtgaagatgtgtgcctc

SEQ ID NO: 28577 - DNA, 1093 bp, Bovine  19866880974564
  misc_feature (1)..(1): n is a, c, g, or t
ngcgagatgaaactgatttttgataatctgaccagacgttcctttcttaaattgagacacagttttcaagacagcagtattgcaactgaggctaaaaggtgtcagtcccttcctaagcacatgacctggtaatgtatctgtcctacccactccttacttgttgcctgatctgcctaattgctgcgatctctgtgtaattatcacttgtgagggtgctctgttgcccaaccctctttccctgggcatgtatttattaaggacttgtttaatgagaaggcaattaagcagagggtgtttagtcccactcagaggaaggaaaaggaaagggtaaataagcggttcatggcaaagaagatgggaaagcagggaagaggagaaagatcccagggttggggattcattctttttttggacgtgcaggcttgtggggtcccaagtcattatggctgctgtggcgggtgggaccagcatgttaggtagaccccaggcacagattctcccaccttgccccgctgctgagggtgtaaggatctctgcagaagccacacccattccatggcctgcaagaggagggatgggcacactgcttggaattgtttgcaaagctggttttgttgagcatccagcgctgtctcaggggcatgtttctatcctggcaaagctcctgggggtgggcaggaagccggcaggttgcctagggagagggagctgaaatctttcctctgtctttgggcccaggggccttgcctggctcagccctgcctcccacagcccccagggcctgcaccccaggaggggtcttgtcctgctggcctcggcccactttctccctcccagctcttactttgaacctgactcccctggggccagtgtatcagcttctctattaaagtcagccgagattctgcctgccttgccaggcaagcccggggagctaaacttagagtgtgctccacgctgcccctctttcctcctctcggcctaagttgggtatcactgtacccggatatgggaaaaggtggcagaagatttctgccttggcatttgacttggaacgtctgatggtagatatgagatcccccttggtgtattt

SEQ ID NO: 28578 - DNA, 951 bp, Bovine  19866880993965
  misc_feature (1)..(1): n is a, c, g, or t
nttctaatttgtaaatcttaaattaggcatcaggttatgttaacttaaaaataaatgttctggaagaattagaaattgatatatcaaaaaacaagtttaaattcactattttaattgctaccacactctacttcacaaaaggaacaaaatttagtgattaaacttctcaaaaaacttccacaaagaacatctccttccttttcctcacctgatcttccaatacgatggagataggtctctgccagctttgggaagtcaaagtttattaccacattcacagcttgtatatcaatacctcgggtaaacaaatctttaaaacaaacaaacaaaaaaaacctccattatatccttcaatttggtgtcataatactctttaacatttatttctaaaggaacctaagcttcactcacttcatgcagtaattcaaaaggatctgtaaattactggcattatttctcatgtgcattaaccataagcagctttctgttcacaagttaccttttcgcggtgttgtatcaaagttttaaaaaatggtctgaggtaacatagtgcaaatcaaggaaggctgaaaaagattatacactcaaaaatgagctcccaagtataattttcttcactctatttttaagtatttaattcaaggttaataagttatttttaaagttcattgcataatggagaatactttaaaaaagaggcaatctaccagcagtaatttatactttgttcagatttctttaatcccattctgctgaatgatttataacaggtctgaggtaagctaatatgcaagactatcccttctacttttttccagtcccacaattattatgctaatttaggctttgacaaatacacgcagacacaactccaataagttcaataagctaataactaggtttccctgcacttctcagctccacacgtcaaaataatccagaggtcagaca

SEQ ID NO: 28579 - DNA, 1663 bp, Bovine  19866880996722
  misc_feature (1)..(1): n is a, c, g, or t
ncttcttactcctgatctgtgtccatgttcgtcatgggttggtgagggtctgccccgtgtcgattctttctctgcttcagagcatgcctttctggaatgctgctggctgcagtggcagaaggtaaagagaagtgtgattgggtttgcactgggttaaattccccagctggagtctgtccccaagtcactagcgggcctgttcagccagtcacctggccgcacccaaccacaaagccaggagacccgtcctgctcagcgccggggggggggaaagggccggaagtgtgtggtgctggagtcatgcagcctggagcacccggctttccccctgaactggtccccagacaaatgccgtctcttccaggaagccctccccgcccacctgggcccttgggtgtggggaggcatacgggtgtccccatgtttccacctaggctggaaacggactttgtcaggcctgggaggacaattccatcttaggcatgttgaggttgaagtgcccctggggcatctaaggttatatgagaagggtcagggttagaggcagagtaaaagtcgaagctgttgcaatagtaatgatgatgatggtagcagatcatacttattgcacacgtgtttacaccagatgctgtgctcagccctccatgtgtatcgtctcatttagtcgtcatcataatcttgtgaaggaagcactggttttacacctgttttgcagatgaggaaaattaagcacagagaggttaagcaacttgcctaaggtctctcagcagctgagaggcagaggttaagactgagcttggacagttagacttcagagaagagggagaaacagagccgcacctcagggcagggccacccttgtgagggagaaggaaaaggaggctgcggtaaagcagggtgcaggaggcgggaagtcacaggccaggtgctgagctggcgcttggcatgtgtgaccttccttcatgtctatgaaaccaacgggggaggggagggcagggcggaaatggagaaggcagaggagtggatgtgtgcctgccagcagggggtgtcatggaataaaaaagtataatttacagaagaaactgagacattacggtgatgatggacgccgcagaaaggccaagggtaatgtgcacccaaaggccatttgattcaacgattggatcttgatgagagaatggtttccactgcgtgctggggcacgagccagattgcacacaacccatcgaggataggtgggcggtgaggaagcggaggcaggaatgtgttactatttccagtgaaggaagagccaggagagaacagaatgctgccgttctccctggccttccttgatcctgctccctcctcctccgtgaaacccacattagaacgcacctctgtgaagccccacctcactgggagtggttcctgccctcctctgggtaactcctgcgttacacagggtccctctgccatgtgacaccagccctgggcataatgatgtcatgacagatccacgtgtgtcgtgccagacaccgtgctgaacccttggagtgtgtcctctcgcttaacgcccgtgaccaccggtgacctgtaggtgttcccttggagtcctgatcacacccaagtcacacagcgaagtgggtgtgtgtctgtgctttcttcccccctaaatcgtggg

SEQ ID NO: 28580 - DNA, 1065 bp, Bovine  19866881030933
  misc_feature (1)..(1): n is a, c, g, or t
ngcttgcaggcctctgtcatgtccggcaggaaacagaaggcagagtcagctaagactttaaaaagtgtatggaccacttttcagagggacttttctcagggtcagggtcaggtctaactcttatctgtctttctcagggtcagatccccaacgaaggcacaaagtctttaccactccagtcctgaggggcaaagagaggaaatggtgttactgcagcctggtaagaggtggatgtgtggcccatttgacagaagctgtatccacagccactatcaaccatggcaccatgacagggagggagtatggaagaaaaatgtctttctcctcctgccttccaatctcctgccaatgcctcccattgaccaaatctaattggaagccagaggacgggagcctggatgatgtagtttataggttagctttccggggagtaggaaaaacagagaagaaaagtgaatggatttggtgagagaacagcaaattaagaataaatagaccctacttactcccagcttccctggtggctcagaggttaaacgtctgcctgcaatgtgggaaacctgggttcaatccctcggttgggaagatcccgtggagaaggaaatggcaacccactctagtattcttgcctggagaatcccatggatggaggagcctggtgggctacagtccacagggtcgcaaagagtcggacacgactgagctacttaactttcacttttcactttaactttcactcccagctctggatggtgcctcagactggcctaaaccaatcattacatccagaggtgtgctggtgaaaaactaaaaatagaaaacccaagtgtgtagggtttcacaatttctgtggtacagatactcccaccatggccattttcaagctacaaatggcaaagtctgtgaatgcgagttaggaagacacatgcatgatcaactcttgaaagccagtaggaactagatccagcacaccatcctcctgaccacagagatatacctggggtcaacatggcatttaggttaatctaatcaaatttgttggaaaattacttataccgccatccc

SEQ ID NO: 28581 - DNA, 716 bp, Bovine  19866881111833
  misc_feature (1)..(1): n is a, c, g, or t
nctctctgccccgggactacggctctgctgtgccttccccctgggctccctgttcttccgtgaccttaattaagaactttggtggctctgctggaacactgtcactgttttctctgttgtgcagggaacccagcactgtggccaggatggcagagtctccctgtcatctcagagaagtgccagcaggggcctggggcaaagcagtctgcccagacctcacctcccttcctccttttgcccgtgaacaagatacagtggcccaaggggttccactggtgtctggtttcctttattattgcactgtgtgaggtttttttgtatatccttttattcctttttctttttcttttttttttaaagaaaaaaaaaaaaaccttaagctgcatttgttactgaaatgattaatgcactgacgggtcatgaattcaccttgaggaagacccaaaggccagtcgggagtgggggaaactcagctcagtagacctagtgactgccctgctaggccgtgctgtactgtgagccccctcctcatctctttctaccaaccccaaaccctgaggccaggggaggaaccccccgcttccttctcctgccagctgcagatggtttgccttgcctttccactccctaactgtcaaccacagaaatgaggagttcctcctagatctcagccttgagtccattgccaaaattcagcgtacctgccagcaacttgg

SEQ ID NO: 28582 - DNA, 1156 bp, Bovine  19866881123452
  misc_feature (1)..(1): n is a, c, g, or t
nccagcctgggagttggaattggatggaggggtgaaatgctgtcttgccttcagctagagctttaaaatgctgtgaggagaaaggagagggaatatggaggatttggggatatgctagttatgacactttattaagaactaacctctgcatagggcttcccaggtgactctagtggtaaagaacctgcctgccaatgcaggagatgtaagagacatgggtttgatccctgggtcgggaagatcccctggaagagggcatagcaacccatctagtattcttgcctggagaaccccatagccagaggagccttgtgggctacagtccatggggtcgcaaagagctggacacaactaaagcaacttagcacatacaacctctttacaactctttaagctccattcttctcccaattctacttctaaaacaattccttggtattgtctttgaaaagtagctagaaatgtgccctgcctccttcaaacatgaaccccctttttcctatgcttcctgcttccattcattaggccacttaattctgtaagactgagtgtccactgtagatcctcacctaccctaaggcccacatgggttctatttccccttcctttacaagccccatccctgcctgcttcacagttccctccgttacggggagggcaatgataactccaggcagagacctcctccattgtcacaggcagaatcacagcaggttgaggacactggcggcagcagtcactacagctgaagtcaatctctagtgctggtcttacctgtgagttcttgaattccgagtagagggaaaagagcagatggagggactgaattcgactcttgtagacagggatgtctaggatagctgaaatcgagaactcccatgagcagaaacaaaaatctgggaatatggggcatttctgtttaggtggctagtcccttcccagatggaatgtgttactgtaactctaggggttaaatacccagcaggtagtcacaaaaacccaaacaccaccctcaagtgctgccaaacagcataactggcttaaagaaaaggctgtaattcagagtaaaaaagccttttcaacagcccacagtgaatttatccaaagacggggcggccaagaaagggacgggagggcttaccacagaatcatatca

SEQ ID NO: 28583 - DNA, 1817 bp, Bovine  19866881149691
  misc_feature (1)..(1): n is a, c, g, or t
ncctgaccttctgtgcaggcagaagtgtcttcagtcagacttgggaactgcaagtggtgggagaattgagtgaattgcttctcctggttttcatcattttgggtaagcgcctgctttgtatttcttaagcagtgacttgaacttttctcactcggaataaagctggttctgaaggttttcatttaaaggccatccttttgggctgtgaggcaatcccagaactgtgagcctctgcaggaggactgccataaggtagtctagtgggtccagttttcctttctgcagtgtagagtaacctgtattaagatcctcagagaaaaaaccagtaaggtttgctcttaataaaagaataaatgatgatgatgatggtgataagctttagcttttaagttgcctgtgtctttaagatagagctgtggctggctgttccttggactcatggcagaactcttcctgaactgtttcttttctcccaatcctacacaggccaatatttaaccttaagaagtcaggaacttaaacctcccaagagggctaggctgttgttcatgcttgcctcaccatctgcatggctggatctcagggaagataaagtaggatggtttagatagaagctggtctaaaggagagagcaggaataatgactgcctgattgagggaaggtggtgaggttatcggtgagctcagtggtcacttgtccttactaggggcaaacacttgactgagagagagtgcctctccgttattttgtcctgtaatattgtaatattgagggggtcatttccacatcctctgtggtcatctcattgccgtgaacctcttttctgaagattttttttttttctgttataattgtgccaaagacaacaattcccttacacttttaataatagaaaaggaggtcctgatagttacaactccccaggggtgatagaagatacttgccaagagttatattgtgaaagaaccataagcttagctccaaacatttgaccaacacatgagataacttactatgcagaattacctcaagaacatgcttgtgagaagataaatcagcatctgggaaggaagctggcagagtcgaagattcagatggagtccatcaaggtgcttaaggttcatctgagtgcttttgttagattttttagagactgagattcatatatgtattctgaattattcatctgaataataaaattctgaactatatgtgtgtgtgtatatatatatatatatgtatatataagattacccgtctactattatttatctatctgtattacatggtaggaatttctgaatatctgccaactaactaggaaacttgaaacttgactcaagtcatgttcttggcccatttaagtgtttattaattcatctgatcagtggtccctggactttcactctgggtcttactctgtgatggtgctggagatgcactggccaataggcatggctcttggcctcatgaagcttatagtcttgggggttgaggggtggagtacaagcctttaatcaaacaagcacttaagcgaatatgtaattagaaattgtgacaagtgccctaaaagaaagagaaataacagtactattaaaacatgtggctaggatgtgtcctggatagggtggtttgggagaggtttctttgaggaaattacatttaatttgagatctgaaagatgaacaggagttaactaggggcaggaggtgagaagaatagtcagtcagggggatcagattaatcttgttttgttaaatgaagttcaggaaagcttgctctaaaacactatactttcacagcaggaggagacgtc

SEQ ID NO: 28584 - DNA, 1188 bp, Bovine  19866881167732
  misc_feature (1)..(1): n is a, c, g, or t
ncccatgaatgctgccgggggactgcagctacaaacaccctcagaagtctgcatgagctttgtgggtacccaagtgctgtcagtaaccagttgtagaaatccttaggagattgcaatggtgacgcccagatgaggcacaacccaatgccagccccattccttagcaggtatacacacacagccacaacatatacatgctcggtcccttccacctacccctggagaatcttccagtctcatgtccagcaaagcagtagacacccaaagcaaggagcacagtggcaatgatgtcggtgatgatcatgcctgccagggtggctgtgtccagctccacacagttctggcacactgtgggggaagggaggccagaagagaaggggagggtcttcaagatcagggaaccatgcctcttagggcagccctaggagcgctcatgtcaagatccaaacttggaaaaagagccttgctccatccacttttaaccttcagtccaagaagtagtctcaggtttgtaggaactttaaaaaggcagtaggccaaccacgctgcagaccaagcccctactgcttgggtcacaagactactattgctcttttaccattaagctctttcccactcaaggcttcaaaatctggttcatatccttacaagagcaagccagtttgttgagagcacagatgggtacactggagctccctccagcaaggaagttcccatgtccagaagcccccacctattccacccccaaaggatcctggaagcacatacttcgatagtatacttgcagaataagttgttgggtgttttcaccacactgatacattcctcttgggtcctggatacgttttcctaagtcccgagttttattattgcctgacacctcttgtccttctgttccttgtagcaatgtgatgctggaattgcattccaacattactttgtcctcaggttccagcacttttagaatgcggggattcactaagaaaaaaaaaaaaaaaataccacgactggagccagctctttagtctgcaccagaccactgttctgctgaggctcattacttaagaaggaccactatccaagtctagaacagttcgaggtttctgctgagagagacggaagtcacaagagaaaggcttcagcaggcaccccacaaactgccgaggccaagaaggacacagagggggg

SEQ ID NO: 28585 - DNA, 914 bp, Bovine  19866881198292
  misc_feature (1)..(1): n is a, c, g, or t
naaatggggtaataatacttacctacttcacaggactgtaagacttggaaagttttggtttaaaaatgtctttttggcttggaaagggatttaggagttcaggtatcaaagttggagggagtgttccaagtctatcctgtcctctgcgtcctatccctatagtgcacacactcacacacacacacacatacacacattctcactcttttctgtctctctcttcccacccaccccctgcccttagaattattttagcttttgtaatgttagaaaccttggctctgatgcttaaagcttcttgtccatggcttttgtttggtagttttccatagaggtgattggaactgtagagggggacactttagattgctccaaggcctgaggactcatggctactgccgtttaatgagcgtgagggctaaggatgttcaactcagtccccacaacaaagactgtcctgccccaaggctgggattatacccatggagaagctctggcatgaacttgcagtggaagatgtgtgggcaaagccatcttcccaagcagaccctcagcgcgtgcaggtctctgagagggatcttcaggggctggtgagggtgttttcagggtgtgtgggctagagagcattcacagtattgaacttgggagcccaggacacatgcagtttctctgacactaaagtcaggagaccacaatcaaagtctttcccactcccccttccttgacccccaagtaggacctgagcattccaagccttgggattctcctgatgtaggaattgtgcagaaggcagccagaacgagcctggagaggtctgggaggacagctggtggagctcagactttcacatctggctggctgcccacagctggatgcaaagggaggggtgtaagagcaagctcctgagatggagg

SEQ ID NO: 28586 - DNA, 1936 bp, Bovine  19866881224347
  misc_feature (1)..(1): n is a, c, g, or t
ngggtcgcaaagagttggacacgactgagtgactgaactgaactgactgacaaaacaaagcctactgtgaatcttcaagattaatctaacctgtaaatttccagttaaactagtgatattcaaatcctgttatctgattagtttgatagaatcctgactgagcacataactgcaacatagcataatgcaaactttaagggtccaataattccagcttgggtgtgtttgctgatttcctgactagcctcacaaaaagcagcatcatatgagaactgctgtttgcatttcaggtttctacccctagaaaatccccattgtttattctgtcctacttttggccaaggaagaagagtcatataaagccagccatagtttcctgcccactcaaaataaagtgacctattttaagtctaaagaaaaagggactgcaaatacagccttgcttccctcactggagccaccgtcactacaacaccctaccgggacacctactgtagctactgggagatgctacctggcattcaataatggctcctaaaacaaaatccaaagcttacacattaaaatcaaagagaaagtacttccagtgaaggaaataggataacaaatgaaggatactttcaaaaacacaatcttacataccgctatgacattcacattcttaataaaatgtatcctgacctaggatgttgctgaaagcatacggagaaagtattttttaatagcattgcaatcttcaattagacatcccacaatggatttgagccataaacgtgttttatatgtgtgattaaaatatattgcttctaatatttcaagaccaaatgtcaccaacagcatctgtcatcaacataaggtgccaccacttccttcaaagggagctatgtaaatcaatgcagatgtttatacactggagaagatgccaagataaatctacacagtaccgatatgcaaacagatacacccacagagatgacctcacatgacaggaaatgagcagtattaagtgaaaggatgtctaagactgggacctgtagaatttttctatccaacagcctggaggtaccctttttgtacaacaaatctgaaactcaagctatgaagccaagcaaaatgaaacaacaaaggggaaacaaaattaaaccacatttcctctgagtttctgactggttttttcctatagcatatttgcaagattcttatgtagaagaaaaagccctccatgaccaaaaatggctgtcatacagagtagaagctcatctccttctatttaatagaagctcatcttctatttgaagatgagaaggcctaaagtatgcctgtgacttagaataaaagggttccagagttgctgacaacagaaagctcaaggaaagagccttaaagtatacacttactgggatttccctggtggtctagtagttaagaatccaccttgcaacgcaggggacgtgggttctatccctggttgggaaactaagaccccacgtgctgtgaggcaactaagaccacgtgccacaactaaagagcccatgtgagtcaacacagccaaataaatgaatgctgtaaaaattaaagtgtacacttactgattctgtgcgactgctgctcggaggccggtatgtccagtctatggtgagtttgtctgtgatagaagaggatgacttgaaggtgcatctcaacttgatattttctccaacataaccccggacgtgggcatccgctttaatctccagggaaaagatgacataaacacctaatcaaagcaagcccaaactttaaaaatgtgtgcattggatggaatacatagatgtaagtgaacaacacagaagcagtaggtatcatttttaggtctctcatcaaaaagccatgggaataaacatcttctcaggcaggcccaaaaggatagggtagtagatatctacattaattaaca

SEQ ID NO: 28587 - DNA, 994 bp, Bovine  19866881231466
  misc_feature (1)..(1): n is a, c, g, or t
nttgtaccttggccatgaccttaatcctcacctaaagtttccatcccatctacggataaaatttgttcttatttagaccaactgaattctagtcttgtgtgttaagatgggttagcattggtgactgaaaggaatcctaaaccaatttcagaccatttagttaggttttaagcatgtctcaagaaaagatagacatctcagtgggaggataacattgttcagttttaccctctttctgcctgtagttaaaaaaataaaaattatatgataatgttaagtctagtgaattttttcaaagtagttctggagacaagcaaaatgtttttaatactaggaacttcagccttgataatacacagaagatattaaaagatgataaaatgagaagggttttggaatttagcagcattcaactgcatggatttaaagtcatttaagtgagactcggtaggtccactgacttacctaaagacctcaaagacttttatattacgtgatccccttggctcttacaacttcacaagaggttaggtttatgggatagagaagagaatccagtgtttggtaggtatgcaagttgagattcaaagaaactgttatgcacctctgttcacacgcaagtcttcaagaaaagaggaatgacttatctactacattcagaaaaaaatagaaactatctagcacagacgccttcagtttcctccccctcttcagctgatctatttctaattatactcttccctcctttctcctcctggaggagaacatttaaaacattctgtccgaaacgatctttctacctttgcgcttgatgctctgcctttccacgcttcagctgaagagacccacccattccccattttcagttgtttcatttatttgttcaacaaacatgtattacactcttgtcattaagtgcttgagataccgaaaataaaagacacatttcctaccttcaaagagctcaaagggaagcggtagcaaaataaacaat

SEQ ID NO: 28588 - DNA, 1935 bp, Bovine  19866881236292
  misc_feature (1)..(1): n is a, c, g, or t
nttctccctccacccatggtgcttgatgaaggtgcctctgaaaacatcaggactgaggttacggactgcctgggagggtgtgccctgcctctaggagtcctggtagggctgggaaggaaggatggggcggtagcctctgtgcaagactcaccaggacagcaggcagcttcccccggcgccgcacatacagctggaaggtcagacagaaggccagggctccatagagcagcaggacgaaggtgagaaagatgctgatgttggtcactgtgaaatctgtggggtccagagagatgggtttgtaggccgtgggatgtggaggggcgtccccgtggcccctctcaggggcccctcggtgagtggccgagtaaccacccctccggcccctcaggctacctctaggccacagctcccgaggccacagctgcattcttgttttcactgtggcatgcagaacctagtttcctgaccacggattgaacctaggccccctgcactgggagtggtccctggattcttgggaatccctgcctggctttccaccctccacgctgaaggatccctcactaaacacatggaccctgccgccagtctttgcagagaactcacacgatggcacacagagctgaggcgcaggatggtgcaacaggtaagaaggggggctctgggagcggccagacctgggttccgatcccaggtctatcacttactagctgtgaggccgtggacaaattactcagtctccctgagccttagtttcaccatctacaaaatggcacaataagagtgcctccctcacaggtggctgtgaagttccaagcccttgaaaacagcaccccccgccccaatctgtggtttcagtgacctgtggtccaaaaacgttacatggacgatttccagaaataaataattgataagttaaatcatgtgccattctgagtaacagtgaaatctcatgctgtcccactctatcactctgtcccacctgggacatgaatcctccttctgtccagaagatcctgcctgtgtcacttagggactgcctcagttatcagatgggcggttgtggtattcagtgcttttgtctaagaaacccttattttactcaatcatggccccaaagtgcaagagtaatgatgctggcaatttggacattcttttaacttaaaattatcttcgatttaattgataaattaaactctgtcatatgcatgtatgtacaggaaaaattagtatacatccatgatttcagggccaccactgggggtcttggaacgtatgccctgggaataaggggggactacgatacttatgttatctgattcttactcttaagaggtaaatactattaccgtccctatttttatagactagcatcctgaggtccgcagagattaagttgcccaaagtgatatatttcctaagtggtgaggctgagatttgaacccagacctgtacacaaaactatttctgtattagtgagtggatgttgaaaaagtgtgtaaggccacgtggcacagagatggtggccttgctctgcttcagtgagagtggggcttaaataacaaccagcttctaagtgtctgtcataaattgaaatgtgtatagaaaagcaaggagtccttctggtcactgctggatgctgcccccactggaccgggcactctcccagcccactgactgttgacatcacccgctaggcattcaacatctactatcccaagtagctagatgcagcctcctcttgccatgccctgtcttcccaggcagaccataggatccttgtgggcagaaccacgaacttcacacccttcacacattcccttgcctgccacccaccctccacacccccagcacttggttgggagcctggcacagtgtctgctgacttttgcagctgcggagaagagctagctcagttctgcttcctctgagggg

SEQ ID NO: 28589 - DNA, 1247 bp, Bovine  19866881409029
  misc_feature (1)..(1): n is a, c, g, or t
ntggaagtccagcatgtgtgtggtggccatttcaacttataaaaaaatgattacctaagagtttcttatgtgaattttaatcaacaaaattctccaactgggtcttccctggtggctcagtggtaaagaatctgcctgccagtgcaggagacatgggtgcaatccctgatctgggaagatcccacgtgccgcagagcagctaagtctgggcaccacaactctgtgctctgcagcctgggaaccacagctaatgaagcatgcacgcccagagcccgcgttccacaacaggagaagccaccacagtgagaagtcagcacaccacagagaaagcccgcacacagcaacgaacacgcaacacagccacaaatgaataaaatcatttaaaaaaattccccatctggaaaatcagggtcaagctgttcaaggcagccctacctaggtcttgcttgtgccgaaagtcagttgaccttgatgaacctcaatttcctcacttataacatggggataacgacgcaagaatcagatgtaagaatgtagatatcagtgctttaaaaaatagaaagcattactatataagatcctattttttatagcctaaaagtcatataggaaatttagaggagattttggactctgagaatctacctttacaagaatggcaaatgatgaatcagaatgaactggaaacttcttaagtttcggttcttgaatccattacaacaatgaaggtaacaattacactgactcagatgtaccaaaagtcacattaagttttcccaaatataagtatttctaatgaaaatacagatctctctcaagatagccacagcgtgctttattccagctctatataaaagatacacccaccttatcccacacatccatcgctgagcataaggggcttcctttatagtataactttaattcatcatatctgggacaactaagatccctgttgtattctggatgaattttttctccaggaagttggttgtgctcccttcattccccagcaaatagtttttctatattccccaaagcagtgcactatttgcaccgaggagtagtcattgattacagagtagacttacctacaccctcaagggcaggaccaaaatgcatctcatttctgactgtccatgcctgtgctacagcactgggggaagtgtctggcatatactgggatacgtgctgatagctgccaatataaccatcaaattgaaatcagcttcgacatcctgcaaacg

SEQ ID NO: 28590 - DNA, 511 bp, Bovine  19866881416484
  misc_feature (1)..(1): n is a, c, g, or t
ncccctcccccactccttcctgggatctgcgggaggggcgaggggacaggaccgggggaagtcgggtgaggcttccgtgtttgtataagtctgttggttggtgtatctctggccccgtgtgtgtttctttgtcactaccgggctcagctctcaatggctcccttgttgtcgggcctcagtcttttcatctgttcaatgagtcgacgcgccccctctctgcctctggccgcctctggaaacgtgcgcccccggctatttctgcgctcctgcttcggccagcgcctccctagcggtcccgcacacctccgcgggccagcgtttgagcgcgcctctagtttcctgggctccgtgcgtgtctttgtctccccgtccacgtgtgcgctgcgagtgtgtgtgtgtgtgtgaatccagagttcgggtgctggtgggtccccggggctcctgcctggcggcgtccggcgcagagctgaaactgggctccaccgtggcgcgcgcccggcccctcgccgca

SEQ ID NO: 28591 - DNA, 1252 bp, Bovine  19866881557207
  misc_feature (1)..(1): n is a, c, g, or t
ncaaattcaaaagctactgtcaggagtacatgtgtgtgtgtctcaaatgtagaaaaatacacaaggaggtacaatacttgttatagggagaaaaggtaatgaatactcttagtatttcctcttaaaagaaacatatcattaatttttaatcttagatcccattacatcattctgaatcagcaagaagacaccaaagtatgagagggtcaacagtctaaaaaacattcattttataatactttttttgattaaagaatctgtcttctttgtgtacactggaatgttatattccctatgtattttacagggttacaaaatgtctctcattttaaatattaccccaaaagtaatttcagaaaaaaaagtttttgtgaaactaaatctcacttttaaaaaatcatatggacaagcaactctccaacaaaactgaattaataagattccttgtctacataactacatgacagatttcttgtcccagtccccttcctcaaaaaaccttatgtggaaaccaagctagagataaggattcttccctgatgcgattaaggggaagggaaaggccagaaatttctttggcaaacaattccatccatggccatttgtgtgtgactgctttgcttgaagtacaggacactctttgcagggaaggccaaatgttgttcagagtgggagtggtactctccaaccagctgaaagtgcaggaggtcgtctcctgtcatctgtctattcctccgcctgtggctgcagcctggcaacaactctaccaatccccagtgcaaattaaaagccaacgctaggctggctgatgcagtcttctccactgaagaaataatggatgaggggggcgctgagaaacaaccactacacgatgacactcaacagaaaagacgtaggggagaaagaggaagggtttcagagatgggaaggataggctgctgaaaaaaatgttgaggcggctagaaaggagtattatcagcaattcctatatagcaatataatcagctgcatcttgagaggctaaagacctggtggtgagactggagtctccttgacagtttagggcccatgggattggcacaaagactctctgagggttcaagcctccaaaatcataaccttatttcagatggaaaggaaaaaactgatgacatttagagaacattcaggaagagggaggtggtcaatctcaggaatgtgaatggattacaaagaccatgagctatcatgtattagctgaagtacccaaaat

SEQ ID NO: 28592 - DNA, 871 bp, Bovine  19866881759656
  misc_feature (1)..(1): n is a, c, g, or t
nttcttggaactcggcattttggtcttctctcccttcaaagaggagctcttggatgtcaagtctgaagcactggaatgcttcgtttctaaagatgaagagccatccaagtgactggttttagtgcccacagtaaccgctgtcctttgcaaatttgaagaggtgggagtgttctgccctaaattagcattagaattcagtggccctaagacatgatcgaccgctttggcacttgactccagatccgcagtggcccctgtggtggagacagaggagacactgttcctggagtaagtgctcccagttctcatcggagacattatccggagcttagaccgctggggtgacaaggaagaagtactgtgacgcctggagccaatgcttcgaagtccagaggagagtaaagggtcacccactgtgactatttcatgagtggttggggtagggcttcctaaatgaaagagaaaaagtaacaaaatctattacagataggataaatgtgttgcagtctctggtttcaatgacttggctatgtatgttaacaggtaacagaaaatcaacattttcaattggcaaacatcattaagataaagtttcctgaaagaattacaaactaatcttgagctgaccttgttgggttgagtaggtcagtgaagtcctttacctgcagaaggcagtggtctacagccaggagatctctgtgttggagaatagctgggtgttcgaatcctagggacctttgagatgacgtgatagaaacaggaaccagaggtttgggaatgaggaggtcgatctggtgatggaggacttacaatttctgctgtgttttgactttccttgggtaaatttctgggcaagaaataaaaactctaa

SEQ ID NO: 28593 - DNA, 2221 bp, Bovine  19866880369933
  misc_feature (1)..(1): n is a, c, g, or t
naatgctgggccctctagctgccctagagcacctcaacctagctttacagattgagatcctggcccagagcctggaatcagcactgaacatgcaggagggtgagggcttgtgggaggttatcagtctgaattgggtggaggagcttcaggcctgacatccttcataatctgaagaatttaggtgcaacactagcacagtttagagcagtgcttctcagccctcatcacacattaaaatcacctgggagctttaaaatacacccgtagcagggcaagcccttgtccgtctcccccaatccaacctaccctgcaccagtgaaatgagcatctgtgattctccaggggtgtcccatggtagccaaggctgaaaactgctgatgtacagacaagagtggcttctcctcatatccaataaagatgtgctctgcaccatagcccccatggtcaacttgtctattgagtatttgaaatgagaccagtttgaatcaaaatatgccataagcctaaagcacataccagatgttgaagacagcctgaaaaaaaaaaaaagtaaaatattgcgttaatagtgagatgcttgtggaagagctattttgtatatctcagattaaataacacagtattattaaaatcagttcacctgtctgttctcacatgtctgaatgtggctgctagaaaatttacactcaggtgtgtgatttgcgttatatttcttttgagcagtaccttctttcagttctgattcacaaatcacacaaccgaaattgctttcccaatattactgctgcagatggtaatgggctggaaaaaacacttaatacagtttgtaattatgtatttatttgtgtgtttacttatttagtgtctgatttcctcagtggaccatctgtcttgtttacctgtctatttcagcacctagctgagtatccaggacaaagtaacagctcaataaatatttgttaagtgaatggatggaagaagtggtagctggaagaatgagccaaccaattaatatttcctattgctgcattctcacatgggttcatcagttaaagtctcctgctaggacttgtactgcaaacaagggactgttttgcacagaagggaagggctgtagcagaggtgaagttcaagggctttggtcacagatggacctgggctcaaatccaggctctaccaaggcaagtcacttagcctcttgaactctatgatttctctcatctacaaaatggagataagattgtctcacagggttactgtgttaggtgggcttagcaatgcctagtacaatataaggctgtcatcggtttaagaaggaaaacgaacagaacaggattcgtttctgggatgcaatatgttcttcacagggagtcgtagccctgctttacctcctggggagcaaacctgctgccctcacctgggcacggtacacgtcagtctttaaaggctgactttctatgccttgggcaacttatgacaatgggagaacatgtggaggaattaaaatgtctagtgtctcagtgatgtttgtttcagctaatatcatagtcttggccattgactgctctaggactgcatcattttacccgtcttcccagctgagcactctttagactgcaccttggaacaagcctcagattcagacaggaccttcacaaatgggcagacagcttttgcatccatatctttcttggcacaaaagtaatcacttcctccttaccttgcttacaaagcccatgacatgaccaagggaataaagtggggctgttgggaaacatgaggcttgaccaggatgcccaaaatgttctagtctggctaaacaggatactcagagctgtcctgtttattaggctcacaactgaagaaggaaagtggggcaacttcccccaaacagcagcttattttcttctttgggggctatttgtaattaatattccagctaaatttatgcagataaagaaaaaactatccatatggacacgttttagtaacatatgtgtctcttcaagatgggtaggagcatgtctgtgtgcccaggttggtgcagtgatgatcaacaaaagactctacaccctctcattcccaggcttgaaatactctacaactatagggacatataatacgtttgacaagtcaggtcttacagtagtaaagcctacagaatcatgaatgccgtcaaagcccacattgccggcaatcaacagaaggaaggaaatgtcaa

SEQ ID NO: 28594 - DNA, 1574 bp, Bovine  19866880496693
  misc_feature (1)..(1): n is a, c, g, or t
ncacaccttcatgtaaagcctgcacttcctcagagctccatcattttcttcctcttctttcccctcaccccatgcctgggagtttaatcaagattacggaaatctttttagggatcagaaactgaacataatgaagccacttcgacttcaggaagagtgatctgtgggatctaatagtagctgagctaaccttattagaaagtattttctctctcaaacacaccaagtcaactcacaaaatactattaatatgtatattttcaactcctattcctacaatagtcacaaacttacaaatcaactgatgcttttcttgtgatctttttccctctaatatacacacacacacacacaaatcactttttaaaaaatatttctcttccatccattccagaatttttaggtcccctttttacacagataccattatgcatactcatgcacacatgtttcttaagatgccaaatgtttgtgaaatccatgggggttctgttcattcattcatttgttcagtgaatatatattttgaacacatcaccaggcactattgtataggccttttggatagacatgtgtaggaggctcacagtccagggatggaggaggactcgaaagcagatgtgcatagtgatttgtgttaggtgatatgaatccacaaagcaggggcatggaatttgatgtggagggtcttccaactagagagatgcctgggccaagacacaaaacaagttaagtattgtttttcaggttgacaggaaaaagaagggcaacccagggagaaggaaccaaacgtacaaaaagatccatatgagcagtgaaaaacagcctgcctggggaaaagcaagctcttcggtgtggtctgttgggtggtctcctttcatggaaagaagcaaagcctctgtagacagcaaggaaccagaaggcgggaagaatttctccatactccaaaaatcgatagacaggtgaacatatgacataaaaagagcaatcatcagtatccacatgatccaggtatagtcaggaaaaagttgtagctgtgcatttcagtgcagagtatgaacaatctcactgatctgaatgaacgtttttcctccccacttcccgtttctatcagcaagactctcctttgcagtaaactgtgcacgctcacccttcacctggttgaggtcaagggtagtgcgatcatctaggaagacaatcacgaagatttgcgtgtaaatccatgtgccttctaataagtgcaaacatagtggctccaaggcagaccctgtttcacaaggtctcagaacacttcctgttaaaagcttgagtccatgctgctttctaccctgcctgcttactcctattgaaaatgcccaggaatgcccaatttgtccacggagaggcagacgagcagccatttttcccaggcttccttatttagctttggagatggttttaaataggcaggtggctgttgccatggttaccccattacaccagcggctaaatttaaggagggccacaagggataggaagaaagcttgatacccgggatttagaaatgtaaacgatattatcaaacacagcttcgt

SEQ ID NO: 28595 - DNA, 1871 bp, Bovine  19866880499562
  misc_feature (1)..(1): n is a, c, g, or t
nattttggggtcatatatttaaatgggtttctcttctatcttatttatcagtacaaatataagatatggaatttcctcttccacattgcttaattctaggttctgatatgttgttttcattatcgtttctagacagagtgcactttcagttgttgttctcccttaagcccaagaaatgttaaagatagaattttaacattctttttttctgaaggtggaaggatttttagtttctcattttcttattgttgctgtagtctttctctctttttttctttttattgtatattgttctgagtatgctttcttacagcctaacacttcatggaattttgtgaatgtttcatgggcccttgggggagggagaaagtattttttttttcagcgtgcagagttgaaattttgtctatcaggtttccttactaatacttatatatataaaggatcttatccatcattttttagcctcttgacctgtcatggactgagagaggaaaattaaaatttcctactaacatgtttgtgtttatttcttcttatatcttttataatttatggctgttttacattacattgtatatagattttcataactattataccttcattgtgaatcttatctcattcagtatacttttgatgtacaaaagcttttaaggttttttgtggtcaacttttatcagtatcctctatagtttctgtgttttgtgtcatgctttaatagactgtctttactttcagcttttaaaattatttagtcatgtacttctgtgattttgctttttacataaaaattttaaaatcatctggaatttattttgatgtaaagagtaagtaggtgcctctcttcgctccccgctccccaaccttggtcttttcagatggcttatcagatgtataaacatctttattgaataatcagtttatgggaaacatctgttgtttttgcctcctgcccagaattctttgcctctttttttaatagcggccccttgagcttccttggggaacctcctcttggtccatatggcttgtttggaactgacactagctcctgctccagggttgggtatgtaaatcaaccttagtatcatctccctgcccacggatattggttcagggctgggggatgacccaagctaagatgatcagagtcaagatgactcagcgttaagactttcattggtattattttagaagagatagtttttttctgttggacttgaagctgtacaagtgtaaacctgggttttcagggacttccaccatgtgtagcccaaggatgaaactaatacaatgaagaagcagagtctttgtgatggaaagagactatagatactgatgaaaatatcctagcctatggatccaactgtgtcttacccctggacttttcagtgacctgagccaatttatacatacacagtgacagtttccatttgtcagcaaaagacccgtaactgaaaaaatccactgacttgaaatattcctatcatatataaaattatgatatgaatgtatctctctaatctttttcattgacctatttatctgttccaagtttcgtaaattagaggaaatttctcctcaggtaactttcgcttagttggctcaatgttttaaacatttcgaatttgaatgtgctgtgagtgttggctggtaataatttttaactgccctcttctttagagaattgcttttggtcaaacaggagagccctcctaccagggaggctatgccccctgggccccccagactctgctagtgactgactgtcgtataattgaaaaagggcaattttcttttcttaaagtaaggctatgttctagagcagcagtctccaaccttttttacagtagggaggtttcggggag

SEQ ID NO: 28596 - DNA, 1090 bp, Bovine  19866880526946
  misc_feature (1)..(1): n is a, c, g, or t
nctgcagtccatggggtcgataagagtcggacacaactgagcgacttcactttcacttttcactttcatgcattggagaaggatgtggcaacccactccagtgttcttgcctggaaaatcccagggacagggatgcctggtgggctgctgtctctggggtggcacagagtcggacatgactgaagcaacttagcagcagcagcagcaatccttgtccatcacatctggctcatcacccagcatccttgggtctggttcttgcttcattaacaaagcgattccacagggaacataacttagttttgtgtaaccaaccaccttccctggcaacaacctgtgtccagaggccactggggaaagaatttcctgaaatcccaatagttgagtcataatttgatacctcttaagactcaaagggagaaggcaatggcaccccactccagtactcttgcctggaaaatcccatggacggaggagcctggtaggctccagtccatggggtcgctaagagtcagacacgactgagcaacttcactttcacttttcactttcacgcattggagatggaaatggcaacccactccagtgttcttgcctggagaatcccagggacaggggagcctggtgggctgccatctatggggtcgcacagagtcggacacgactgaaatgacttagcagcagcaggactcaaagagggctcagaactgtgactttaaccattggagggtaatgggtctcttcaagaaccttctgatagttaatggacattctctccagaaaaatatattcaatatcttacatacagtttcaaggtgcccgcagaactcctgcagcccttgtacctaggttagtaattcttgttaaaatagcccagaaaactgaagagcaatgcaaaagattcagttttcctgataaattctagccctgacaagtcacattcccttgttcaaaacagaacaaaacagttacaactccctagatttaacctcagggttatccctgagggcctagtcctaggtattaacagtaaaggcatccagccaagcagtgactactctttggaaaacctaagttcagctgagtaaaa

SEQ ID NO: 28597 - DNA, 1272 bp, Bovine  19866880544696
  misc_feature (1)..(1): n is a, c, g, or t
ngggagcctggtgggctgccatctatggggtcgcacggggtcgcacagagtcggacacgactgaagcgacttagcagcagcagcagagtgaggaagaagccatgaacctgagtctgaaaataatggcttatagtagagcactcttgtttggcttcatcttaagccctcataaagtcctcattcctattgctgacaaccaaagttgtctgccagaaggcagatgtgaggtacagtagaactatatatttctctcctcaaaatggagggaaaaggaattcttaaagtgggaaatatgcccttaattttcatttttctgtaagcgcagccacctcacccctcagtcctttcttcgtttgccctgtactccagattactttctttgaagacaaaaactttcaaggccgccactatgacagcgattgcgactgtgcagatttccacatgtacctgagccgctgcaactccatcagagtggaaggaggcacctgggctgtgtatgaaaggcccaattttgctgggtacatgtacatcctaccccggggcgagtatcctgagtaccagcactggatgggcctcaacgaccgcctcagctcctgcagggctgttcacctggtgagtctggaggtggtggactctctctctctccttccccttccacccctttaggcttttatgtaaaggagttttcttaagattttcctacctcttaatgggtggttgtctcttgttggctgctgagacttcagtcaagtgttagatcagttcatcataagaccacacgatttatttccactttctttaccccttatatattttaaggaataaagttttccttactgaacgtcagctgttttagtcagtacacagttgggatgggagttcagatcatctcgctttcaagatggtgggtcctgaactgctctcttctctgagttcctagcctgctgttcatttccgtaacagttgctgttcttttccccttgttttctgtgttttttttttttttttttttcagtctagtggaggccagtataagcttcagatctttgagaaaggggattttaatggtcagatgcatgagaccacggaagactgcccttccatcatggagcagttccacatgcgggaggtccactcctgtaaggtgctggagggcgcctggatcttctatgagctgcccaactaccgaggcaggcagtacctgctggacaagaaggagtaccggaagcccgtcgactggggtgcagcttccccagctgtccagtctttccg

SEQ ID NO: 28598 - DNA, 1065 bp, Bovine  19866880568514
  misc_feature (1)..(1): n is a, c, g, or t
nttatggatttatatttgctttgttcatttccctttgtttccccagagtttgctttaggggtaaatgtttctttttcaataacactaaagcgagaaggcgtcctgcccccactcctgttctattccgatgactccaaagctggagagacaaggcaacaacagcctccccagcagagggtgggggccagaaagagcgctgcaggaggcggggaaggctggatggctgagcccctgttaagcttcaggtactctgtgtgggtaatcagatttcattctcaccacaaccctgcagataaagttgattagtcccgcttgtttttcctcagacgaggcacagagaagttgagtcacttggattacacccagctggtaagtggcagagtcgggattggtaatcgggtctgaccctgtcttaccttcatggtgcctccaggctctctggctcatagttgactgtccccaggaccccactttcctctccctttggaggatcatgtgttttgtgtctgagctcccctcctacatgtatgagcacttcagaagtaaacacatcagtggaagaaagaaaaaacaagatgtccaagtcaggaggacctgtcccacctagacaggcccctcggccgggctttcttctcagggcccctgggaaggacacacaccttgggaaatggtcaataggcctaaggtcttccaatgggaccagggactcatctccaggttcatctgcaggagagagctttgtccaaggaaccccgtgcaggtggatctcagtgtggctgatgccctgagtcactgtgtgtgtcccctgggccaagccaaggggcctgagcatcagggatgcagcccttgacccaacctggaatgacagagctgcagggtctactgggttatcccacccagtctcctcatttaacaacactcttgggagtgaagtcatgccagctggcttgccagccagctccagatacccagcctccccagcctcttccctctcctcatagcttgctccagcccatgtcactggtgcaggttccgtttgcctacccacagcaagccaaatgctga

SEQ ID NO: 28599 - DNA, 3631 bp, Bovine  19866880594698
  misc_feature (1)..(1): n is a, c, g, or t
nccccaccccacgcccccggcccatcaggaaaatgttgaacatctttaaagctcgaaatagtgagctcttactttgaagcaaataggacaaggcctacccctcaatgaaggattgtcatagcctcagcgaatacaattgagaacgaagtgggaggaaactattgctaccaaaacaactcactttttttttctctctctttcctccttgcctgcaaatctgtgtctaattctttccattatgcttctcccaatcagagtgcagacaaagtagcacacattttagctggtttcaggtgggcctatccctcctctgtcctgaggctgtacctctgtcaagtctcaactggctaactgatcgtcctccctttgtaccccaactactgaagctcccctgcattcgtagtagaaaggacactaaccagagcgtgctttcaggtgccacctggttgactttcatggaactcctcccttgatccagattcagaggcaagcaggcctttctctggctctgaccaggaagatcagagagccattggctgttcactcagagtagccatgatgtctaagaaacaaataggttttactttaagtcggtggcaagaacagttggttaaaaaagtcttccatccctgatcatccaattaagaagtgctgaaaacataagattggggacagctgagggcttgagtgtcccggccccagtagcctagctgctgtacacagtcatttcaaacacagaacactgagccatctttctgactcctggtccaggatgaagaacaagctgtggtactttgaatttggcacctcggagaccttcgcggccacctgcaagaaactccacgaccacatagagttggaggtgagttcccaaagcttgctttgggaccttggttctggtccgggactgtcacataccctcagaacatgtgccctaggttcatagtggccccaggtgtaatccttcttacctccatcctgttcccaacatgtccacagcctcactcccagtaggctctaatcacggggtctgcctttctcggcctgaccagggagtcctggggtctgagacccagaggcccagtggactcagggctgcagtcctttcctgccctcagccctctccccaccatcacctttcaatttcttctttttcaagaaatgaagacaggtgctacccactcagggaaagaagctgctatggggatagaggcaatgtcccaagcctggtaaaagtctgggaactgaagaccacagggctgaggggtctgcagttgaggccaggggtgaccagacatcatcagctcacctgcctcaactttcaaggagccagttcaggcactcagggccagcttcccaagtgtgcaacctgcacagtcactcagaaggttcctcatttaatgctgttctgtgactgtcttaaaattcttgatagtttttttttttttttagcaaagggccctttatgtgcattttgaacactcaaattacatagctgatccagttggtgcacttggattttaactctcccgggacttgcagcagcctgcctcagacacagcctgtgggcttcacttactggttgataagctgcccacttctcattccccaccctgcttctgctgggctgctctcctgaggtcttctcacttctaagaaaagattgacctgcaagcccaaacttctgtgcacacctgctgtctctgctctgcggaacctcaggcccttggggccccttgcccatagttctcagttaccgaccctcataccccttcccatggaattcaggccagtggtcttgttttcacttgagaaaaacaagtgaaaggcagtcagagttgggccaggatgggctcttgctgggccaccagctttgtccctgagcttgcagcagcagtcaagtggggcccaggcatcccttggaggaggagcatttggcctaaagcagtgtgggaaagccccaccactccctgtggaagggagcctgcgctcacggggagttttcacaatcaaaacacaaagccagagattctgtgcttctctttgactcatctgcctgcctctccccagcggttgctgggttaccaaccccagggtgggaggagccgacctagctaatcccctgaacttctagccagctcagtcagagggcagagaggcccaggaatgtggggcacttttccccaggtggtaccacctccacctgggaaagtctgagaaacctgccttcctctatggatacataaatccatggccagaaactctacagcaaagggggaggcggctggactgggctggaaactggacgtggctggagctctgtgtgcatttttcctgttggcatgatcatctggggtgtctttaaatataccccaagtgagggacagccctggcctaaccactgccagctgcagacacacagcgactgcttgttctccctgcagctggccttgaaactgtgcccagaatagagcagctcagctcccctgcctcggtgggccccgccctcccagctcccaactcccagcttccagcccacagcatcatgggcccctctgagtccagtgcacagcggctcatcctcaattgcagagggggctggtggcctctggaggaggtggggctgttcacactgtgggttgttgggggcttttagcagcacttcttgttttccttagctccccatcgtgagtcttttttagtatttattcctgaggctaaggatgggggtgggggtgcatctgacaggcagcttctgttctgaaagcctgcaggattgtggcaggcatccttttgtacccagggagcggaggggagacggtcctgggtcttataatacagaggagaccagagagacagagggggaggcatatgagtaacagacgttaggaggctgtggggcagcccaggtagatgtgagtgcatcagaggccttgggaagaacaataacagaaggtatgttaagtgacctccaagtggcggctgcacacaacagcccaggcctgagaggaccagcatgctcatcagatcaaggtcagtgagcctgagaataagcccacacaggtatttatactacgtgccaccatttccaaagccccaccacagcctttattgcagagtcacacaacaaccagtgagctaagtaggcccggtattcttatccccacatcacagaaagcaagctaaggcacagagagttagatatataaacagaagggagacagaagtaacaaggggagaggagaaaatcacagactctgactgcctactgtagcatgtcctcatttgattccatcatccagcaaagcaagtatgatcacatttttttaaatgaggaaaccgaggctcagacacactaagtaactggaccaaggtttcattgctggaaatgtgtaagagtctaggccttcctagacctcctggaaaggagtttagcttggaacccaataaacagattgacctaacaagtgctaggagcttgctgaatttttcagctcggatacactgtttcttcctcctttactgaatgtatggctggcttgggttctgtctcagctgcagcagctgggcagggctgctgggaaacgctttaggagaacagaggggcacagtcctactgcttgctcatttg

SEQ ID NO: 28600 - DNA, 1062 bp, Bovine  19866880639768
  misc_feature (1)..(1): n is a, c, g, or t
nttctgacacctacacgcccccttattctctctgggaaccagagagtaacttttgccccttttcatacccattacccaatgctggaggaccacatggctaggaccggccttgctacagtgcctaactattgggataatcccatgattgtgtgcagagagaacagcagcccaagtgtcttccgactcctaccaccatgtgaattctatgtgtttattattccatttgaaatggaaggggacacaacagagatacctgggggtcttccatctgcatatcagaaagcactgagccaaagggaaaaaaagatacaggtctggcagaaaactgtgaaggaagctcgtttaacaaagtgagtattttctagaagtaagtagtaacttgtcttatgtaaaactccacgggaaagcaaattaatctgcatgcatcctcagtctctcagtcgtgtttggctcttttgtgaccccatagactgaagcccgccaggctcctctgtccatggaattctccaggcaagactactggagtgggttgccttttcctactccaggggatcttcccaatccccaaacctgcgtctcctgcattggcaagtagattctttacgactgcgccatctgggaagccccccaaattaatctgcacatgtttataattgtgctaaacaaacaaaatagacaaagtgtgtcttttgttaaggtcagtattccaggtactgtttggttgggggatgggagcaagtggatactcaagtattagactccctccttttttttttggcatagtaaattttattttttttatacacaaaaaaccactttgtattggggtatagccagttaacaatgttgtgatagttccaggggaacagtgaagggacttagccatacataatccatgtatccattttcccctaaaattccctcctacccaggctgccacataacactgagcagagttccatgtgctatacaataggtttttgttagttatccattttaaatatagcagtatgtacatgaccttcccaaatagactctctccttttaagaagcttcagttta

SEQ ID NO: 28601 - DNA, 1696 bp, Bovine  19866880685503
  misc_feature (1)..(1): n is a, c, g, or t
ntgtgtggacctcctactgtatagcacagggaactatattcggtatcttgtaataacctctaatggaaaagaatctgaaaaagaaatatatatatatttaatgaataactgaatcactttgctgtatacctgaaacatggtcaatcaactaaacttcaatgaaaaataaagtgtgagcctggagccaggcatcagtaaagatcctcaagtgattccaaaatgcaaacagtttgggaacccctgggccaggttactgggtagatcattcccatgggccagtgattctcagagtgtggttgtttccaggggaggccgggaggcagcaccagcctcacctggaaacttgttagaagcggaaatcctcaggcctcacccagaccgactgaatcagaaactcaaggggctgggctggacggtctgtgttctaacaagccctctggaagagtctgaggcacactcaagttggagaacttgagcctcaggcaataaaactgccccaaacatatgcaggagttggcgtgaagaaaaatgtaaacaagttacttcctgactgctttgatccacagcttcctcactctgaaaaggcgaagttaggaataataatactgacctcaaagagtggttatgagattcaatggcaggggtgtatgtgaaagcgccgggcacagagcgggctccaaaaatattatcaattttgctttcttttatgtcacattcaccctcccaactcccaactctgtgtacctcagagctgtgtacaagggtctacaccatcatattcagggtaaaacatatttaacaatctgcagggttcctcatggtttcacatgtccacacaaatgccataattccagttgagctttagatgaactgggagtcctgctccagctgtttttcctcctttaaactcttccctgactctgctccttttcccacttctttgatctcaacagtcccagtttgcgtttctatcttgagacctgcccgcaggtgggaggagggactggagctcagtgccgacaggcagaggctagcagagtgctcatatttgaggggcacatcttccttcttcaaactctctggaagcccaagggacaacgtcttagttctcagtgaggcatgcgaggtcactcgctatctgtccctgttcccagcacaggaatgcctctgcctggagaactcatacttaccctcctgtgttaccccaggcagcgtgccttttcccctctcctgtgctcagtggatctcaccccacgacaactgtctctgtacacatcactctcccaagcccactgtgacatgaaggctgggagataatattcttattttgtttatgtttgaatccttagcagccagcccaggtctcagcacacagaagtgaagtgaagtgaagtcgctcagtcatgtccgactctttgcgaccccatggactgtagcctaccaggctcctccatccatgggattttccaggcaacagcactggagtgggttgccatttccttctccaggagatcttcccgacccagggattgaacccgggtctcctgcattgtaggcagacgctttaccatctgagccacccctactaaatgcttgttaaataaattgaacaaacgacatgctttggtgccaaagactatgacaggtttagcttgaaagaggaaaaagatgatgattaataataatgataaaataa

SEQ ID NO: 28602 - DNA, 822 bp, Bovine  19866880737350
  misc_feature (1)..(1): n is a, c, g, or t
naaattggaaaatacctattaacagatttctttttctaatttttattatttaaaaaaatttttacacactttttattcctatgtgtacatgctcagttgcaaagtcatgtccaactctctgtgaccccatgggctgtagcctgccagactcctctgtctgtgggatttcccaggcaaaaaatactgaagtgggttgccatttccttctccataaactgatttctttattgcaggacttgtcagagccttgatatacatgtacatttcacaaacctccaagaaagaaacaagtatacaacatttggaaaatttattggcccactgaactatttttaaatataatacctcacctggatagtaatacattttgggaaatactagtcaattgttatcctctacctagaaaaaaactatagttctaaaatataaaaaataagccctctgaaatgagaaatccggctccagagggtgttaagagtaaaaaaaatactttcatacactgctgggggctggtatgtattagcgtaacatttttagagagcaactttacaataactagcaacagtcccaatatttatactttcaactcagtaatttcacttctataacttatcctaaaaaaataacctgaaaggcagacaaatctcaggtcctcagttcttatttatgcctctgatactttatgaaaaagaaaaacatgctctgatttgaaaaaacacaaaagagggctgcttcatttttctactcaggtgatagaaaaaaggatttcctccttataattgagggaagagacaaaagtgcttttatattcttagttgcatt

SEQ ID NO: 28603 - DNA, 881 bp, Bovine  19866880801056
  misc_feature (1)..(1): n is a, c, g, or t
ntaaaagaggggatggttgaggattgggggcaaggcaagacacactcagacctgagctgtacttcgtataagtaggagacattacctcattgacattatgcaactgctcactcaacatagaacccaggcctttccctatttcataatctttcccatttcacagtggagtttttggcaccacgggcaagccctctggcttgttgtttgactaggggtccacttagatatggtgctgccatacttgtcggccacttctccccagactcctgtggacttcactgctcactcagggccatgtttctcaaaatagtctgaggaccagagcaacagagttgtccatattgcttatgaaaacacagacccctaggcctgacccagacatgctacattgggacccttgaggtgagctcagaaatctgttttcaacaagccacccaggagtcttcagaaccattcctaggtggctccactttccactgctgtttccctggtggggacggccttcattctccaactccaagaagcccactgtgctctctctgttctccggtctccaggacaaacaagctgctgccaatgcaagtggatggagagccctggatgcagccaccatgctcggtgagttattccagtctttgagatgagggtgagaagttttatttgagatccctttggggcactgacttaatatgaaattctgagtctctgagttacaggggctttgggagatcatccagcacagctcctcttccacttagttcatccatccatccatttatctgctgagcttttattgattaggtgctatgagccaagcactgggagacaccagttccaaatccaaaggagacagacctgtcttcaaggagcttatagttcta

SEQ ID NO: 28604 - DNA, 1594 bp, Bovine  19866880845431
  misc_feature (1)..(1): n is a, c, g, or t
ntgcccagattgacagaaaggccagtggacagaacccaatgccatttcttcaaaggagaggacacatcatagaatctcccctttcctaaatatcacaaagcaaattaagtcaggctctgggcttgccattatttcaaaggggttgatttttgtttgatttagaatctagaggttagaaatggaaaagaaataacttccctaaaagtctgacatatgcttcttttggtagcatatacttgagtgttacacattaagccagcagaacaaaaaggtatctttgggttggtgtgattagaatgagaacaatgctctcggaggcctctgaacaggaactgtggttgtagatgttcagtcaggtccagggctcactttagtacacccaaggggacaggtgggcatgggggttgacggcaggaaattggagggagaaaatggcctgaaagttaagatgagcaaaggagaatgtgtgaattggaggcttaaggagaatcctgactggtagaggaaggcgggcttcattaaaggccgttagagaagatatacttatgtacatacatatacaatttctgttaagacttgttctaccttcaaagccaaagtttggtactgctgtgttctcctgagggtgtcttttggctaagtcgtgtagaaatggagccatgtttccggccacacggaaaagcatccaccccacattcttttcctcataatgtggcctggtttgtatgaggcttgaggaaagcatgtcgcccagactcactgaggctttttgaaagtcaagtctgtcatgtgagcagccctttttgatttatctcatttcacaaaaaggagcttttacgacttctttgccactgcctcgggcctaagcagaggctatacagctgcaggtaaacctggttatgaccctttgtaaagccgttattgaatctgttgctctccaaccaatggtaaagaaaatgatgaacagatggcaaaggaccccggctttcttaaagaaactaatgctaatccagaatgctcacataaatgccaagctgcccagtcacaggggagtctcctggtggccttgcgcctctctcagctgattaaacagctctgtttcttcagaaagtacttcttgccaccgcagcttgaaatccccgagcattccatgaactctgaaatattccattcccttaaccccaggatcagctctgtttctctgtgcgctttggccccaggacatgcagcacttttttccccactctctaatccttgtataacttggcaggccctcctcttggtagtgtcaagaagataccaactcctcgaaaaatgctgtaagaagttgtcatggggggagcttgaagggtgaagcggaggaggaagctgtttgggacgtaattgtaggcagctgtgtggctgagtagtgcactctgggtaattatccataatatccattacactgtgcatggaaattgtggttttagaactgcgttttggcaggccccctaatcaaatgtcttttgatagtcatccagcttagcaccctctcaattatgactgactcggctttaatctggagccattttaactgtgaatctgcattaatgaa

SEQ ID NO: 28605 - DNA, 1691 bp, Bovine  19866880851942
  misc_feature (1)..(1): n is a, c, g, or t
naacagaaggagcaggtcaacattgaaagacctgtcaaataatcagaacttcctaataaagaaaggaattcctggtcaccagagaagcctactctattccattttgaagctggggaaacaagtcatgcagataagataccataaattaggagctgcaaagaaatcaggatgcccagatgaatggcaacaagccctacctttgcattcttcctcttttgagaaatctctataagtttggatttgtaggtaacctcacagagagatttttgttgcatgcttctaattttcttcctgcctcataataagcaagataaagagggctttgtagtccagttccccaactttgaatccctgctctgttacttatcaactgtgcaatcttggacaacttggcttacctctctgggtagtgttttcttctgtaaatgaagtaaactacctccagttctgaagaacaaggatcacagctaatatatttcttgctgtgttggtgagcgttatgccaaggtaggctgacctctattagatacctgagacagacagattcaagccttctggccttttgtacctggcgggatgcgggtggtggagactggataaagaaactctgctacatcagcaagcacatatgccaaaattgcacttaggatagagatacaggagacagaaaaagtctgaaagccggccaaatcttaaagtcttatacttctcacaagagggattaaataagaaggggtaagatgaaactttcctgtcatttgttcgaatctggactccatgttccaccatatcttcacagtggtgccggaggggcagggttgatggtaatgaagttggactggagcacagtgtgcagctgtcttctgaaccagcccttctagatctataggtcagtggtccccaacatttttggcaccaaggaccggtttcatggaagacagtttttccacagaggaaggaatggctgcaggatgattcaagcacattacactcattgggcactttatttctgttattattatatcaattccacctcagatcattaagcattagatcccagaggttggggagccctgctagagatggttcctgaagctttgtactgtacccccagagctgacaagaaatcacctccctcatctcactgcagtggataaggcattagacctgagcaactttagccaatattcagcttctgacagaggctggctggtggctaagggcctgtcacattcttgatgagagcccccaccacacgcaccgcaccttgagctgggatacaatgaggacactaacagatgacctttttttctctgtcccccagtgtgacggggttggggtggacctgagcagcatcttccttgaaggcattgctattctcaacattcccagcatgtatggtggcaccaatctctggggagaaaccaagaagaaccgggctgtgatccgggaaagcaggaaggtcatcactgaccccaaggaactgaaattctgtgttcaaggtaagccaggcatgagaaaaatcgtgctaggtcagtgccccagtgggagccatattcaggtgggtctgtcagcaaaccatattagggtctacagcaggctctagaaggttctgcagccttacaagaacccagtgatacactgactcatccctgctgcatcatcatttataacctaatgagaagagaaaa

SEQ ID NO: 28606 - DNA, 911 bp, Bovine  19866880875831
  misc_feature (1)..(1): n is a, c, g, or t
ntgactttattgctacattagtttccttgtgcatccagtgactatccattcctacacaggtaatcatccctgtccctgaaatgtccttctttcttcttaacccagcaaattatcttgacattcatccttcaagaccttccttaaagtctctggcaccttccttccataccttgcccagaatcagttactcaggcatccttcttcctgtagtttactcacaacattttctatacctaacactttctccctcttggttaagagtccttagagtagaacattttgtattcccagttcttaacacagtgtctggcacatggttgtcacttagtaactgttgaatgagtgaattaatgcattcctgttttactaaggtacacagacattccatcttaagtacaagtgagtatattgagtatagaaacaatatggagatgatatgaattgccaaaaaccactctctgaatcattcgtacctgaggtaaaacagggggcttaccgggtagctcagttggtaaagaatctgcctgcaatgctggagaccccgattagattcctgggatgggaagttcccctggagaagggatcagctacccactccaatattcttgggcttccctggtggctcagacggtaaaaaatccacctgcaatgtgggagacccaggttcgatccctgggctgggaagatcccctggaggagctcatggcaaccctttccagtattcttgcctggagaatccccatggacagaggagcctggtgggctatagtccatggagtcgcaaagagtcggacttgactgagcgactaagcacagcccagcaaggtaaaacaggacacctggtatagcagatgtcctgatcctggattctatgttctgaacactaaatgttctatgtacctggtcattga

SEQ ID NO: 28607 - DNA, 857 bp, Bovine  19866880884106
  misc_feature (1)..(1): n is a, c, g, or t
ncacaaatcaccgcgcgtgccgcagacccttctgcccttccgcggggaaagaggggggatgctgaaaggtctccccgccactctgagtcccgcacctgggttgctcacacctgggagctgcctcttcgctcctgtctcgtgcttcccgctgcagcgatggcgcggatgagtgcagcgcatcggattcacctgtagggctttttcgaactccacagccctcctcctcaaattctagtccacttgtccagaggaagaaaatctctgaaagtgcccgatgagtggactggtggagttttcgaaagccccacaggtgatactatatgcacgcacatgcacaaacatcttttgagtccgaaactaaacaggtcaacccgacctccctgaccctcttctccttccgtagcttctagttgtcaaggtctccgcgttctcttcagcttccctttacgctcccccagcacgggggctttgtggagtccccccaaagtcccggaaccctgcgggacggtcagaggtttggcggccagacgttagaaaaagtgtccccgctctttgctgcccttgtgcactctggggcgcgaagtggataccaaaggtaagtctagaagaggggaaatctgaacagttgcttcagcaccctgcgtggagccaggccgcctcccgcccgcacactttgaggttcggaaggtccttccaatcaaagaggaagccggtgccccaccctgggcggctccccgtgccctcacactgccaggggggcatctcctcctgtaggggctgtgcggcaggtggcatcgtcaggaggggggcgctggcatcgtcaggagggggggcgccgtggcctcagctgcagctcc

SEQ ID NO: 28608 - DNA, 897 bp, Bovine  19866880939114
  misc_feature (1)..(1): n is a, c, g, or t
nttgcgtttggaaggattttacacacaggctttgatcttcgaataccctggattcagtagaaaaaccatttaaatgaaattttgtacagtagaaacttttcggcaatcaaaatttagactgtaaaaaaatatatgcagaacatgcttttctgaaaacattgaacaaagtgctgaatgcagaatgaaagtaagattttaattccaccaaaagtagtcatcgtagaaggtgtaaaagtcactgttcactttaaaaagtatattatccacagacaatatcctaactctaggacgggctttagaaagtcttcaacttcttgctttaatagcagtgaggtgaatatgattgagctctagagtgtgatctgtatcctccacaactacagtagggagaaggtgactgtcttctgcaggtctgatccctgtcttgagcagttccccatcttcctccttcacttcctttgtaagatccactatgacagtcctgaacatcatagcctcaatcatatcctctgttgtaaaatcttgacggcatgagctgctgtaggtagatctccccttgtagattcctggtgtaggattatgtggtctttttgctatagagtaatcaactctgatcctatgttcatcaagctccattccattggcacactcttttgcttccttggcatcatctacattttcaaagtatacaaacctgaacatctagactgctggtcataatgcaatagacatgtcagccattgggccatatttagagaacacttcctttagacctctgtctgtagtggtgcaggttcaatccaaatactgccggagctgttctgagttggtgacaggaggtgctgagttgaacatgtgtcttagaggcctggtgcattgagggctgttataggtagc

SEQ ID NO: 28609 - DNA, 785 bp, Bovine  19866880967174
  misc_feature (1)..(1): n is a, c, g, or t
ntattggtgatgaaaaagggaagccaaatttcctgagtttggggattttaaaactgttttttaaggaattgttcagctccgaggttgaaaatcgccccttggtgagaggagctcctgcaaaaatgccagcacgccaggggccactcgagggtttaagtaagatgcagagaatcagcctgtaacggtttggagccagtcttagccctctcaaataagcagagcggcgacaaatgccgctgagaattccaggcccgaaccaggttacttctgtgcgcagattccgccgaggacgtgcgcaagttgtgcccagactgccccctgctggcgccactcaacgacagccgggtggtgcacgcagtggaggtcgcgctggctaccttcaatgccgagagcaacggctcctacttacagctggtggaaatttctcgggctcaatttgtggtaagactgagaccctgctgacaggttgggcaggttggtggcactttggggtgtgaacgtggtgaagcaagtgtgagggagggagcaggggcagccacaggaagtcaaggagggtggtgggagaaaagggaaagaaagggtcctgagtgtcctggacccagagaaccctcaccgcacccccgacctaagccacttcaacataaaatagtcagagtctgcgtgtgtgttcaggctgtattcctcggttagttaacacgagggtgggagttcccgttttatccagaagcacacaccgtaaattcatgggtctccacaccaccatcacctatcaccgctgaacatca

SEQ ID NO: 28610 - DNA, 2259 bp, Bovine  19866881009335
  misc_feature (1)..(1): n is a, c, g, or t
naagccaaattcagggaatggctatccctggcgtcctggcatgtcagagctggaaagatgacctgggccaatctttgctcctctcctctattgatggagagcctgaggtctgggggaaaccaggtttgctgagtcccttctctcggcaaccagtacttccaatacttgagtctgtacttttaggggccagcacagtatccccccaaagagacttccaagtctgggacacaaggatcaaggcaggagtcaccaggattcactgaaatgtgaaaaacatctttgttggtcctctttgagcctggctatggttctccctgcctctcttctttgaatcagtgggccatctccttttcaccttccatatcttctccccgtttgcttacgtctttgcctccacactctctcttcttgttccgtggtgctaggtccttgcagccctggaaggatttcctcccctccccaccgttatccttcccttctcagcccacagcccaccctaccccagagtccttggcagtaggctcttttcaacttcaaggcaaacatgatgaaacagaagcacagtagcttctggaggcaaagaattttttttttaatttggggggtggtcaagttcaaggcctctaaaactgacagagataatgaggaaggaagtggggacgtgagggagggaggttcaccttagcttctctgtttgtgggtttcattgcatgaattctcctgttagcagaatgatgagacaatatctgggcatctacttatataagtgctaagctaaggctcatgtgcatgagcacaagagacccccgaagttaggacctctgttacttgggtgatcagactgagggctctaattctaccaaagaatcattcattagccatgtgacctttggacttgcatttcctcatctttgaacatcgcagggataataacatctacttcacagggtttttgtgaagcataaatgagataatgcctgtgaaatcctctagtacagaaattgttgccagctaacagtcaataaatattcactgaaatgatatctgagtcatttcccctgtgaagactttgctgacctcttactcccaggagaagtgaccaccccctcctagtataccccttataccctgtttatgcccctttgttagaacctataacacatttttttcacctctcagccctcacctgccctgctcctcaccactctctggctcttagcatctccaggacagtggcagtcttacttgtctttgtcctcccagggcctagtacagtgactcgctcagggagacgccttgtaagtagttgctgaattgatttgaaacagtgggggtttctgagcacaagcctctcaggccaggattgttttgaatatatcatgccagttgctgcctccttgtatttattaagatcgatggcaaaacccgttgaaaggcatctggctctcagagccccaggagattctgtcggctctggtccactccaggcagacgggccttatttagagacatcgaactgtttactatgctggcagtgcccaggcttgcttcctgcccaagctggggcagtttgccactcaatgctgtcatattgttgaaatgatgaaggctcaactgaaggctcacgcagctctccaatactgccaaaggggtgtctcatgggctcattttccctggggacagtctcctccggttacgaccagagtctttcaaaggtttcatggttggtcccatctggatgtgacgggtgggagtgcagcccaaggagtcacatctggacaggaagagtcctggggcctggaaatgccagaagctgttccacaggacatcgtcaggatggagtacagtgagctagctccctacatacgaaccttcaagttgtgaacgttcaaagatgtgaacatgcccctgcatgccagatgttgtactatgctactgtaccttgcaaggtactgtgctgtaagattaaaaatgttttattttttgtttgtttttatgtattattgtgtaaaaatactataagcctattatagtacagtactatatattctgttagttgggtaactaggctaactctgttggatttgtaaacaagtatgtaggggacttactgtactaccaatactgtgactcaggaaacagtcagtggtgtgcccaatctgagggtgacatggaaaccgaatagaagaatgagctgctaagacatagttgggaattgctaaaagagggtacaagagaaagtgggaaactggttgaatg

SEQ ID NO: 28611 - DNA, 986 bp, Bovine  19866881095913
  misc_feature (1)..(1): n is a, c, g, or t
ntgaatggatggttagcactgtttctgcctggcaacagtttccaaaaataaaaatttgaaatgttatcaaatttaggggcacaagttccaaaagtagaattggtggagatatgggggactgccattttctctaatatctgacagtgctaacctttgtaagcataaattaaaaaattgaatgtagcaaaaatcatccataaatagtaaaaaatcaactatttagtaagctgtgctaaaaactgtaagtccctcaaaagccttctcttcaaatgtgcacaaacctctccatttgactcactcagttctttcaccactgttttaaggtcaacaaaataacatggatatgaggtgagaaaaccccacaacatagggaatttccatgcctaaggtcagcatttctgtatatttgtgtttctacatatcctttaaatatgtaccctaaaaagtcaactacaaaatagctggcaaggactcttcaaaaaaaaacaaaaacacaaaacagtcagtgttactgggggggaggagggcaaggtgggcagattcttgtctgatataagagatgtaacaataagcttgatgtacaattcttaaattctagatcaaaaacaatattgatatcagttataaaagacagctgggaaattctgagtattactgaataaaagttaattttcttagactatgtagaagaatgtcctcagtcttttgagatgcacactgaagtatctgggggtgaaatgtgataaagcttgcaactttccaataacttgggaagaatatatagagaaatgaagtaaatgcagcaatatgtcttgaaaaaaaaatcaataaaatggctattatatcatctcctctgagatacttggagaaaaaaccctatcttacggttgactgaacaggtcagcagacgtgctaacaacttcaaaaccatgcccttacacacgaaggaagtcaccccggcctattaccaaacctaagaagaccgt

SEQ ID NO: 28612 - DNA, 4676 bp, Bovine  19866881217295
  misc_feature (1)..(1): n is a, c, g, or t
naagaaaggagtgcttacttaacgaaagaatcaatgtaaaaaaaaaacagaatcaatgtaaacaaaatcataacaggtaaatttaaactactcaagagaataagctgtttaaacacattttgaaagtatttatatgtaattgatatcatgaatataattttccctattcaataagaaggtctagtaggactgctcttcagcaacattttgttaatttactcaggttacaattcttaattgaaagtaatataatttttaaaaatctgcctattccaacattctatgaataatcattcatctttcctttacctgaatgagtctgaatcgatggggcctcaatacatttaattctaaccataatctcaggtcaagaattgaacagcatcaaccaaattcagaacaactgatagtgctgatgttttcagaaaggaggatctgatgtgtttagttatggaaaatgcccgaccacatccatgctacactgcatggctccatggctccaggctgtaagatacatccatgaatgtctaaggtcaaatgccaaatgcaatggcccataagcatttctgaaaatctaggaaacatgtatgtttccaccctcaaaagcttctccatgcacccaggaccactcagaggagtggggtcctaactgaactctggacagctcctgtggtgagatgttctgtaggcagcgacccctgtgtatctctgtgaaatggcatcaccaaacaggaccatctttcccaaatgctgcttttcttaacttgaaaaacaaatcaaccggaaggcaaattaagaaggaaaagccaagattatctgagacctgagtgagtcacctgagggggaaggggttcagcctgctgaatggcttctgctccctgtcccccaggacgggattataacaagaagtcactgaggaagaatgagaaaaaaatacatttctttgggtacatatccacaggaagtcaaattattaagaaaatcaacaataataagagagtagatttacatgtcatagttgctcctctgagctcacagaattcatgttcaggctcacctttaaccttctaacacttgaaaatgataaaaatctgaaacaaatcttaaactcagtctctccactgaggatagttggggtgttctctcgtagctctttaagaaaaaaaaaaagtttaacactaaaatcatgtgactattttatggaaaaaaaaaagtattgagatttttaactatgaagaggaaaacaactcagagcataaaaaaggaagcaaagtaggcaaaggataataataaattttgatggactggtatatataacctgtgtagaaaatgttgtattatatttactactagtggttctttaaaacaatatagaaagcacatatttttcctaaaaagcagatattcccaaaggactgtgatattccataagcctcagtttgtccaagttcataaggaaacaaccaacataacttatcttttttattccaaattaattctatcaagttttgaatgttttgagattttacattgttaaatatgattttttgttttttcaaaaatagaattaaaaattttgtattcacatatagttgatttacaatattgagttggtatcaggtaaacagcaaagtgattcagttgtatatatatgtttttttcagattattttccattataggttactgaatattttcctttgttttatacaataaatcctcaaaataaattttcacttcacattaactatcatgttatcaagacctttaagagaaaagattgaatgttttatgggaagtatatgcaagtaaagtcagcatacggaagtaaagtaagcactgagattcaataaaaatttaaagacatgactattcaacaaatttcttcaagaaataaatgtataacaaaggcaggtaccaaagatcagagggccctgctgttttgcatttttagtggggaagagaactagcttgtctggtatcaaagtgaccactgcattttgcctgagaaagattttctcagatttggtatagtaaatagcatatttcttagaaaaccaacgattttaaagaagggtaaatatattttcctcttgtagaccatggctaaccacagcatggcacaattttggagaaataagacctcacccagttacaaaaatagcaaaaaggactcttgcttctggcagaaaagtgacatctttattgatactacaagaagagtgttttaaacttctcaatttggcttttttttttaatcaactcttttagattaaattgaaaggggaaattaaattgtgttttagaaaatgtaagtaactgaaatcattcttcaggagaaagaaaagaaagagccacaaaacaaaaagaaaaggaaacaactcaagttaaatactgaataagtgaccctgtcttaagtactctgaacaatctgggcctcagttttctaatctaagaaatgaatagagtagtagtatctgcctttctcatcctacaaggtgctgtgaaaattaaataaggagtataaaaggcatcgataaactgtaactgttattactgctgttttataaggaattctagttttattccaaaaggagttaatcataaatattaatacaaggggattattctttttcagtataagtgccaaagcaaccaagtctctctttgacttgctgacttttcctgattgacttaattcaaccctaaatgatccctggatgatctctaattcttggtattcaccttttgagtaatcccttccctttgagtgtggacagaactacagtcttgtatctaacaaacaaataaggcagaagtgacaacgtgcaatgcagtgactaggccataaaaggctgtgtggtgtcactctttctcggattactcactcagggaagcctgctgtcgtgctgtgcacagacccacggagaagcccatgttgtggggaacagagccctccagcccacaggcagaaagacactgaggcctgccaacagccccaggagtgagcctcgcagcagatcttccaggccagctgagtcttcggataactacagacccgggtggcaacttgactgctattccgtgagagacgctgagctagaacaacccagctaaaatgctgcatgtttctgaccctcagaaaacgtgtgagatgataaacattggttgtttcaaactgctaaatttgggggtaatttgtatgcagcgacaggttactaatacagagcatttgacagcatcttgctctgcaactaacatttaagatcagtcgctaccttggctatggattatcttgcccattggtaaacctgtcatttttgtacttgtcagtttattccacaataacttttgagcctgacggcttaaactgatatttgatttactacataaaaaaacacaccttaagtttgattcttgtatccacttattatcttgcaacagaaggacagctgcttctgtttttatcaaataggtttttctgtgagtctcagcagatttttaatacaatttgggttatacagagaaatatctacagggaaaattatattttcatgtaatcatactgaatttaagattaaacctatttttatttttttttaactgatatgcaaaacttattctggttccaccaaatccaaatctttgctttccaatatttattttgtatctttgtgcaactgctcttttacagctcaactcagtttaaaaagatttcatacctaaaatgcccatgaaggtttcattctaattaagccaaagagtaagtcaaaagtttgaaaatccccctcacaaacaagcaaaatctctgaactactattttccccaccctgtttgaaaataaagaagggggaaaaaggagggggaaaaaaaaagtaaattattaatgatcttattatgactttaattttaattaattcattcaaaaataattaatgagcagctgtttccagtattcaaggcattcaagatgcaacagtgcaaataaaaaataagaccagatctcatggtacttcaaatttttaaaattcaaaagaccagcccccaaaaaatacttagctatttttggggaactgatgactgtttagatccatcacaaacaaggagagtcacttaaaaccctgaattcccagatcctgtatgggttacacagatgacttgctaactttttttttggagtgaggcatttatttccagtacaaatttaaggtgaataaatggagagacacaatatttgtaattttttctgtgtcaggcatgttaatacattgtaatataaactacatagtaacattaattatttagtattagaatcccatttgacagctgaaagttaggctctaagataagatactagtaagcaacatggttggggtctaaattcagtcaattttgattccaaagtccatgttccacccaccccttgatgagttgcattttaagctccaataaatcctaagatcaacagcatctacaaaattgcctataaggaaaaaaaaatctcctattaaaactatactttaataattacttctaacttaaatttcagtctggcatcatgtagctgctttcagagtatctccacttgcatatctcatatgacatcaaactcaatacacccaaaacttgatttccctcttaaaagctattctccccccaaggttctttttaccaggc

SEQ ID NO: 28613 - DNA, 917 bp, Bovine  19866881309702
  misc_feature (1)..(1): n is a, c, g, or t
ncgttttgtcaaagttgccctccagcatgcattgagcatttcaatgtggagataaggaaggcaaggagttggatctctggctctctggacctcatcttacaattctatttctagaatttcatcaattcattttaagagaacagcaaactggttgtggtgggaccctccagttgatgtcctggatggttgttatacctagtttggaaagtggtctccaaagacattctttataaatgttattgaactccttacccccactctgcccccacactctgcactgaaatctaaagagggctttcaagttgttatctgtaggaatattcaggacccacggtgagggggacaggcggcgctgcctgctgggtgatgaggaaacatacctgatggagacagaggagcactgggctagcctcctgcctgcactcttcaggccagtgtagatctgccccatttccatggctccctctagccccaccacttcaagaagctggtcactgaggtctgtagagtgagacaagcagaaccagtgcatacacatgtctctgttccccagtgtggtttgggccagaaggtctagtctccagatggccaacctagaactgtcaatatccttcagctcccaccaaacagcatttcacccttattctgaatagggcatttccccagaagtcaataaatgtaccttttcataaacagaaaccttctgttccagtgaaaaaaggttttgctccagattgtatgaccatgcatgcaatgaatagggtgacatatccagaagtttcttcaaaggcagagtaatgtaaaggatgaaccatctgtttctgaaataccctgcccccctgcccccaccttgcagctaaagacacactggtttgggattaggataggaaggaatgctgatgaaggtcattatccag

SEQ ID NO: 28614 - DNA, 1293 bp, Bovine  19866881364502
  misc_feature (1)..(1): n is a, c, g, or t
nccgctacatgtgggatctttgttccctgaccgggatccaaccccatcctctgcattacaaggtggattcttaaccactggaccaccagagacatcccaggataaagtctttagtttcccaaatttagctgaccacagaatccccctatctcagagcatcttgtgagactagtattctgctgagttcacactgatgacaaacgtgcattagagacaaacaggagcaaacgtgctcaaataacccgtagactatttttcccttcgagccatggatgtgggaacaagtcacacattcagagggatcctggttagtatctctggtgactctggtgtcttgagtaggaaaccaagaggcagagttgatgctcctgtctcttccagagccgtgagtcaggattttagaagaaacaggcacacatgcatggggagcgtgagctgctctgtaactgagccgaggacgcctgttctcctggaccacagatttggatgctggaatgacaggccccttggcaaggaatcgggagcttgtcacataaaccaaggaaaacatttttggccagagacttgaagaccaaacaggagagctttaaaatgggatttaaaggggataaagtggaatgttcaaatgaaactctaaaatcgcagcccatggaggggcagcaggtgtgagctagaaataagaggcctggcagagggggtgccgagcagttctctgaggaactggagcagggtcacatccacactggggacacgctcaccagctgcatcgtgaggggcccagcgaatgggggaggcaagcacgacctcggagacaacagaggcgaggtggctaggacacacagctaggacgccatgctaggtcagggtgacaaggtcacgtggttgtaggcactgaaatgggtgttaggagggtacacagaagtagaagtcataaacatgagagtggaagcaaagccaagagcatatggatgagattttcaaaagggcaaaatagaaaggattttgctggcggtgtgtgcactacagtcttctcaggcagagacaggctctggctggtgctttcctatttaagacttttttcctaagtagcataggaagaagatggaataaagatgggaagagggtatttattcaagcatctgccccattttatgaattgttgctttgctaacaatttcatgatgtaaaagagagacccaggagggaactcccttactctgtacttagttctgaccaggaagcatccaactagctcatggtgtggaggcacagaaacttcagaggaagcagcca

SEQ ID NO: 28615 - DNA, 1187 bp, Bovine  19866881605044
  misc_feature (1)..(1): n is a, c, g, or t
nttgtgttaaatttgctgggaccatttaacttgtttatgaaaacttgcctccccgccccccccactcccaccctaacccccagcacaatggcagcaaatgcttgtcaagacttcctgtgagatgttaagagtaaatatttactgtgtcagctaaattgcttaactaaacttcgcgattaattagttttcttttttagatagcttaaatgttgaataataaaataattcagttaagggtcgatattttacatagcgttttaaacaagaaggttgtttggattggatggcggttaaaagccagacttttttagtccctgaaactactgaatattgcttctgagcgtgttgttgttgttgttgcttttaagatacatttgaggctaaacaaatatcactgtgaaatttataattatatttaagtgcactgttgttaatgaagaagtaaaaagttttgtggaggctggatttctccacagtgatttgcttacatgagaatgtctatgaggagagattgagggagaacatctttgtttaaagtttattgtggactttaaatttgggccctttattactcattctagaatttttttctatgtgtcgtaacttagtttatatcccattcacatacatttcttcaccattagtcattaagtagctgaattggagactctaagtgaagtctgtgacttaccacctttacaatttgtaattctcaacagtgtaaccatttacttgatttttgccaaaattgaatagattttaaaacaaactattctactttttaaacacatagatgttttgttaaggggtttctaaaaatgtgtgcaaatttccaggtatgttttaactaggcaacaaaatatcttttgtttaccaatgattccagtggcgtatcagaaaactactcaatacctttaaaaaaaagaggcaaaagttatgatttgcagtttcatgtgtaacgttaagctagttctctctaggaagagatgtaatgtgcaactgataggtttttcaattaagaattttaaatttgtatacttaaaaaaattttttttggcttgataaatctaagttcaagctttctgatatattaactatttattgtaagttagaattactcataacatttgaatattggatgaatatattaaacaaggtttaaaagaaccacccaaaatatttgatgg

SEQ ID NO: 28616 - DNA, 762 bp, Bovine  19866881998510
  misc_feature (1)..(1): n is a, c, g, or t
nttcaataaaactgtttaaaaaaaaatctagatatctaattatgttagggttttaatcaagaaaggatgctgaattgtaatcagtgctagctaccatggcagaaatccccatttagtcagaggatatggctttttagagagggaagcaattgtccccagagtaatctattcaggaaattctgagccaccttgttaaaaaggaatgttcaactatatatcttatggatgccaactcttactttggaagcagttctgggctgtcaactccattcatccattcagcaaaagtcatagaatgcttacttatttgccaagtattatttgtcaagctggagggggataataaaaaatgaaaaggcatggcttggcctttaacctgccagcatttcaaaacttgtggctccattaggagtttggcccttcttccttttctagctactagcctctttgacttcagagccacgatccttactgggtctactttcccatctccaaaatttattattttttctttttagcaacatttcaagcagggagaaagtatacagaaaaccataataaacatttgtgtgcctggttacatcttaatcttttagatttttaggttttaatcttagttctttaaacaaaataaaatatgacatatgcatttgaagccccttttattcacttcttttcctacagaggtaaatggtatcctgaagttggcattcaccatttctacgcatatctatatactattatttcacatgtatatgtatt

SEQ ID NO: 28617 - DNA, 2757 bp, Bovine  19866880350835
  misc_feature (1)..(1): n is a, c, g, or t
ncgttagagggcctggagtttggccccttcccctggattgaacgcatcccttactgagatgagaatcttggggacataaagtgagctgggtgttttgtattaatatttgcgaatggctggaaaggctagcaggcccatctgagcttccaccatgggcacaagagagcttgtcccatgacgtgggttgactaggcagaggggagaaagagagaaagctgcttgaggtcctattctaagaggccagttacaaccacatgtgcttagactgtctgtcattctggttgctgtggctgaggtgggaacagtagaaacgactcagacataaagacctggagctttgctgcctgttaacccccatgaagtgccattttctcagctaaacatgggatgagaataagtggggtttaaatgagatgaggggtgcagagttctttgcacagagcctgccatcctgcagaaggaacagccgacagctccgggtgttctgatcattagtacacgtgttctcacgcccacacagtggtcacttgcgaattcatgtgcatagtcgctaacagccacaccgatctgcagtcagtgcttcatacagcagagcctgctactgtgggctctttccccacacacacacaagtaacactgacatcgacatttctttcttagcaccattgtcctctcctgacttatcggtcccaggctggtatgagcaagggacaggcttggggagaggatggagagcgggccactctgattctctctgctttgcctccctctcccctgctctgtcacacctggttacttcttttttcatacaaatgacacttcgttgcaattatctctccaattaaacactttctccactctctgtgaactctgtcagaacgtgctggaattttcatccctcgatcttcactgtctaagctcctagatttcttaaatgattcaatgctattattattttttattggtgtataatcgctttatgatgctgtgttagtttctgctgtacaccaaagtgaacctgctgtttttgttgtttttcactcattacgtcatgtccgactcttttggaaccccatgcgccgtagcccaccaggttcctctgtccttgagatttcccaggcaagaatactggagtgggttgccatttctttctccagggttcgcacccacgtctcttgcatctcctgcatcggcaggtggattctttaccactgagccacataaacatatatcctctccctcttgagcctctctcccatcccttaaatgatttaatgatattatttaccacggtgtgagaatacacatctcattcaaaagtataccagcactgcacaggttcaatccccagtcggggaactaagatcccacaagtcatgcagtgaggccaaaaataaaaaaagtgtatcagcacatgctctatataaatctatatttatattataagcttccccacagaccattactctaaccaagttttttctcaccgaatcatttcatttgcccagcagaaattccctaaaacctctttaccccaaaatacaatgtggctgctaacattccattatgtaaagcaaattcagggtgctccctgagatgccttaaattgtgtcccccggtggccagaagcagtagctgcttcctgtgaaagagatctcactgacgggaggaagtggtgccattccttagggagcagaaaataaggttccaagagcacatctacacagccaggtggccttctttcccagatttgcctccacatgagcactccacaacttccttgagaccttgctgcaccttgctaccccctgtggtccatgcgtatgcacagagtcaagagaaggcactattgcctgagagcctccaactccctgagagcatcatagctgcacagtcatgtcagtctgccacgccccgtggtccccggctgtgccagggcaagaatgctgtttccaaagcaactgcaatgttgtgccttacagatgctgcaggcagagagccccacatgaacatgtgcaaacacagtcacacacccagtatggggacacacttaggcaggcacagctgaaaaacacacacgcacacatccagacaccgatctcctatattataaagttgtgctgctggagaagactcttgagagtcccttggactgcaaggaggtcaaaccagtcaatcctagaggaaatcagtcctgaatattcattggaaggacgatgctgaagctgaagctccaatactttggacacctgatacaaagaactgactcatttgaaaagaccctgatgctgggaaagattgaaggtgggagaaggggacaacagaggatgagatggttggatggcatcactgatgacgttggacgtgagtttgagcaagctccaggagttggtgatggacagggaagtctggtgtgtggcagtccatcgagttgcaaagagttggacacgacacgactgagcaactgaacaaccacagtgaatcttttaaaaagaaatagacattttatttcttattctggccagagcagttagctttccaaggatatacttagctggtttcatatttgccctttaatatttcttacaagtaaacaaggggagattgaaacccaataaatgctctgtatgtatttgtaattgtctgctgatcccattcatccaactcagctcccttgttagctgggaagggctgagagggttaggaattatacctggccttggatgtggggggtcccactctcctaaggcttcaatt

SEQ ID NO: 28618 - DNA, 1766 bp, Bovine  19866880445667
  misc_feature (1)..(1): n is a, c, g, or t
nctgaggcacagagaaggctgttaggagagcagggtacgggcagggggctggggtagggaacactttacagccctcctgcctgaaagagtccttccaaaccccttctcgaagattctgtgacttgtcaaatcctgtcactggtagaaccaccttgttgctaatttcccaatatcattttgccccacggggaatgtcaacagaacttcatctgaatgcaacttgtacctgtctgtcttgttcctggagctgaagtggtttaggatagaagaaagtggatttcctagaaggggtggatcagttagaaccaagaagcacctcttctgaagatcatcagaaagtgaaagtgaagtcgctcagttgtgtccgactctttgctaccccatggactgtagcccaccaggctcctctatccatgggattctacaggcaagatactggagtgggttgccatttccttctccaggagatcttcccgacccagggatcgaacccaggtctcccacattgcaggcagacgctttaacctctgagccaccagggaagcccaagggcagtggcgtaaatggtaacaaccccttgttgtgctgctgttcttgggagacaggaacatgggttcactcttccgaactgctggaagaagttgctgaactaaaaccatgagccctgggcccagctggggtgccggttggggtaccgttccttctcggccttagtcgactcgactgtgaacggggcagtcactgctcctccctgctggggcccttcagttctgggagcccatggttttatcgagcttaatgaaacaatggaagtcaagtggcaggagagaatttttctaccccgtgaataccaagatggcactgctgacacttgctggctgtatctgtctaaaccgtttttagcttcaatactaggataatgtggaaacaacagtaacgcagagttcagacagctgctttaggctttctgcctcctcactgtttgtttgaaactcttcccctgcctccaccctccggtgttcatgacccacgtgggtatactttctctagagaccctgcccctagtctcctcccatgttggagctgataccagccctgggtcccgcagaccagctttaacctcctttgggatccacgcactcattctgcttttcccacagcgctctctgcccccttcaccaggcctcccgagagttgctgctgctgctcagtcgcttcagtcgtgcccgactctgtgcgaccccatgcactgcagccctccaggctcccccatccccgggattctccaggcgagagcactggagtggggcgccatcaccttctccactcccgagggttaggatcctccagtcccaaagccaaaatgttttctagcttgtgtttcccaactgtatataatgttactttaaaagggggagaaggcaagaaagaaaggagggaaggaaggaagaaaggaagaagcttaaaatgcttcatgaagtcagggtgagagagggagtggcatgtactattcaccagaattcctgtagagtaatcaagtcttttcattccagagggtgttattgcctggtaattaatattagatctgattttgaaataagcctaatgatgatgactttgggggtatatattcttttgctgtatttgcataaagcctctttctcagctttgcatatggaagttaaaaaaaaaatgtgagttttgcctataagattcttcttggcatactgtatggcagaaaaggtgattgtaggcagggaccataa

SEQ ID NO: 28619 - DNA, 1134 bp, Bovine  19866880478395
  misc_feature (1)..(1): n is a, c, g, or t
nccaaaaaaattaagtctgacactgtttccactgtttccccatctatttcccatgaagtgatgggaccagatgccttgatcttcgttttctgaatgttgagctttaagccaactttttcactctcctctttcactttcatcaagaggctttttagttcctcttcactttctgccataagggtggtgtcatctgcatatctgaggttattgatagttctcctggcaatcttgattccagcctgtgcttcttccagcccagcgtttctcatgatgtactctgcatataagttaaataagcagggtgacaatatacagccttgacgtactccttttcctgtttggaaccagtctgttgtggtccaggtctccccttggaggggattaatcaagctaagtaaagtgcaatgataacactgctctgtttgtacagctttttgttttttgtggcattttaagttgcctttctattctccaactattcatctttagcaaatccttaagtatttctagtgtctcaagaaagcatcaaagactttctccccaaaatatctcttttctgaagactgacactcttctgtttcagtctaaatgaatggggtagtaggaacatagattaatacacccaggacttcccttcatcgctcttctaagttggatccattgtttcctgggcccctcagaatccccattgctttgttcatgtgtatcctgtgtgagagactaaaattttaatacatgtgcaactgcgaaaactgtgaagataaatcaagtcatatgaaatgtaaagacctaaaattatatttttaacaaatggatcaaaaaatcacacatcttagaagggctgaatacaaaatcattaccataggaggccacatatttattataaaaatgctgccatggcccaaaccacatttatcctttccttggaatattcattcagattctatattgcatgctttagaaaccttcacaaagggagaaagatctgacttgagaaactgtcaaaagttctaaagcaagtgatatgaaggtccaagagggaggggatatatgtatacgtatatccctggtggctccagaggttatagtgtctgcctctaatgcaggagaccctgggttcgatccctaggtcgg

SEQ ID NO: 28620 - DNA, 2012 bp, Bovine  19866880594767
  misc_feature (1)..(1): n is a, c, g, or t
nttttttgccaacttgcaggcaaagcctagatttttgagggtgaaagagctcaactgcttccacgaggaaagaaaggattttgagtgttgatgggcagccgaggaaagaaggtttgagggccgcagcatgtcggaaggaactctcagtcctgtggcaacaggcagtatttctagacaaattgtgagagtggaaaatttcctgtgggggaggaaatatggagacctgtgaaaaaacgacgctgttttaaattgggggttgaatttctctggttgttaggaagtgattgtgaagaaaccacactggttgtccttaaaagcctcagtgaaagtgaaccacacacagcagacttggatactgttgcgtggagagagagaggggaagaaggaagatgagtggcgatcacaggaagcggaatgccccattcactccttccggttcccatcctctccttccggttcccatcctctccttccggttcccatcctctcagacactagaaaagaaacaggacttctcctgaactaggatggggccatgagccacatcgttcagatgatataagaagatgtgccctcagctagccagacagtcctggaggcatctggctcacagaactgagtgagtgagaggaaccttcaagccatggtgccttttcacgagtcacactggagacgtgtgtcctgtacagacatctgtgtatctgtggctttctcaaggcctttaggtgacacacgcagctttcctaaaggcccgaaatctagttctttttgcccaacccggctatgtgaaggagaggaagggagatgagataggaggagatggttgtaagatggtttgcctggggttggttgcatgagtcggagcccaggctttctgttgacatcacttgctttggaagatggctgaagtctacgtcgtttttcggagcatgttccctcaagatgtcttggttttgttgcatcgcaaagatcatgtctgctttgtctccctgcagttctgggagttcccagctgccagatgcagcataagaggctgtcgaagaagtcgtttgccaaaggtgaaaagttagaggtgccaaggcatttgctgcagtcatttttcttgtctaatatttgtcatcttccattagtcaggaatactaatgagtagtcagggtgtccaaatgacaataattcaccgttttcccagtcatactgagactgtttaaatgcagctgtaggaactgtaaagcatttgcgtgttactgctatggtctaggtcccataaagttctttctggagttttgctcactaaatcagccctaacgcactttcatcttctgtgtgcgtgtctcggcttttcactaaagcttgcttctagatgtttgcttggttggttcctcatcccctttaatgtccgttcagatgttaccgctctggcgagaccttcactgcccttccccccaaccactctctggtttagagtgttgctcctctgcctctctgccgttctgtagtagtttttcgtcttatgcggcttttgttttgttttagtggtacttatcactaactgccttgctttgtttagtcccttcttggttattgcctttttcctactaaaatacagggcttctcctgtgactcaggggtaaagaatcctcctgccgatgcaggagatgcaggagacacaagttcgatccccgggttgggaagatcctctggaggaggaagtggcaacccactccagtattcttgcctggagaatcccttggacagaggagtctggagggttatatccatggaatcgtaaagagtcagatacaacctactaactgagcacacactagaatacaagctccgtgaagaccagggtctcatctaacatgttggccattttacgcaattactcacactgtgccctgaacctagcaggttctcagtaactatttatttagacacggacaaatgaatgagtgaaactactctttatgacacattactttatgggcttgtcccagttctcattctcttca

SEQ ID NO: 28621 - DNA, 1000 bp, Bovine  19866880614560
  misc_feature (1)..(1): n is a, c, g, or t
ngaaaagggggcctgcctttaagcctgcagcctttctttgctgagccacgtagggcctgttaacctgacccacatgtttggagacagagccatagcacccgcgtggctggggcagcacacaagtcctccactttccctggtgagaagccggtacaagcgatggactccactctccttatggacatacagatgtacagaaccccacatacaattgcaggaagccctgggcctgaagcccctccaccatgccccctcataggggactcaaggccatcgctcaagtcctctacagcaaccattctgaacctgacccactgcagaaatcgcagactcatttcctccagcagaccagtagaaacagtctaatccaacataacgaaccctggcagtgtccgccaggaacagctcaccctcccaactctgcaatcatccagattccagaaagtttatccttcaaaaatggccaaagtcaacccgtccatttccctcccagactttcacaagtcttggtggagatgagaattgaggttacctgagttttagaaatcggaattgccagcgtgttgatggaagggagtggagaacagggataatatataggttacctagaattgatgggctgcaccacggcccagcaccttccttgtgaaagtcaagatcaagcatgagagataagaactcgacctgcagctgagggaaacttggtaaggcgttaagagtgtgtgttcattacgcactcgtttatcaagcgcccactacatgccaggccctgttctaaacacccaggaaacatctgagacaagaatagaaaaaaaaaatccttgccctgaatgtaacctctgagcttacgttctagtgagggctggtctgctggaggaaatgcgtctgcgatttctgcagtgggtcaggttcagaatggttgctgtagaggacttgagcgatggccttgagtcctctatgagggggcaaggtggaggggcttcagggtgcgcagggcttc

SEQ ID NO: 28622 - DNA, 597 bp, Bovine  19866880700696
  misc_feature (1)..(1): n is a, c, g, or t
ntgttcgtggctgggaagagcgtcctcagggactctccgcaggggggaatccaagcaatccgcttttgaggtccctgtttgtccagagagaggaatttcacccaaacaggattgatttagcagtctctgccccagattgactcacgtttccgtctggggatccctgatgctgacatgactctgtctgctagcatatggaaaagctgtttgttttaaaaaatccatctctcggggaggagtgggctcgtgtgaatgaggcctggcacaaacaccggtgtttgacgttcccgtgacagtcgccagcagtggagggattccccgtctcgggcaggggagccttggcggctcctcggctggaggcccaggggcttggcagtgactgccggcgccctggctggtagcggcaccctgcccccccgcccccctgccctgctcaggagggggccgccctgagagcagggtaggggggcagcgtcagggagggctgtatactgactccagccgccagaccacaaggtggagggactccaggcctgtggaggttgtgataaaggcttgcttctccttcagcacccctttccagaggcgacatggctg

SEQ ID NO: 28623 - DNA, 1198 bp, Bovine  19866880730734
  misc_feature (1)..(1): n is a, c, g, or t
nagatagtgggggacagaggagcttggcatgctgcagttcatggggttgcaaagagtcacacgcaacttagcgactgaaccaacaaccaaacatatatctatatccatactgtgtgtgttctactgtgcttaggtgctcagttgtgtctgactctttgcgacccccaatggagaaatgcccaccaggctcctctatccatagggattctccaggcaagaatactggagtgggttgccatgcccttttccaggggatcttcctaacccagggattgaacccaggtttcctgcattgcaggcagattcttttccgtctgagccaacagggaagcccgaatctatatgtgtatgtaaattatagggggaacattcatacattacataattaatgggggaaagggcaaaacaatggtgtattagccaggcttctccagagaaacagaaccagtatgtacatgtatgtttgagggaagctggtaaaatgactgtggtcttgtcacggagactctttgacttttttaattcactggagacttccccattcccaccagcgcctttaaatagatcagctttcttggactcagtcttccttcttgatttccaggctcactgcctactgtttaaggacacagtccccaaggatgttgtgatgatgcaggataaagtcactctcaggaggataacagtcctggccccaaagctgacccaagggagctgttagaacagtgctctctggaagttcctgtgccttctctgaagatacgagacatctaagagtcagatgggttttcataacctcttagcaatatccaggtccttcaatgtagtgtttctgaaggctgtaggcagactacgcagacccagaactctttatctgtaagtttacttcaaaagcactttgttctggacatatttttatgtccagcatcagcagcagccctgagcatagagctttccagctccaaggaaggcaaagcttaaaaggggaccatctgcagcttaggatttcccagcttctttcctacctgggaagtaaaagaagattcctggtgttggatgctctgaactgagggtctccaggatgggagtggactctcctctgttgagtggccctattttgatctacaaagcccagcatgagctgctatggctctcaggaaccagctattcacacaagttccgcctcttggagaccaca

SEQ ID NO: 28624 - DNA, 1052 bp, Bovine  19866880815879
  misc_feature (1)..(1): n is a, c, g, or t
ntttttcaaaaatagctcaactgtaaacctctttcccctaagccttctcaggtgctgcaggagttaagtgccacttattccatgtctttatagcagtttacttccattttaacattaatgcccactgtatgttagtcttgtcaattctacctcccacgtgtgacaaactcattttatataaatgataatatacaatacatctgtgtggttattgttattattacctgcattcctttctccttaaggtcagctccctgaggtcaggagctatgatttcccgcttttctacctgtcataccctatatgacaccagcctctgctgtttagtagaactttgaggaagttacaaatcctgttaaatgttaatggcataatttatggtctttgtttagcaatgatgtgtttgctcctggaatcccagggaggctctccccctgcttcctacatcctgtgttctggaactccccaccaatgcttgtccctaggggaggcagctgccacctttgctgggactttgcctgttaccctgaaccctgctatccaagatttccacattatctgttcagcttatcaccatgactaattagaggcaccatttaaaagctagcttaattggaaaactgcaaagtaatttagatatgataacattatctccaaaagggaaacattaacttattttaggccataattttagtagaagatacagaattgctaattatctgaaatgaggctgctgggtttttttatttttatttatttttttggctgtaccgcatgtcatgcagagcttccctgaccagggatcgaacctatgcctcttgcagtagaagtgtagagtctcaactattgggccatcagggaagtccgaggctgtcttttttgtgtttttaataattttatttatttatgtttatttttggctatgctgggtctttgttgctgcacaggcttttctctagttgtggcaagtggaggcgactctcaagttgtagtttaaaggctcctcatcacgctggctcctcttgttgcagagcccaggctctcgagtccag

SEQ ID NO: 28625 - DNA, 843 bp, Bovine  19866880841530
  misc_feature (1)..(1): n is a, c, g, or t
ngaattaacaacacactacatttgaccctctctgtgctgactgcctctcaactttctcatggctccagcctgctattccgtcatgcctcgttttgaaaatattctgtttcatttaacaagggtccatgatccaccctctaatcttggccatttttaaactgatgtttcattttcttttcttttgtttttaattttagccggtattgcagatgcaccactttctccactgctcacttgcatacccaataagggaaagaattattttaaaattagagataaataagctatatgtggtttttgttaagtacagcatccttgactgtattgcatatgaattttagttaatgactagctggagagcttctatctacaaaacctgttttagaaattcatccttgatattgaagatttggaaatgttcaatgtaattcttgggactgattctttcctcctgccgcaaagcatagcagttgtgggactaagatgtgacaggatgtcttttctttcactcctgtctctcctcaatcccagagaggtctggttccattgggattttctcttaagacttggatcacagaaagaagcaccaagaaactacaccgaactcaaaattttttaagagaagcataaaattggtccattcaaaggacacatttgggcccattaagttattattgcaagaggtagcctactaggtgattcagttatacaaaataatgatttcattgtaaatatgatatttctcataatctattttatcacacatatggcattcaaactgactggtaatataccaatttgtaaataaagatatttaaaaacggaaaaaaaaaaaaaaaaaaa

SEQ ID NO: 28626 - DNA, 930 bp, Bovine  19866880851853
  misc_feature (1)..(1): n is a, c, g, or t
nacacgactgagcatgcacacatgcattggtaaaatattcagtatgacttgaataaagcaatcaaggctcctgaagagggagttatcattccaaaacaatgcttaggtttcacttactacgatttcaatcaatatcccaaatgggtgagttttgaacttgacaaattcatgataatcactagtattctttagaacttactgtatgccacatatatctatgtgccatatgagttttaattccgttaatcctcaccacggtcccatgcagaaggtgatactattgtccttagagaagatactactattgttctcatgggagatattgccattattctcaaatgcggaagctgaggcaacctgcccaaggttagaaggctggcagatgccaatacaggatttgaatttgaacggaaatccacctgaagttcctatgttctaaatgccattgcaactgtcttttaaaataaaaactggggaaataaatagataaggctaccaaagaaaaacacgaatggaggcagactagccccgacagctatctctggggtggggtgtaatacacagtgtgatattatatgaaaacagataaagggactcaggggaacaaaaccaatcactgagaaacagaatctattgtgtacattaatttaattataagtgtattcaaaatcagacagatattttaataagttgttttagcacaacaggctaagaactgcaaggggagggtaaagattcactttgaattaataatttctcctttcaccatatacaaacagaaatcctaagtggaataaagagttaaataaaaccaaattgtatcataaaaatagaatgtgtattattaaatatttatcaactctcaatggagaagaaaagcttatatagtaaattacaaaggaaaatagcaacgactcgataagataaaaa

SEQ ID NO: 28627 - DNA, 915 bp, Bovine  19866880911188
  misc_feature (1)..(1): n is a, c, g, or t
naatcttcccctagtcgagccttcagatgagatcacgggtctggcaacagctgacatagggaacccagctgagctgagctcggattcctgacctgtggaaactgtgagataattaatgtttgttctttaagtcactaagtgtgggggtaatttgttatgcagcaatagatagctaagatttaaaaagttacttaacattaagtaactttcccaaagccacaataatgtaagtaaactgattaatataacaaccaatatgaattaaaccctcagaaataggtaatgattgtgacacagatgaggaagaggataacaacggctgattgaaatgaataagccaacaaatgctgtatcaaaactgtggccaaaagggctttctggatgaattttccaaagtgcatccttcttcttcagaaaaatgaagaaaatcaaagtctgctttctccagctttgtctggatgcaaagaagttcagcacaaagcagcacatacctactccttccaaacagggcggaactgcctcaccgtgtccatatctcaccagagaaggtcctggtgttgtcatgaagtaaatatgcacagcagaggggatccaaactccagtcactgggctttttaaaagcttgtatttatatatttgatgtgcaacctaattagaccagagcatctttaattaagtgtgtcagccccagtggaagccacagagttcaacgttaataaagctgataaaggtttttgtttcccagacttcttttatttaatgcctcgaccatgttaagccaatctgtaacatatgggcagtttctcccactatggatttatcatttgggtgtttctttctgtgaattaatacaatcaaactcctgccagtgttaattatttttctccaagaagcaaacccagaattcagcaacaa

SEQ ID NO: 28628 - DNA, 1839 bp, Bovine  19866880993370
  misc_feature (1)..(1): n is a, c, g, or t
ngtgcccagagcaggacctgtttctccggaaagctgtctgtgacttggggggttcttttacaaagttaggtgattttttcctgctttcctcagagtgagtgttcaaagagaaggactcagaagatcagggagacatgagttcttggaagggtctaacccagcacaaagaagatgctcaaacactcaacatatgctggtggaatagatgcaagcagaggattattccagaagcttccttctctgagtgtatgttggctttgggcaaagatgcaggtctccccttcacaaactgttttgaaaaataaactcttttgaacggggcttagaattctttggcaggaagacattggacacttggaaatattactattatttctggagccaaatttagcaaggacggctctgtctttaattattggttgatgctgagttgtacaggcaaatgattacatgcacaattagttgttcccacaagtagccaattatgggaacgattatttaagaaaattgtggctcctgctaagggactttacattgtagcctcaaagtacatttctgtataaaatttccttttattgcatgtattattattttttcccttctcccgggctgctggagaaagtggcccttgtggtctcatttgtggggagagagtccatggaaacccagaactttgggacatgttgagactcgggcaagagtggggttgacaactggggttgacagctcttccatggccccttttgctctggagactgtgtcttaaccccaaaggtggaatgactggaggaagacttaagtctctgaatggtgacaagggatcatctggaggcacatggagccctgtagcacagccacgtgttactgttgactcagtcttggccttttcctgcttccgcctgactgtgcttcttacctaggcctctcctctcccggagcatcacagatcccaccatgcacccaaaccgtcctaaaaccataacctttcagaatcagaggggcagaaacatcatctggtccatctatctcatttcagagatgataaaactgaggccagagaggagaaagactcgcccaatgttcataagcccagctgaaacgtgaccccagcgtgccctattccaaagccttggctctttccactgtgccgtgccagcttctgggggcagcagccatggggcagcgtggccacaagcatgttgtgatcgttacaactgaggggctgatggctccctccaggcctgaaacacactgggaaccatgccaaggcacggggaagggaatccagagaaacttctaggttcctctcgttatgtacctgcgtggaattggaaaatatatttacctgagatccccttctccctttgaatatttcttatgatacagaccctgatacctgcatgagcaaccctgacctcatgtaggagaaaccacaaatccaaatgccagtgtttggcatctggtccataaaaccctgttccgtccccctaaatgttcagttgggtttctgtgttaactgctgtggataaagagtctttgcccgccttgttttcatagtgacacctactcttctgtcctaatgtggctgtattacgtgactgggcccaactcttctgaaccctgcactggtattttacagtcatacccctgccacagcctcacggtgcgtgaaatgtactctcctgtttttgaatttggatttggccacgtgatttgctttggctaaagagttgctaatatatgtggtgtgagcagagctttggaacatgcccgcacatctggcctgctgtttgtgaaggactgtatcctcagtcaccccacttactgggccacccttcg

SEQ ID NO: 28629 - DNA, 1309 bp, Bovine  19866881006846
  misc_feature (1)..(1): n is a, c, g, or t
natcgaactcacaacccctgtgttggaagctccgagtcttaaccactggaccactggagtggttgggggcactcttgggggcactctcacaagtcttctctaattaaaaactggcagatctggttcttctttgctgccgcacacaaatggcactgaatactattgaaatttcttatcacagaagtaggtccgtatttctcctcactttctgttccctcttctcatagagtcagaaggaaggtctgccttttccaaggcaaaatggaactcctgatttaaattcaaaggagaagtaagaatttatatgaatgtattttcatgtctttgtattcttcctttcaaagcagttcaaaccaaagcattaaacgatgcttaagaaacttttctttttgtaaaaaaaaaaaagatagtgggagtaggaaaacaaaaacccactacggcctgaaaatacacccccacacccacccccgcagcccgccactgccctttcagttccctttaataatgagagacagctcacgatgactttcacttcagcatctcaaaacactctttctgtttctggcgcctccttcatttataatctgttaataaatgtctctaaacaacctgaagctgaaaatgccttccaaaatgttgtcacgggaatgaatgcttctctattaattctttagtcatgttgtgacaaaagctctctctctggagctactacttttgaagaaagaatttggttcctgctcccaggtttcttggcaccagaaatgggactttgttgagcttgatcgcgccatctaaagcggtacaaaactcaagactctcttctgggttaaaatctgtcctaagatggtttattctgcccctctcccccagtccccatacacgttcagctatatagtaaaatgcctcggccaaaagcttcatctcacttccaagacatagcatcctgaactctcatctcctacttcctcatcggcacttagactgcaggcaactcaattctcttacctacagacttactaatggatctagtgcctctggccctggagataaaagacgctctaagggcacccagtccatctgtctgttctgtttctccttactgaatcagacagacacatgcggcactgaaggtacacaccatccaccacagagaagcctgtaggagggagcgattatttggcaaaacgggaaaaatattacaaaagaagggatattgggtcctgaaggatggaaaggaataaaaagcgagaggtcaagagaggcagagatgagaaacgcatatattcacagatatgtgtcacactctgta

SEQ ID NO: 28630 - DNA, 2009 bp, Bovine  19866881160392
  misc_feature (1)..(1): n is a, c, g, or t
nctgctctggcccacgtcccgggaagcacactgtgtgtggaacatgcagtctgtggagcaggcataccgcctgggacattcttatgctaaaacagttacttgtcatctatgtggttttataattccccaagtctggaaacgctactccagactgcctgaccttgaatcctggccttgcccttacaatctgtgtgactctgagccacttactgaacctctctgtgccttgtctcccttgtaaaatgaagatggtgttagtgactttgaaaggttattgggaggattaaaagatttttaaaaggtcaagcatctagtgtaatatttggcaaaaagctctcacggcatggtaactattaatgttgtctcccgagaactgttttcttgggttccaagatcgggtgtaagatgccactagcagtctcagtgtaaaacaggagggcagctgttgcaggtggggccagtggggtcagaggtggtgcagaacgacagttctgagcacaggctttggagctcaaggggtctgggttcccaaggcctccagttcctaacagcaggctcttccacagactctttgaggtgacatcctgtgtccttattgacaaatggagttatgcatggcccctgcctcccagggctgctgggaggaccacccaagatatgtgtagattgctcagaacagtgcctgaagtatagacaggacctctcccctggaaccccagcctaatggggaatagtgacgggccaagattcctgttccgcgtctgccacatattgtgtaagctctgtgactctaaacaagttactcgacctccatgcctcgtcttcctcctctgtaaatgtgtaccatagtacgactgacgccccgggtgatgatcggatgagcctagcacttaattagttgctaggataagatgttggggtttcagcagctgtgattccttttctcctgcagactctccccatgttggccccggtttctcgccagagtggattctcaggcagggcgtctgccgggcttacagcgagctgccactgggagatgcactgtgtccgtgacagctccaatcagctcggaacaaaagaacgcctggcagtcctgccgaccgccttttctcaggggcgtggggttctctcgaaggtcgtgggtgctatgcttttgtttgttgttacttatggaacgaccggctttgtgcttaggtatgcacgtgcacacacagacacaccccgtggtcactgtcctgcatgggcccaggtctgctgtttgctcctctgcacccacagggtcaccctgaagaacacaggtgtgacctaaaggaagacgtctccctccacactcgagaggggagagaccttgttagcttcctgatagaagaactggtagtaaaacctattgaaataaccatgagacccttactaagcgctcgctattcactccaccacccattcaggattcatggattcttttagcaaatctttaatgaatcacttttccctgcaaagacaggaagggtcatcccatgggactctgtggggaatggggtttttttgttttgcacagagcttttgacctagttgaggatggtgcatgagtgctttgggggcaggggagagattcaagggggccgaagggagctggaaaaacaaaccaggcttatgggggtttctactgattctgtttggaggctgccttaaaacctgtctccagttcaaaaatgtccatcatgtacaagctagcgtatccactactaagggtttatcctccagacctgtgtgtgagactgttcattcaacatagatttgaggaacaaaagactggaaacaaccaggatgttcattaataagagaatggtaaataaatgattgtcgtttaaacaatgggatattatgaacttgtgaaaaaagaataaagtggatctctatatggtgacatggaaagaactcaaagctcttttgttgagtgaaaaatactgaaggcgatataatgagtttggaatgttccccttggtgga

SEQ ID NO: 28631 - DNA, 1495 bp, Bovine  19866881224200
  misc_feature (1)..(1): n is a, c, g, or t
naatactggagtgggttgccatttccttctccaatgcatgaaagtgaaatcactcagtcgtgtctgactcttagcgactctgactcttagagcccaccaggctcctccgtccatgggattttccaggaaagagtactagagtggggtgccattgctttctctgatatatatctacatatatatataattttatgcttttatttttccaagatgcaacaataaacataaattgcttttaaaagtagaaaagataaatagtctcaataagtcctgcaaacctgatcatgttcatttcctagttcaaacatctccacagtcatcacgttctctggaaggctttcatttattcccccaaggtagattcccctcatgatggtagagaaccccatctttccctgtactaacgcttttcctcctgcactctaaactgcctattttctgaactatatctcatactagaccataagctcaggcagtacaatctcatcaattccctagagcggtggttggcatatatttggtgttctcttaaattgagatgagcaaatgaatgatggtgttatgaatttagccacatctaccacttttttcaccatccaagagacgtagaggggctcacatctttgcaatctaaatgtgtgtctccaacacttaagatttttgataattaccatgcctgaaccattccttagcaattgctcaggtacaagacgctgtataaactcatttcaaggatagtttaagcccctgaggaaataatcttattcgatgaggaatgacttcgcataaaagtctatactgcttgaaaataagctgctatctatccacagggaataatttaaaataactttcaaaagctgagagaatcatatacccagtcgatattcttcaggtgtctaccatgtgccaaaaaatcaattcagctcatccagtgtattctctttgacaatatttgcctcttcaaatactggtactgacactcaagaagttttatcactgactgttcattctggaattatatgtgtttcaccttgggtacaagtggtacatagaggaatatgtcaaattaacaagttgtgttggttcttatgtgagtttcatagtttgttaatgttttgaagcaatcgcaggaaagagctctgacaaggaaagagaaagacttaacaatgcttgaagatcaagaacaaagctggaaacgcattcaagtgccttcctttaatctgagtagtggcccatggtggcttcaagaattattacctttccagtatgctaacatgactggcaaagctgcaaattacagatgaagaaggtacaaaatatttcttttcatacagacgaatgcagagggctacgctctgggttagatttcatttcagtgaaaacggtctccattagaagtgaatgacctcttcgagctacagagagaagaaagaagtaccagcccaatttgaaggctgtaaggatggactgaccggtaagagcaaacatcagccag

SEQ ID NO: 28632 - DNA, 1862 bp, Bovine  19866881243249
  misc_feature (1)..(1): n is a, c, g, or t
ntattgtatatatacatcaaagctgttaaaaagtatgtacagtatgattttcttttctgaaactaatatatagcatataaatatgtatttcttaattttagagaaaaattgcgctgtgaataatttttaacagccttaatgaaatataactcacgtaccatactattcacccattttcactcattcaaagtgtacagctcaatggcttttagtatattcacagagttgcactacaatcaattttacaatattttcatttcccccaaaagagcctcccccattccttccacccccaggtaaccactgccctactttctatctctgtggatttgcctattttatttcatataaatggaatcataccgtaagcagtctttgtggctggctcctttcacttagcatgttttcaaagttcgtcagcaccgtggcacgtatcagtgcctctttttttatgactgaatatgtacacactgttttttgtactgcttttccgtcctcctcatatatctaaacatctttccaagacattaaacattcttctgtgacatcattttaaatatttgcctgacaatctgcggtgggaattcatctccagttgcttacccatttccctgatgttgaacagtcctgttcttgcattcaaaatgaccaccaggccagacattaccgtcaattagggtgctgctgcctaggctctgggcttggttttaaaggctacagaggcttctggctccagaacttccttacttcatgacttaattcgtttaaatgaaacccagttgagttcaattcaattttgatggctcatctgtactgaacacactctatgtaccaggtacgttgctaagcattttattttctttacctcacttagtgatcaaaacctatgcaagagatccacacgttagcctcattttacagatgaagaaactgaggctcagagaggttaaggaatgtgcccaaggtcacacagcctggtagcaaagccaagactggctctgagcccttccttggagctggtaaagggtataactctgcagatcgccccagggggtcaccttgacccctcacagggcccccctgcaggcctagggaacaggagacactcctacatgcccagggaggcttccgccacccccagacccctcccagccagaggccctggggcctgcatttgagcccagctgcgtcagaccacagagctgggtcctttctcctgtccagcatttcccccgtctgcagtcacttgtgtatctctgtcatgatgttcactgtatttcctaccacttctgttaaatttacaaaatcacattttcatttaaatcaactcactctttccctagctcatttggaagggaacccatgacaacccagggcaaagccagcgttgcgcgctgccaaaggagaaagtgatgagcgccgagtgctgtgatgaagcacaggtcccgagcactggcctgatgctgttgctcttgccaagaccccatctctcccttaaagagaacactgggaaagtattcagtgttaagggtgtagtggcacctaactgagacgctctccttgacccggctgggaagactggaagagaagaaaggattaactttctcctggtatgattcagggctaacgagtgaacagcagggcccacagaatctccacctgagcccctggcctccgcgcccccccactctgggaagttccacagtgcagcgcttggagcatttcctggctccagggtgcagtgggggcggggtggggggctgtcacccagagggcgagtccccaggccgacccttccccctgcctcacagacctcagcacagagaggaagcactctcccccgacgcccgcagcacgggatt

SEQ ID NO: 28633 - DNA, 910 bp, Bovine  19866881246365
  misc_feature (1)..(1): n is a, c, g, or t
naaaatacttcccacttatgctaatcaggggtccttctgaggatttcattagactgaattaacactttgagcagactttctcaaaatgaggttttccccaggcatttactaaaccagaacatctacagatgaagccccgacactgcattacaacaaggctctcaggtaatcctccacacaaccaagttatgagaacccccttttagggcccagttctgttggggacaatagatgatactgagccgcccaggcactgccctcctccagaagccagcaccttccctcgctaacatttcctggagctgccacgaagctcctatgatttccagatcaaattaatggttgcttgatggtgtctccaaatctagattagcggaccttgaactctagaagaactggaggattgagggatgctcaaacacacacctaatttggattttccagataaaaaacaatacagtaaaaagtatagcattttgggacagttctggtttgaggtagcccatgatgttaagcttgcggctggagggctaaaccccagacctccctttctaagatcagcatcatcacctgacattctaacagaaacaaaacaggctcccaaagccaacctagcttggaatccatgctctttagatgctgagcttttgtttacccctgaataaattcaataaagtgcagtaaccattataataaatgtagatgtcactaattacaacactagattttaagtgcaacgctagtgtctcaagtggcctttaaaactgagtaaaatcacagccaattcaaatttaattaaaactatcagtttaatttagtttgcctttacaataaaaactacactaacccattaactgcattctgaatctcccattacgcagagcaaccagcagcttgtgggcctccacag

SEQ ID NO: 28634 - DNA, 2524 bp, Bovine  19866881300597
  misc_feature (1)..(1): n is a, c, g, or t
ntgataattctttggcgattcttttccttatagtttattataagatattgtatatagttccctgtgctatacagttggaccctgttgtttatctattttatatagtagtgtgtgtgtctaatgcaaaactactaatttatccctcccctcttttcctctttggtaaccataagcttgttttttttgtttttttgtttttttttgtctgtgagtctgtttccattctgtgaaaatgttcatttgtattattcttttagattccacatataagtaataacatatgatatttgctttgtctaacttacttcacttaatgtgataatctctaggtctatccaagttgttgaaaatagcattatttcattgtttttttatggctgtctcactcaagcttctcaagagtgttacccatatgtctttacatccacattccccacatccccctgcatgcatcatcacactgcaatcaagccctcccaccaaaacactctatagaaaacatgccccttaaggtttccaatgacttactgtttattacagccaaaggactctgttgaccacaccattcatgaaatacaattttccattaccttccataacagcaaagtctcttgttttgcctcctacctctcttgctattccttgtaaatctgatcttctgtctcttcttccatcctgtaaatgtccactttctccagtcctcctctcctggactcccctcctatttacattctaatctatatgccaatgatttccaatctctatctccatgacagatcatgcttttgagtctcatgctcacatgacctactgctgtgaatatctatacctaggtgtcccacaaacactctgaactcattgtcctttccactgaccccacttcctccaaccaatgcttcttcctcgattctctatctccactactggttccaccacccacctaatggaccaaaacagaaaccaccaagttatgcctcaactcctgcctttccctcaagcctacataatgtcagtcaagtcttacttgagaggaatgaagagagtataactgaaaatcacattttttagcctcctttgcagctagctatgaccatataattattcaggccaataagaggaaagcaagattgcatggaactttcagcagctgtttatagaagattactcaacttttgcatctccttttctgcctatttcttccatcctctcacacaaaagatggctagagctccatggccaccttggatgcagcagtgaccttaatgggagaagccacagctgaagatgaaagagacaagaagaagcctgatatcctgagaactttggagagcatcacaccaatcttggactgcctaactccaagtttatttcatgtaagaaaataaaccttgtttcaattcagttcagtcgctcagtcgtgtccaactctttgcgaccccatgaatcgcagcacgccaggactccctgtccatcaccaactcccggagttcactcagactcacgtgcatcgagtcagtgatgccatccagccatctcatcctctgtcgtccccttctccttctgcccccccatccctcccagcatcagagtcttttccaatgagtcaactcttctcatgaggtggccaaagtactggagtttcagctttagcgtcagtttaggccactgttattgtacatttcctattaaaagcagccagccataatcttgactagtgtaccaaattacgttgattcttttttaatctttcaaattccatccatttctcttcatctgtattaccactcctttgcttcaagtcaccaactgacactccttccaattaccaaaagagtatattaactggtcaccatggcttctaatcttcctccaaactaatccactgtccatttctgaggggcaatctgagattatgcaacaaaagtgttaaaaatgttagcatttttcaacctagaaatttcacttctcagaatttatcttgaggaaaataataagacaggaatacaaataattatgtttatggaggttaaaagcaatatttaagttgtttataaatggaaaaaatctagatgtccaacaatagggggtcagttagacacaaaatagtgtatcgatttaagtgaaaattaacctgtcattaaaaatcatgatgtagaataatatcttaagatacataaggaaataatcattatatatatgtataagaaaaataaaacaatatatatcctatgttctaatttgattttttaattatatagatatagaaaatactttcactcatatttgtacctataccaaggaagctaacactttaattaattcagatatcacatcactatttaataaacatcaagtatatgctaaatgtataatatatgtataataatatttatcttagatatattagatatatatatctatgctgctgctgctgctaagttgctttagttgtgtccgactctgtgcaaccccatagatggcagcccaacaggttccgccatccctgggattctccaagcaagaa

SEQ ID NO: 28635 - DNA, 973 bp, Bovine  19866881311377
  misc_feature (1)..(1): n is a, c, g, or t
natgattttcccccatagcaccttccctcttacctacctgcctcctaccaaattgctattaatatcaacagttctgctatgattaggtgcatttctagaaaaactcatcaaatacttgattataaaaacagtgctttcagtgggggagagtgagtgaaggagtctgggagatttagacttacagcaggaaagttatttttctgtaagcaatgtcagtgaggtttttccccacagttataaagacataaagctgcagcatcacattgtaaaggctgtctttgatttctctagcttttggctccgcagctatagttcttccagatacacttttatgttaacaaggtacagagttcctcaaacaaagcagccttgttgttggccccggcagcctctgtcaatatcgctctaggagaaatgctcaactcagtctgcatagggcctcaaatatctgtgttgggaaaaacgaaagataagattcgccatacttttgtgcactaaaaccaattaatatctatactttgaggtgataaaattaagaaagcatttacttttttctgttttctttttcctagagctttgaaactcacaactgtactacatctctacaagaaggaagccttgggctagatataaatagtatgtgtattttaagataaaaactgaaatttggaaggacattccttttcagatttctctcacccagtaaaacatttctgtaccaggattgtgattcaaaagtatctcctgttttcagaaaactgaaaagtaaatttctgttgaagtggggaagctaagctaatataggtctcctttagaatttgctagaatggcatctaatcataatcacaaccaaaacaaacaattaaataatttaactgagcatttcttctgtgccaggcaccatactaaggtggttatatgtatcatttccttaatcttcacagcagtcccatgaacaagctcttttcatgag

SEQ ID NO: 28636 - DNA, 963 bp, Bovine  19866881345677
  misc_feature (1)..(1): n is a, c, g, or t
nacctgcatttcttacccattcccaggtgatggtgatgctgctgacccagagaccacacttggagaatgactgtcttagggtatatttaaaagaactgggttaaaacccgccattcagggaacttaacttgaaaggcgtcaaatcaacttttcccactaaaaacaaaccaaaccaaacaggtgttgggcctgactaagcagatcactggtggacttcaagtgtggcctgtagctgcagaaaattctaagcaggaagaatgttattggaaggtttgaagggaggagagtgttatgaatatgaatatgactattagattagagtggtcatgatataaatcttgaattttgctaatggtggccaagggcttgccccccacctggctttcctggtgggcagtgactcactcctagaatgagccaggtttgcaggctactgtttttttccctatgtgatgccaactgggttatataatgactgatttcttcaatcttttgtccaataagtatttatgagcactgaccatgcacaaacactattctaggtgtggatgggctagaaggatacaatttgtttttccctcaaaaatatagatcacagctggttacacataactggattaatataaaaggtgaaatgaaaaagcaaattcaaaatttccaaaggttgtcctttgcaacagaggaacttactaaatacgataaagaagtctattttaactcagattatacaaaattaaagtgacaaatgaatgacataagtttctttgaattgttttccacttgaaattttagttctttttaaaaaatattgatagcttgtagttagtttatagcaacatcctaccttatattgtgcaaattctagtcttggttgaggatagtctccaaaaatttcttgagtcactctctgcactctttctttttcaactttgttttcatgaatgatccttgaatccactatag

SEQ ID NO: 28637 - DNA, 1166 bp, Bovine  19866881362946
  misc_feature (1)..(1): n is a, c, g, or t
ntggagcctgtggtcactgtggccagcgtgcatcagtgggatggggagatgagccagagagaggctcctggcggactcgtcagtcttgccgccatcctgcctaagctcaaaggtggttgaagtcaccagcattggagtcagggctcagatctccagttttcagctatgcaactttgagaaaattaataaacctccctgggcctcagtttccccaactgtgaaatgtgtgtgccacaacttcatagggacttgtgggaagactggaagcgctgtgtcaaaagcacttgcacacagcaggttatgaagtgttagttctcttcccctccgtcagagagggccagggtgggtgaggttcaaagccaggtgactttacaaactgcagggaagttcccctgccctcgcctcagcctgcttctctggacctgcttagtcctgcttggaaccttatatatttgggcatttagtgagacagagaattgttacattttgctaccatcaccagtaaacaaaatacaaggctttccccaaaggaagccatgcacaggggacttagtaaagagttctggcagcccgaggatatcaactcccttcacccactcaatgcccctccccttccccccatacttgccccacaagaccccatttccctacaaaaaatcagcacctctgtggctctgaatttcaaattcactagtagcaatcacactcatagctactgattgttgaggtccttgatgtgctgggcgatgttcaaaggtatttacacacagtatcatggaaaccctctgatgggccatatcagcccattttacagatgatgaaactgaggtccagagagtttgactagcacacccataacctgttagttcagttcagttcagtcgctcagtcgtgtccgactctttgtgaccccatgaattgcagcacgccaggcctccctgtccatcaccatctcccggagttcactcaaactcacgtccatcgagtcagtgatgccatccagccatctcatcctctgtcgtccccttttcctcctgccccccatccctcccaggatcagagtcttttcaaatgagtcaactctttgcattggaggtagccaaagtactggcgtttcagctttagcatcattccttccaaagaacaccaagggcgatctcctttag

SEQ ID NO: 28638 - DNA, 903 bp, Bovine  19866881367639
  misc_feature (1)..(1): n is a, c, g, or t
ncatgtactgaccctctcctgtgtgcagaatgggtataagagtgctccctggttgcagagtacggcagaagccaacacaatattgtaaaacaaatatcttccaattaaaaattttttaaagatttgaaaaataattttagtgagagcaaaaagtcttctgtaccattaataattaaaaatgaaaccatgtttatttcaattaaaaaaatgttactccaggggctaaattgttaatgtaaggctcccagaactgaactgggtccttgggaaacccagcctgagtatggggccttctggatcagtcctctaaacctggaccttacctggagggactccaccgtggtggaaggcatggtcagtggcctgggccagcaggtctctgggtgatgctggacaaggcgatggaacatttctgagcctcagttccgccatacgtagatggagctgggactaggaatacttaccttgccgtattgttgtgagtcaaccttgccaaaatgtatgtgagagttcacaccagcgcttattgtatccagcacacacatttaagagatggtctcagtaagccacccccacccccaccccgaccccttcacatccctggaatggctcaaataagttcagataagtttcaaataagcctgtgatgattctgctgcttctctttcaggtgaagtctactacaggagcaaatacctgagaagtgatacctacactgccaacatcgaagcaaacaggattgtggtgtcagaattcggaacaatggcctatccagacccctgcaaaaacatattttccaagtaactgtccgttttgtatctagtcccgctttccaatatccttgacggtcgagacaaccagcgtttgctcctctgacggtgtgtttagggggaggaaaacttc

SEQ ID NO: 28639 - DNA, 770 bp, Bovine  19866881395472
  misc_feature (1)..(1): n is a, c, g, or t
ngagtctttggacgtcttgttacgtagcattgctgtggcaatagctgactgagattcttgtcaagctggtaagatataaacctagagttgttagtggtcattgccccccagataagagaagaacctacctgaaaatgaagtcaacagaaagaaaaagtcaatagacagaaatgaacagtgtttgtatacatatttaaataggggcttccctggtggtccagtggctgggactcatgctcccagtgcagggggcttgggtttgagccctggtcagggtttaaggtcccacatgccacaactaaaagatcccatgtgccccaactgagacctggtgcagtcgaataaataaataaaatattaaaaaaaaataaattcaaataacaaattctaggtacctccgtggaggtccagtagttaggactccatacttccaaagcagggagcatgggttcagttcctggtctgggaattagattccacatggcaatcaaccaatgaataaaaaatttttttaaataaaattaagtgatcaaatgagtccactcttagacaatccagtttattaattcaaaaaatttccaacagttttatcgggcactcaaaacaggtactattctgttttgagtgttgggaagagaagagtgaacaaaacaccaaaaatcctgccttcgtggagcttaccctctactggcatatgtaaacaaagaaaacatgaaatatatagcatgttagaaagcgataaatgctaaagaagaaaatataaagctgaa

SEQ ID NO: 28640 - DNA, 2264 bp, Bovine  19866880512459
  misc_feature (1)..(1): n is a, c, g, or t
ntatgccttttttccctcctctcccttctctgtatcctcctaattctcttgtcccacccccgtctccctcttcacctcccttcctcctccacattctcccttatgttgatgctcaaggtcacagccacagagacctctcctcatctgcccccaaagggtctttggctctgccctgggccggagtgagggagatatccagagcctgaaggtggatgggagtccgagacctgggcccgctgagccgactcagattgggaaaggcacacccaccgcagtgcatagccacactggtccccagcacggacacacagccctctttcctgtgtttcccagaggaaacacattgtcgtcctggcaggaggggcatccagaggtcatcctgtcccttcccctgcccccagcagctctggagctgggaagggctgagtggagtttgtctctctgggagagtgagtcccacactatcctcttcatctccacgatgaccagtgtccctgagcccgcatgacctggaagtcctctctcaggtctgccctgcgtcctgcatgctgtagggctgggcaggtgaatggttctctggtcttgagccctccctgtgatcgggtcccggctcttttccagtctcagcgccgttcccacatcctttccctttgcttgtgtttcagcccctcagacgtggagccttgatccttgccttcccatccctgttcttcctcctactttcctccatgttccctggggttgcaaactaccatccacatctaaagctggactggagacctgggctgtgcaggggtccctgcccagggtcctctccagaagctccccttcttgggaaggactgggccttctccctctgcagcttccggcagctggatgggctggtgggcagcgacaggaatatggatgctgtgtggattacttaagtctagtgtggcctgtgggaggaccatcctggggttcctgggggtaagaaaaagtcgtgattggaatttattccgtgtccactgaacactggacactgagactggccgagctctagccagaccctctgcctgaaggagaattgcagtgctttcccatgcgggaggaagaggtcccagggcagctgcctggtgaggccagaggaaggaaggttatgtgtggggcctgcaggggccggagctgggcagccgtcttccttgtggtggatgcggtgattgttgtgacacaacagtaggcctcgcgtgactgtcctccccattttctgagccttcaggcccagtgagagttaggaggcatatcccagcccgaggccaccactgctccatcccttgctctcagcaaaagtccatggatggggacccttgttgttcaggtcccaagttgtgtctgattgtgtctgcgaccccgtggacagcagcacgctctcagcaaaggtccatggataggaacccttgttgttgttcaggtcccaagttgtgtctgattctttgcaaccccgtggactgcagcatgccaggcctccctgtccctcgctatctcccagggtttgctcaaaccaatatccattgaatcagtgatgccatgcaagcatctcatcctctgtcacccttttctccttctgccttcaatcttgcccagcatgagggaccccgcccggtcccttttgggcgaagaggcagctttccgggtctggtgagcaaagggtggggccagagtccctttagcacccagagatgcttctagactggctcctggcctcaaggcccctgactgccgggtctccccatccacctctgggtgctgtcctgtccagctgagcacccatgtctcccatcgaccctcctctgcaggaagccagtgaacatgaccaaagccaccgtcaactaccgccaggagaagacccacatgatgagcgctgtggaccggagcttcacggaccagagcacgctgcaggaggatgagcggctgggcctctccttcatggacgcccatggctacagcccccggggtgagtgcctgccccttcctcgtgggccccaggcactcctgccccagactcctgagccaacagcacagagccccccatcagcagattctgtaacaccccgaaccacaggactaagcatcctgctgggtaccagcacaggccctggggatacagagaaggcaccggtgttatctttgcactggaggagctttaggaaaatggaggtcttagacatagattcatctaaaaggagtgtgagttcccatgttaattgtgagaagtgttctggaga

SEQ ID NO: 28641 - DNA, 2385 bp, Bovine  19866880570556
  misc_feature (1)..(1): n is a, c, g, or t
ntctctggccccggattgaattcttctcctccgggggccaagaatcccggtgtctttgtgtgattcaacaacaacctttcaaaagcaagatcctctatgaccgacctgctagaaaaatggaaataaaaacaaaaataaacaacggggacctcatcaaacttaaaagcttttgcacagcaaaggaaactacaaacaaggtgaaaagaaaaccctcagatgggagaaaataatagcaaatgaaacaattgacaaagaattaatttccaaaatattcaagcagctcatacaactcaataccacaaaaacaaacaacccaatcaaaaaatgggaaaaagacctaaacagacatttctccaaagaagacatacagatggctaacaaacacatgaaaagatgttcaacatcactcattattacagaaatgcaaatcaaaattacaatgagataccacctcacaccagtcagaatggccatcatcaaaaagtctacaaacaataaatgctggagagggtgtggagaaaagaaaactgtctaggattgctggtgggaatgtaaattgatacagccactatggaagacgataaggagattcattaaaaagctaggaatgaaatcatcatatcacccaacaagcccactcccaggaatataccctgaagaaatcaaaattgaaaaagactcatatatcccagtgttcattgtagcactatttacaatagctagaacatggcagcaacctagatgtccatcaacagataaatggataaggaagctgtggtacatacagtgtaatactgctgctgctgctaagttgcttcagttgtatctgactctgtgcgacaccatagacggcagcccatcaggctactcagccataaaaaggaacacatttaagtcagttttaatgaggtggacaaacctagagcctatcatacagagtgaagtaagtcagaaagagaaatataaacattgtatactgatgcaaatccttgaaatctagaaagattgtactgatgaattaattttcaaggtgcaatggagaaacaggcgtagagaacagacttatggacatagggaggagaaaaggaggaagagggtgagatgtatggagagagtaaaatggaaatacaatctagaaggctgggatggggagagaaataggagggaggtcccggagggaggggacatgggtgtacctatggatgattcttgctgatgtatgacagaaaaccacaaaattctgtaaagcaactatccttcaattaaaaaaaaactttaaaaagctaaaaaaaaaattggtcattccacataataagtatgacacaagaataagcatttagaaatctgttcttctctaagttattcccataaatatggtggtatgaatatgttagtgcactaaattcaattaaagtgctaaagaacaatatttttacttcttttacaatcaagcgacaggaatcaaatagtctatgccactaaaaacaaccgaataaaccaggaaaaaatatgaaacaacagtttgtgagacactggatatctggctatggaggacagtgatccctgaaagatgtaaaccaaatgagatacattatacaattgtccagcttactacctttagggagtttgcaggctgccatgcagggaggaggaaaacagagcccagcagagtccctgataagttgacacagatgcaagttcaaggagacaaaaaaaaaaggaaaaatcttcacacagagataactttggaaatctgcagagcatccccttaaatagttaagtattattcagaatatatatgaaaggaaagtaacgaaaggaaataaatctctggaaagaactagagattaacgagctggtgctcacacagttagcaatattgtctgtttccaccaatgaatggaaaaacgtgtgagtcacagggcagcaggtagagtactcaatgtctaatttcagtggcaggaaataatcagcactagactaaataccactctgattccaccgtaaatctttaaaagatgctccaaaacagtcaaagtacttcggagtgatttaactgaattccagaaaaatagctaaaaatatttatagaaatagaaaaatatccagcaaccaacaaggtaaaattcaaaatgtctaatatccaaacaaaaatcaccaggtacacaaaaaggcaggaaaacagaacccataatagagacaaataaattaataaaaataaaccaaaaatggcacggatgttatagtgatcagataaagacattaaaactgtatattaaatattctaaaagttaagcggagataaagatataaaaaatccaaattattcattgccagtgagccttttctataagaaatgttaaaaaaagtcaagcaaaagaaaag

SEQ ID NO: 28642 - DNA, 751 bp, Bovine  19866880574093
  misc_feature (1)..(1): n is a, c, g, or t
ntttaattcctgggtggggaagattccccctgaaagaggaaagggcaacccactcttagaattcttgcctggagaattccatggacagaggagcctggaggagcctacagtcggtagggttgtaaagaatcagactgaagcgacttagcagtggttcttcaggaggaggggttgtgagaggcaggggcctggagcagggcaggcagaactaatgaatagtcccaactcgtgtgggaagggacgcgtggaacccctgctggaacagctccgtggatcacatcattcttccctgcatggggggaatgggggtggggtggggggtgaggctcataaggaccacgtctcagactccaaggaaggcagggactggcatcctgagatctttcaaatccaaactcttgcggcttgctcatctcaattctgcccacagctactctaggtccccttgccattctgccccctctctgtaatttccccccatctctctgctttcagtttgattaacagaaggttataaacaagtcccagaaagaaggaaaaccagcatctccccagggcagctgcagtgttttggcagacggcaagttactctgtaacctgatatttttgatatatatttttttaatttttgtatagataaacagaactaaactaattaggttttttttttctttctttctttcctcaggtcgggctgacaataggagactcttggccccccaggaatggttaccaggtttcaataaagggt

SEQ ID NO: 28643 - DNA, 3842 bp, Bovine  19866880595092
  misc_feature (1)..(1): n is a, c, g, or t
naaggagggaggcctgtgtgaaggctctgacgcttatctaggcacaggatggtggtggcatggaccaaggtgctctaaagataagaagggaaagaattctggactcatgttgaaagggagccaacaagacacgttaacggattcgtggtggaataagagagaaaacaggagtcaggatggcttccaagaacctgaaggatgaaattatcattcaatgagatgtgatgggtaaattctgcatgtaaatgtcttccttgaaaggtagggcagtgacctttagatcaggtgaattggggtgaatgggtggacaatctaaccagtgcccagattcagcaatgcagggggtgatggaaagacaggctgaggagaattcaggccaacaagccattgtcagggtcctccctggtctcctggacacagccaagaggcagagagcaaggtggtctcaggtcacagcgcacagaaagcctgtgactgactggttttccaggagccatgctaaattcctgatccctgaaaactgaccgcttgcttttgacaaaggaaataaccgatttagggtaaggatgtttgagataacaaacccaaactgaacctaaggaccatcctgcctccagtgcgattgaccagctctattcagaagcagataataaccggcaagattggtaataataaccacacagaagcagctcctcacaaaagaaaaagaaatgagtataaaggaatataaagaaaaggcagatgaagaatttacttcataaaaatgattaccttagatccagaggaaaactcaggtaacctaacaggatgaccaaacacaaaacaagaaactcaaagggccaagggctcaaagaaaagctactgatgagaattataaagagggctgaatatgagccggtgtatcttaagagagaaaatgaagaaatgaatgaaaatgttccagagatgaatgccatgaaaatcaataaaaatgagtaagcatgaatggagattccaggaggaaggcagaaaatcaatttcaggaaattattcaaatcaagatggaaaagaacaaagctggagaagagatcatagaaatttctcaccctgccgtgcggtgtctgagcccggtttgacttccaacatgtctgcgcagctggtcaagaggggctgcagtggcctgtggaccatgcacaggaccctgacctcaacctcattagcctgtccacttccatacactttctactgagtcccttgcccactggctggagtgctgtgtcgctataaaggccctgggtggagggtttacaggtcacagggtaagttaaactgtcttttaaactgtctcagcagccaggaagcagaagcacttcacagtctttttctgttgttctggaatttcgatgccttggtttggctgctaaaagaatggggttatttgaggacatttcaaaaggaatgaacgattttttttattgatctctttgtaagagcatcctatcaagctgtggtcaacaggtaacagatgccaggataagaggacaatgaagaccgtcacagagtcctgctcagcctgcagggaggacatcgccttgtgaagaaagcagtttccagggacacagagaagaaacccccctcacaccactgcctcatcccaggagggctgaagctactgagttacagggcagtggctctcaggcagatgcttgagacagttctcggacaatattattttctttagacaatccttggagtttcattaggaaaaaagcaatccttaggtcttaaagatttcaagaaaatacaggttataaagtcattctcattgtttccaattgacaataggaatcgactagggtatctactcaagctgtttgctgccataaaacgcaatcagaaaggcagcaagatcaaaagacattacactatcatagttcatgaaagtgaaagtctaagcgttgctcagttgtgttcgactctgcgaatccatgaactgtagcccaccaggctactctgataatggaatttctgtgtgtgttagatgcccagttgtgtctgactctttgcaaccccatctactgtggcccaccaggttcctctgtccatggaattcttcaggcaataatactggagtggattgccatttccttctccagggaatcttcctgacccagggattgaacccgggtctcctgcattgcagatggattcttcaccatctgagccaccagagaatctcatggaattcatagtattacataagaaaaggtgtgtgtatcacacatattcacgtgtactctatatatactatttactactacatatactatgctatctatatattttatcttgctgattgtgtgctcagccatgtctgactctttgcaaccacatggactgtagcccaccaggatcctctgtctatggaattttccaggcaagaatactggagtgggtatccatttccttctgcaggggatcttcctgacccaaggatcgaactcacctctcttgtgtctcctgccttgacaggcatattctttaccactctaccacctgggaagtccatatggatactatattataagtcatttatactgtatactatatatattcacaatgtatatactatatacacaagtttttcattgaactactaattgaagctttaaagtcatatatgaaacttatcagtcttagatgtttaataaaacatctttgactctaaagaaaaaatgaatatagagacagtatatagacatggaggacagatggggaagctggatactacacagtcctgatggggatgagaacacagcagttggagaaaagcagcattcagagacccccccccaactatgtccactaaatctgctgtgcatacaggcatgtgctgtggggtgctaagagtatcagtcagacataattcctgcccccaaagagttctccagcctgtgaggactagaggcaaataacaagtgcttaaaatacagtgggagggcttccctggtagctcagtggtaaagaatccacctgctaatgcaggagacgtaggactgatccctggtccgggaaggctttacatgccacagagtaactaagatcgtgcaccacaactattaagcctgtgctctagagcctgggagccacagctactgaagcctgcatgccctagagcctgtgctctgcagtggaagaggccaccgtactaagaagcccacacacccacagccaagagtaaccctcgctagatgcaactggagagaggcctgcacagcaagtgaagacccagcagagccataaataaatgaaaaaataaatacaactattaaaaaaatgtttaatataatgggagaaattctagaaaagaggtttgctctgggtactattgggggccaggatggaccatggtatatggcatgtgtcgggccctgagcttggccatcaagtcaccttgtcaggtcgctgctatggagaaacctgggatcagagggtgggaagtgacttgctaaaggtcacataacctgcaaatggtaaaactgggctctaaaatcaggtgtgtctgcttcccaattcatcctcctcctcgaatattctgcctctggtcttgtatcagctggaagccatccataatgtctgtaaggaaagcaccagcaacagtaaatcctgggtgtcttgtcattagggtttattgcgagggctctggtctccctggggctggggaagaagatatgactgctacccatggaaagagcacaggtgtgtcaagactttatctagggatggtttccatacccaggcaggaggggcttgggagaacagcaggcacactcatcaagcaaagtcacaatccaaggcaaaga

SEQ ID NO: 28644 - DNA, 1576 bp, Bovine  19866880628539
  misc_feature (1)..(1): n is a, c, g, or t
ncaaataagctggacataacacagtcagtgcgagggaacgaactctactgcaggtaaaaaaaaatcatttaaattaaaaaatttcaactatatcttaatacaaatacatttaaggacttccctggcagttcagtgattatgtctccaccttccaatgcagagaggtgtgggttcactctctggtcagggaactaagatcccacatgctgcaaggtgtggccaaaaataaaaatcagttcagttcagtcattcagtcgtgtctgactctttgtgaccccatggactgcagcacgccagacttccctgtccatcaccaactcccggagcttgctcaaacccatgtccatcgagtcggtgatgccatccaaccatctcatcctctgtcttccccttctcctcctgccttcaatctttcccagcatcagggtcttttcaaatgagtcaattctttgcatcaggtggccaaagtattggagtttcagcttcagcatcagtccttccaatgaacattcagggctgaacattttaggaatatgctttacatacatgtaggataaggcaatcatacaagaaatgagtacaggaaattctttttaatattaaaagattcaaaggcatataaaacattttagattcacacttctcctgctacttggaaaagtttcatactagcataagaactggtggatcacctccaagtctagttcaacaataagaggctctgagtccatggaactttccaaataaagattcagaaactacattacctttaactgttgctgcaattcactattcaatctggccaaaactgtgttggtttccttattgcgtctaattgatgcctgaatagctttcttatctttcccaacagacctgagaagataaagagagcaaaaaacgtgaccttcattcttattattaaatttgctccattcttccctgtgatctatggctaatcccagaatgctgaggaagcatctttgccctgctagcatagctcaaccttgcttgatcagttttaaagctcaaccaaaaactactaagcttcagaggcttaattactgtagttattgatttagtgacttttctgtagaatcacctgagtttaagtcagtgcagaggaggtataagcaaactttttctataaatggtcagacagtaactattttaagctttgcagaccataccatttctgctgaatattgtttttttttttcatcttttctttttctctttttaaacaaaaatgtaaaaaaatttttacattttacaaaaaatgtaaaagcccttacaaaaactggctatgggttgactttggcccataagccctagtttgccaattcttgattctagaacaaccatagttaaaacatcagtgttactgtgcactataatttttaaagtctgctctaggatttgtaacttgagttgaactattaggcgggtaaaagtgggaagaatattccacgtactcataaatgagaaaactctcaaagcggaacagtggaggaccctgtgttcaactacaggacccagtgtgaccataattccttttctgtttaatattttttaatta

SEQ ID NO: 28645 - DNA, 1789 bp, Bovine  19866880666837
  misc_feature (1)..(1): n is a, c, g, or t
ncctagacttgatcacagggattctgggaggcagatcctgccaactgggtccctccaccctaagaactcagagggccacctttgaggggatggaaagggagaagggaggtgagatgatgaactccaagtgggttgttctactcccatttgctccaagttacctttaaagaggataaaattacactttaatcccttttatctccatgcagtgcttctaaaaacagagcaccttgacattttaggaggaaagaaatctggaaaagatgagctatgcaatatccagtataaactgaggatggagaaacttcaatgaactcagagttaaacctctttcatgcttgaaaaataaagccataaccaagtagtccaagaggaaagtccagccttgaggtagaaagaaggctggtagggaagtggcttggggcagagggtcctgctggaatggggatctgagacatgcagcagagggtaggtttgggggctgatgcaagaactctagggtctgggatccccaggaatctgctctgttaatgcaacatattaaaaagcagagacatcactcttgttgacaaaggtccatatagtcaaagctatgttttttccagctgtcatgtatggatgtaagagttggaccataaagaaggctgagctcttcgaactgtggtgttaaagactcttaagagtccttgaacagcaaagagatcaaaccagccagtcccataggaaatcaactctaaaaattaatttccccctttgggaaaaggactgatgctaaagctgaaactctaataatttggccacctgatgcatagagcaggctcactgtgaaaaaagatcgtgatgctaggaaaagattgagggcaagaggagaagggggcgacagaggaagagatggttggatggcatcactgactcaatggatttgagtttgagcgaactcggggagatagtgaaggacagggaggcctggtgtgctgcagtccatgtggtcacaaagagttcgactcgaattagcaactgaacaatccctcttaactaactttttaacttcctatctttgcaaactggctcctgggccgccttgctgttgaaactctccatgacaaggcctcatcaacaggcgcttactgggccctcggctcctgacctcaccctactcccagcctcttcatggttgcccacgaccttgtgttcccccatcgccctcctcccttccccttgtttttgtcctattcctgctccttcacatgccattcactgcttcttctctgaagatgctcccaagctgttccagggtcccttctccccgacctggtaacatatctagagtcagggactttggcaagaagacttaggaacctgtaggtcaggattatgggcagtgggcccactaaggaagcaaggccatgataatggcagtagatggtgctctctctctcttttttggcctttttgaaatacagagccttggggatcttaggcaagctcccagggacccagctctttgagtgctggactcaaagaactattacgtgttacagttccatatccactcacagttctgatgctatcatttctgtgtggtatattctttgcttgtggcaataatagatggtctgagcagggtggccaaacccctcaggccaccgtaaaacagaggcaggcagcctgcctgtctcctctgctcagccagcatggtcttcaaatgctctttcttcagtagacctgcccctccttttcctctgacacgtgtcccctctcatggctggcttccccactgtcctgtgct

SEQ ID NO: 28646 - DNA, 1512 bp, Bovine  19866880811991
  misc_feature (1)..(1): n is a, c, g, or t
natattcttattaaatctaaaatgagggcactaagggacttctgctgccgatccaccaaggccttggcctcatgtctgggagaagatgctgcccttggactttggggtttggttcccccggggacatacccgtttaaggattccacgcaggcattagctgtccttccactcacttgttcacctcttcagtgtttgttcattcacttctgattgcttgcaggcatctcttcacacacattcaggtgttggtttattctgcctttcaccttcagtttcattcattccgacttctgtggcgtggcctttcattcattccgttattcttcctttgtccattcgtgcacccggaccctcactcagtccttggcgatttcttcagtctttcatcctttagtttgtcagttcatatgttcattcactcccgactcatgcactcatcgcttcatgcatgcatttgttcattatttccttgttcatttgttggtgagtttgtgcactcattcattcattcattcaacatgcgcagaccatctgtcggcagatggtatgtactggcaggtttggttcaatatgatggttcaacacacctctccatccagcacaagcaaagtccctagggcctcttaaggacactttttattgcagtgtaacacagtatatgacaagaaaaactcgcaaatcacagctggataactgaagaatttttgcaaacagctgtactggcctccggaaatcatctgtgccctctccctgtgcccgcccctctgacttctaagagtgcatttacctgtgctgttctgaacctcaagcaaacatacttacagcctgtgctttgtcctcccctctccctgtgtgtgacttcctttgtgtgctagtgtggaggtgaggcttatccgcctggttgcattaatttgtgtactttgctccttttgatggctagggttctcctgtatgaatatgcaacaaccatttatgtatccatcaaccctagatagggtttcaatgctttcctattttgcgctcttgtagatagggatgttactaaggtcttccaaagaccacattcctgcctccctgtggggcatgagtccaggagtggagctgttgggtaaacagttatgcagaagttcaacttcatgatactgagttttccaaagtgactgttggggtgtctttcccctagacttgcccctgagacactggccctctccagggcctttggtctgtttcaggtcacccctcccccatcccagcccacctgctcaattcttcctcctgagtctgggctcctcccaggggcttaagtacaagccttcctcgctgcagtcctgccactggttcctttcagccttggtcctgtctttctgtcctggagatacatcctcaagctactctgggtgacgtcctctgggcctggtctagcctggccatctttcttaccctgtgggtggatggagcttaactctgctgaggaaactctgggacccaggaatgatcccatctgagggctga

SEQ ID NO: 28647 - DNA, 1653 bp, Bovine  19866880965769
  misc_feature (1)..(1): n is a, c, g, or t
natttattcctctgtgctggcttcatttgtaaataagcacctcctatgacagccaccagcaactgtggtcctccatctgaccagctcaacaacattaagggaaaggaaaagcctatttatgctactttcagactaagtccaagggcaaattctgattggattaaccagggtcatgtgcccacttctgagccaatcactaagcccagaggaatggcagtcactgactgcccagtgctgagccaggcgttcacccttaaagtcatggtgggctcagtgctgggcaaagcacccagactgcatggatggtgggtgaggagcacagttgctaaagcaagaggagaacactggtgggaggtgagggggagtagaggtgggttctgagcattgcaaacaatctcaatgtacaggctgaaactaaattttgcctcttgcctgactactgggctggaacaaccaaactcacctgggctcatgtaggtcaccttagggacctcccttatcaggagccagtgcacctgcaatctaacacccgcttctggatcctgaccacctggagcaggtgattgcatcggcctttggtccaccccagctgacctggcctcttcctggccacccacaagggggcatgggtcggctgagctgcaatgaggctggctgtccacagagcacctgctgattcaacctgcctctctgcctgtgtgactcaagtgagttcctcaacctctctgagcctgtgtcctcatttctaaaatgggaaagattatcattgttgtgaggattggtgatggcacctatgaatcgcctggtctccagcacgtagtaggcattagtgataagaagtggatacaggaggtgctcctggaatgacagccactgccatgcctctagtctggcactttctatgtgggatggtgtgtgctgctggcgggtcagcctcccccatctgaccatgacctcttcaagcatagaacattgctgagctttctttctgtatccagagccctgcacacagcccagtactctgggttgacatctgctgaatcattggaaactgacatcccaaaggagggaaggaagcggagggcacttccactttgtgttcattgtccaacagctgccaagccttgaaaccctctcaaaggtctgttttcagccacacacatctaggaagggcataaatttcttgacagcagaggggttatttaaagtctccattaaaacagctgggccttgttggaaacagagctgttgtcactgctggggcctgagaagggcagggatgcacaggcaagattaattctagacctttcagagacgcctgctttatagctgtgtttagggcataaagatgccaactggcctcagtggcatgaaaggacagcctggcgctcacagaagcaggagccttgctgaatgatacttctgtcttggggatatgggcagacctgtccactttttcttttaatctccctcttagaagtttgccaagagctgggttgtgaactgcagggagatgctgtttcagcaagagcaaaaatagacatcaccagcaatcacagattcatcagcgcagcctcatggacacccactgtgcgctgggccctgggcttgctgcttacagagagcactagaagaaggcaggcacatagtagg

SEQ ID NO: 28648 - DNA, 960 bp, Bovine  19866880997340
  misc_feature (1)..(1): n is a, c, g, or t
nacggcagaaatgaacatgccatgctccctctcaaagaccatccacggctcctgttgctccgaggactaaaatcccaacaacgcatgcgggttgcagggctcttgtaaactagccatgcagaccacccttctggtgcagccccatctcttaccacccccggctcccactccgaccccacagacccagctatgtgcaggcctttgcacatgctgggtgtcttcctggacaggaagtaatttcctaggtgctgcctgacaccagctttcttcacagctttgctcagtgggtagcgctattaaactgggtagtattaaactggtgtgtatgctctgggctatggatgttgcacgattatctcaatactcacagcaactaccctgtggggatcattattagccccattttacagaagagaaaactgagattcagagacacaaaacacctggccaaggtcactaggctgggaagtggtgggatttgaacccaggtctttgcatgatatcaactctccgcatcccacctttcccctcccagattagggtcacctcctctgtactcttgggttttctgtatacaagcttctgcctgattgttccccagttgtcagtttctccacttctcacgggctgtgaactcctcgtggccgtgctgggtctccgttgtttctaaggcccagaaccaagggtgggaccaggtgaacacttggccagagtctgctgcccaaagagtgggtggtgacagcccctcctggcgcctccctctggtgccctcccctccttccacttgatacctcagtaagcaaagcctttaaaccaaaaacaattttacagttcatttgagttaatcatagctgctttttctggaaactgttttccccaaattgtctgcagagaggcaggcaacctgcctggcagctccccaccttccatcacagagccctgaaatcacaagagggggtg

SEQ ID NO: 28649 - DNA, 3371 bp, Bovine  19866881063183
  misc_feature (1)..(1): n is a, c, g, or t
nttgcctggagaatcccatgaacagaggagcctggtgggctacagtccatagagtcgcaaagagttggacacgactgaagtcactcagcacacagcacataaccttgagcagcatataattgggtcatgcgtactgtggattccccggaatcttttacccaccaccattacatcatttgcaagactgttacagttagagtgccatgtctgccctgcccaaatatagatacacacacacacagcttgtgagttccttgaaagtatggactgagtcttaattaatttctctatttgcagcctctagcccctgcctggtttagagaagggactcggtaaatatttgtggagtaaatgaacagaagttatttatgttgaatacctcttgcggtgcaggcatttgcatttttacaaaggacaaaactgcaagccaaagaaatgacgctccagtgatggaatttcaggcacccatgagctgggcctggaagcttctttcattgtttagtgcctgagggagggagaggctgtcacagcaggtgaaatcttccattcattgctttccagagcaaaattagggaaacaatcacattgtctcttgaaaagtatgaatgtgtcatggaaacaaatgtgtctccctgtggctttctggaagagcaaacttctctagtcttgtcaggtttctctgcagtggttgcactcaatagaacactgcttcctgacattcccgtggcctgtgaggggggatattctgctgactgtaggggcatcttggctctctgacttcacagtcactgtcatcccagctctggccacaacggaggatctgatgttatctgggagttgaaggagctgaattctgcaactcagacacttccacgtgaagccccttgggctggctgcttcttctgagttgacctgggcctcatcctcaccactgggctcctccctggtcctctggctgactgccaccccctcatgccccagctctgtgcactgacagtgtctctgccctcaagcaccttctctccagcctgccctccactctgccctggaatgaccctccacagcataaaattgactgggttcctccagctggaaattcttcccaggctccgtgctgttcctggatcatgatccaaaccccttggcccttcaccagccatgcagagtaacagacattagccaagaacacaccatgcaagaaaaaaccccctccccatttttgcagtgcctttccctctgccttccctccctgtcagcctggcgaactcttactcactcctcaagacccagccatcaaaacacccttctctgtgaaattgatccttcataacattatgtctcccccaatgagcccatctctgtctccacacatggtccgttattctttatcccccgagtcttccctctactttactgtgaccctttccaggcctgactgtgttctcagcatctgaaagcagatgtgtcaatatgggtttatggagggcatggaccaatgaatgaatagacactatcactgcgtgcagaccccttccttgctactgttataacaacagcagtagcagtaactctcatctctggagtgtatcctaagtgccaggccccatagttggctccttgctgcatccactctggtaacttcacaacccccaagtgagctggcatgattattaggtcgcttttacacatggggcacagtgagcttacagaggacaaggatccagtcacaccgcaagagagtgaagaggccaggatttgaacttgggcagttacttgcttactgcatgccaggtgctgtcctgtctgaggccacagcagggaacagaacagtctgtgtccctccccgtgtggagctcctgctgtagtgtgtaaggtggggaggggacaagtgataaacaaatacatttctaaataatgtcagggctgataagtgctctgcagaaaaataaaacagggtggggcagagaatgatatcctggggtgggtgacattttaggggacatctgagcagagacctgaatgaagtgaagggacaagccctggttacagcagaaggaagcatgttcctggcaatgcatacaggttcagtcgcttcagtcatccaggcaagaatacttggagtgggttgccatgccctcctccaggggatcttcccgacccagggattgaaccagcgtctcctgcgtctcctttgcactggatccacttgcaggtggattctttacccactgagccacttgggaagccctgttcctggtagaggggacagccaagggcaaaggccctgaagccagaatgggcttagcttgtatgagcaacagcaggagctcagtgtgtctggagcttggtgagcgagggaggaagcaggaggacagggtcacagggtggtctaggggggcagttgggcacatgatgagtggcatgtggactatgcctggagctccagcttttcctctgagtataaaggggggccctggagggctgagagctgagggagtttaaaggtcacctctagcttctgagagtaccattgtcaagtgggcaaggccaaggggaagccggagactggttgggaagacctagaaaccccagtttctaggactgttcgcctgccagccccaccagctttctccctggtcctgctgcctcacctcccagcatgccccacatccctgagctgatccttcgggcaaactctgtgtccaccctttccctgagttgctcgaccccctgagtctccaagccgcccctgccttctcactacccagtctattttttctttaagtggaggataattactttaccaatattgtgatggtttttgccatacatcaacatgagtcccctccttctttatccccctcccacatccctctccactccatcgctctaggttgtcacaaagcactggctttgggttccctgcatcacacatcaaactctcactgtcactgaccaatcttgagctgaaccctctgaccacaagtcacagggggcctaaggttgccctgctccctcttcccgggtatccttctctggctgttggccaacagtgctttgtggctggccactagatgtaccccaccatcagctcagccttccttcagcaggtgggaatgaactaacccccaaagcagcctatgaggggtaaaaaaaatcaaaaggacctgggcttgaatcctgtttttgccacaaacttactgtgtgatattaagcaagtgtctaaacctctctgggcagcagttccttgactgtgacaaggctcaggggaatatcctgaggatgtaagactgcatgttaggacaccagcagctcctggccacagaaagcctcaatcatttctgtttcctttttccccacttccttccttg

SEQ ID NO: 28650 - DNA, 735 bp, Bovine  19866881079709
  misc_feature (1)..(1): n is a, c, g, or t
ngacccccaggttctgtttgccaacgagttcaggacacctggctcccaggctgccccaaggaccacataagaaggtactgtctcttccatcacagaagcaccatttcttgtgttgataatttatgcctttctctgaatcctccaagcaagaaagatgctgtcactctctactctgctgacaaggacacagaggctctaccaggtcaggcataccctccaagtccacaaccacaagtggcccagcccagcctcctgcggccctgcctgcatgtcccccttttggctgccaggtccttctgcaatgacaaaatgcctgttgttaagggaccttcttttcagcagagcaaacgcagagcttttggacatgcgctgaaccaggcagggcttggccacacatggcctttttggggacatttgtttatgaacccaggccaggcaatctggttacatgtgttgagatattgctctgtgtggcttgatggtccctctgtgaggggacagattgtcctgacatattgttggtggggaggcaagggggagggacacagagaaatacgacagcgagacagagatgaaggcagagagagacagaggcagagacagagagagggtatgttcacacttccacagcaggacatgaagtgaaagtgaaaagtgttagtcactcagttgtgaccgactctttgcaaccccatggactatagcccaccacgctcccctatctgtggaattctc

SEQ ID NO: 28651 - DNA, 1773 bp, Bovine  19866881197499
  misc_feature (1)..(1): n is a, c, g, or t
ncttcttaatatcttctgcttctgattgggcgttttaaagagagaatgatgaaggaggaggggagatggcaggggcttgagcagagtcagggaagtgaaccattacagaaagtaagaaggaagattgctaagtcacttcagtcgtgtccgactctgtgcaaccccatagacggcagcccaccagggctccgcccatccctgggattctccaggcaagaacacttggtccatgtttaaaaaaaaagaaaaaaaccacctgggttttctcagtggcactcaatgagttaagctcctgccctcccctgaaggctgagagactgtagccatatcttcaggtgttggctagaagaacaaataataactgcttctggcagcctggagctttgtcaagcaggctttttaagaggggttgtggatatcctagggacgtggcccttgagctgttagaaactatgttagtgttttgttcaattctttataggccaaggttaggcctagtaagaggagggcccagaggagccaggctagagttcaatcaaggaaaggatttttgtcagaagccagggccacgtcttcattctgggctgccagttcaaacctacttatgatgtttagggctttgctaaatctcctgcggcatcagctccccaggtaagttcttcttaaaagccttctctgtgagagagttgacagtgccagtttcccttggaatatagatcttattcatctctgttcccctacagtgccaagcgcagcacccagctcttagtaagaacttaggaaaacattggttgaattggacagaacttgaaacagaaattgagcatgtttttaagggttgcattgaagcataaaagaaatgggtttataaatcaaaatctttttctgtaggcccctggtgagtgcagcatttcaaggaaggctttggcaaaccttttctgtaaagtgtagaattgctttctattgcaaacagctcttctttgtaaggctgtttcacacacacgcatgagcttgtgtgcacaaattacagaggtaatatgtgattttgggtagaaggaaagagagagagagaaggagttagggaagaagaaaggaaaggaagaagggaggcaggaagccaggaaggtaaggcgagaggggtgaacaagcagttggatatacaagcctggagttcaggaaaaggtccaggctgaaatgtacatttgggagctatcagcatatgaaaggcatataaagccacaagttggtgatgtgcccaagagggtgggggaggataaggagaagagaacatggggcagaaccctagaataactcaagggtaataggttgaggagccaagaaagaaccagcaaaggagacagaggagaagaattcagggaggtagcagtcaagagagggtgagatcccagaacagagaggagaaaaggtttcagagaggcatgagcaactattccaaatactgatagttcaaatgtcattgaaacttgaccattgggcttattaattcatgggtaattggtgaccttgtcaagagcagttatggtggagtgtgaggggctgaaatccatttagagtgcagtgagaagaaaatgagaagagggaaatcaaagatagtgagaacagtgactcctttgtttttactgtgaagggatgcaaaggtagcagaagagatttaatactgattttatttggggggattagagaatggtgtgtttgtacataggtggccctagtcgtaaagatcccacctgccaacgcaagagacaagagact

SEQ ID NO: 28652 - DNA, 3032 bp, Bovine  19866881250949
  misc_feature (1)..(1): n is a, c, g, or t
nttcctgggttgggaagatcccctggagaagggaaaggctacccactccagtattcttgcctggagaattccatggacagaggagactggcaggctatagtccatgaggtcgcataagactggaacacgacctagcgactaacactttttacacttggaggttactgacatatggaggaaaacctgaggattattcctagtcctactgtggcagagcaggaactagaatccaggttttcagatacttatgcctgacctcttgtcacattttagaggcaaaagccagcttctctcctcttaaaatcagcaatgggtcacatcacatgaaaatgtctgcttgccctttctcacgtgtcaaagatccctgaaaattaactagggcaataatcacagagacggccatggtgccaggatcaacccctttccctctgtcttttttcctcctctcccaccctctctctgtgatgattccacatcctacaataattgattgagtgcattttcggagagttcctaatggctggtggggtccctctgagaactattgtgtattccctataatgacattcattagtccagctgacatcagtactgttctcaggttaatatgtttaatgtaatgaggcatttattttcagttagaaaactcctgaagaagcatgttttctcctgatgagttcagctgatgaatagattaatgctggccttgaaatagttgattaagaaaatgaatctaaccaacttcttcttcatcagatagaggccgcgcttaaattaagtcatgttaagctgcccacttcttagagaaggaaacaggaaaaatcctcacttagctctgtgacttgttctccatttgcctccttgcttccctccccactgtacctccccaacgctccaagatccaaagatatgaagagatcgaggacaagtgtgtgacgagggattgcaattgagaagcctgagtacccagaagagaaaaagaagcactcatgtagtgcagaggccacagagatgagttcacatagccgggagtcaaattggccagcctctgtcgcttaacagttttctagggtttactcttaaccagcctcctgtacccgtgggcacttgtggatatttgttgaatgagtgaaggagatgctcaacagatggtggctcttactattattcacagaatcacatgacctcaaaaggaaaagatgtcggatgtcccagacacatctagccagtgaataggctgtgtgataggttcatgatccctggttctagggccaaagatgacccaagggccaattttctttgatgatgtaaccagtagcttttcccacatcactctctcgatgggcacttagagctactgccaactaagagatgctagacagcatgcactttcttccttccctggaatgagcttccaggccatgccattttagtgcgatctctgctgaaagtcagagaaaacagaggcacttgtccctcttttcactccaaccctacctgctcataatcagaattccctctgagggcaagtccagccttgaaaggaaacaatggagttgatagtggggatgtcagcaatggatcgcacgctttacagaaaggcaggggtgatgtcatacttcattctaccactttacaactgcgttagttatctactgctgcataacaaattgccacagacttaggggctttaaacaatccccatttatcacctctcagtttctgaggtcaaaaggctgggcacagctgagccaagttttctgctcagagtctcacaaaactaaagtcagtttgccctccagactttgttctcatttgtaggctcgactagagaagtacctgttcccaagttcctttaggttattggaaaaattaatttccttgttgctgtaaaatgcatggcaacttgcttctttgaaaccagcaatgagtaaaagggacctctaatgcaccaatgtctgacctatataccactttaaaagggctcacttggtcaggcatggcccatacagttaaaccttccatttaatgaacttaaagtcatctgattatgggcttttactctatctgcaaaatcccttcacctttactatattctataggtaaaggaagttacacaacctttcacacacaaggagtaagaattatacaagactatgggtcacagggcgtcatcttagatttctgcctgttataccaccgggaaggtaatgggcaagtctctttaccactgaggtttcaaatccttagttataaatggcaacaacattgctgtatttaggattgctaaaataattaaatggcatcacatataaaaataagtagcacagagagctctcaggaacactgtgtaaaattgaactgaaagatggcagaagtggcatcactaggaacatctggaattttgccttctacgttcctcaaatctatcctctctaattgattctgatctgttatctgactatctgatttcaagctggatcttaactctggaatactcttcccttcctgtcccaaatatcccccacgttcctggtggtttatactactggctatatctgttgtatcagtgtcctgacatgcaacctgtatgggatcttgtgtaataaccccatcctggctccagagtacttctttttacctaatttatccagcatctattaagtgagtacctctgtcagttctctctaccactctggaaaaccggcttgattatttattcccccattcttcaaatggagacatcatagctacaggggggcaattagctttggtatatttgtttctgcattacctctgacctagagaggatatggcctgagactcgcagcagaagggtctcgttcagcagacccccagatgtcacttagaggaccctgcggatctttgtgctgccgtcctgtctcccagtgtgccttccacctgtggtttcccagactgggaggaacaacaggatagagcactgaaagaggcggcagaaagactgattctagcagggagggaggcgtttgcaaggacagctgtgtcctctt

SEQ ID NO: 28653 - DNA, 1532 bp, Bovine  19866881290287
  misc_feature (1)..(1): n is a, c, g, or t
natgttccatgtcctgggtgatggagacacgtgactatgaacctgggatccctatgtcttggttgtgaatcggcaacttgcattgtctgggaaacaatgcacgcttatgcagaacataagcatatgctaatgacggttaattaccatccatatttatagatttatcaaaatatacaaagccatctgacaattacacacctacagcagatcacaggtaataactgcacaccaggctcctggccagcaccgtgatgcaagcttggacaccaagcgtgagatgaaactgccacccagccctgttggggggtccttggctgtcaccctgttggccccctgctcagacctatgcccatccccaccatttccggtctttctggtcctcctggctctaagacacacagaccttgtgggggatagacgtgtgagagaccctgaagaccacagagaggggacttcccttttccaaatgggaaactgaggcttcacccaccactctcacacccaacagtgtgctgagtgcctgccacctgccagactctgttccgggcactgggatgagctgatgttccctttggggagacagcagtgccgggtgcagagactggaagtgggcagcaggagagactgatgggagggggcagcaggggcccaggaagacctcgctgagcaggtgaccttgagctgagcggctgacaattgaaagaagtgagggctgagccatgctggctccggggagattagagtgtgtaggagcttggtagggtggggagaccccgcccacccaggaaggatgtccctccacctactctagggtttttgcaaaccttcaagtctctaggtcacaggtgggaccctcatcctgagggcaaggggaacagagaggagcaaggctgggtccctggcctcaggggttccttagggacataggggttagagaaatgattacagtccatggtggtcaggcaccaactggagtgatgtcccaggagccgagagaagcagagggtggatcccaacaggccaggactgagtcctcacaccaacacttccttcttcagcccctgtagcctctgtttccccatctgtagaatgggtgggtgagagtgggtgggcatcaggcttattgcagagccggtgctgctaatggtcacaggatgagagccctggtctgggtggtcttgcaggcgcatttccagtcctgagcggatagatgatagacatttaggtggccaggaggatgggaagacctgaattcagatctcttctgaagctctttcctttagctccctgcccctcttgagctgtcctggatcatctgggactttcccctccctgttctcaagacaacatctgaatatagagccttggggacctttcctgaagggttttatattaagattctgaaccccaaaagtggagactcagtccctattaatggtccctacctccagcatggtggagggaggcagtgttgcttactggttagatcacaagctctggcccacccggtttcagccaaggacttcaggaaa

SEQ ID NO: 28654 - DNA, 901 bp, Bovine  19866881299576
  misc_feature (1)..(1): n is a, c, g, or t
ntgctgcaatgattttgagagctgggggatccatgtcagatctcgtttgagaaaatgtgagatgatccttaatgataatataaaatttacataaaactatttaataaataatatctaaattctcttccagcaaaggctagagtcttggcacacaagatgcaggctggggagaccaatgtccttcatccaatttcccacacagagactcatcccccatctggagaaccctggggtggaggcaggagccagggcttagaggcttgatgtactgctaagtagaatctacctgtctcggggtgactaaagatatccaactggattatactgttctgatggagtggtgcccctttcagaacccagcaccctctggaacagagtagatccaatagacactgctcatatcacctggatgaggctttggatggagttcagcccaccactcactggaagctcagctcccatgggtgggcccagtatcaagactgatatttaaagacaataatttcatttctggggttcccagccttccccactaccttcttcgccacatacaccaggcagagtgccctgggtcaagagcactgttaacacccttccagtaactccgcctcctgaaaataaataggcaccaactcactgcaagaggctaagagccctcatcacagggagcttgcacataactggaaataactttaacacccaatggatggctgttccccaccctcactctgtgacaaagttgtgacagtcagaggcatcaattttctggaactgagctgtgaacccaagatcaagaaggggcgggcaatagaggttggcacggtgtaagagggggctttacaatgaaattatgattattgttctccggtagcatttcttctgtgcctccaggcagacagct

SEQ ID NO: 28655 - DNA, 766 bp, Bovine  19866881360162
  misc_feature (1)..(1): n is a, c, g, or t
ngagagatgtgtccaccgccaggatggatgggcagccctggggaggggtaatgagctccccgttactggaggtgcgcacagaggaagggtgcatttggagaagcagagaggccttggaggccaagagatctgggctgagtcccggtcacattgcttgcaaggagtctgaccttcagcagtgacttgtactcactgagccttggcttcttcatctagaaaatcaggcaaaataagttcccatgtcccagggttgtcatggagacaaaaggacataaagtgtgcaaagcactgagcagggagtgcagagtatcattgcaggaagggaggaagctgggttatgacaccccgagccatctacgattccaaacggctgtagttgtagaccttgagatccaataattcaattatcctaagattataagatttcctaggattctaagactttaaaatttatgattctgttattcttctcatctaagtctcctcaggaacataggctgtgtgattcgaattctaaacctgtcccttcattggtgcggcggctcagccatgggctgtctgctccacggggagtgtttatctctgctctctttccacttcagatcttccatctttatcccccactggcccattgctacttctccagggacacgttttctaattccagccttatccactgcaccttttgttcaaagcacatcaggcccctgcggtgctgcgaattgtgtcctgtacccctgcccccggcacactctcctgccctccc

SEQ ID NO: 28656 - DNA, 1033 bp, Bovine  19866881508696
  misc_feature (1)..(1): n is a, c, g, or t
nggactgcatgtaacatacctgtcacccttgttctccatagcccttcaggtggacgaatagttaatatgcaataagacaaaaattgtgatagctgatgcacattaactgcttcctgtgtactcagcgttgttattccccacaataactttggaacacaggttctagtctattccattttgtgtgtgtgttaatcgctcagtcatgtctgactctttgtgactccctggtctatagcccaccaggctcttctgtctatggaattctccaggcaagagtactggagtgggtagccattcccttttccaggggatcttcctgatcaagggattgaacccaggtctcctgcattgcaggaggattctttactgtctgagccaccggggaagcccattccattttacagatggagaaaaatgaggctcagcaagcagaagggcacggcaggggtaagaggaggagctgggacttgaactcaggcctgtctgccccaagtggcccctgatgcttctttttcctagtggaaaatcttcattcctccacagactttttgggggcagttgaattggggtcccctcccttgctggagctatgtctggacttcctccagcttgaccacacctcctctcgggatcccagagcagacaccctgtcttagcacgcttccccatccccacagtccccattctagcctggaggttttctgccaattcctcaccctgccacagttgctgcagctggttggagatgtggctgcctttctggaaagttctgttcccttttcttgttgtcagatattcctttgcagtttcctgtcttcattcctggcaggaccctttgcacatgaacagaaggctcctcttggcttctctccctgtgatggcgcaaagccaggaattctgctcctgagtgcctggggcttcctttgggagggacgaggggcatgtgacgagcactccacatccctctttaactaaaggttcgctggggccatcacagctttttggccccttatccccatgggtcccatcttcc

SEQ ID NO: 28657 - DNA, 685 bp, Bovine  19866880481249
  misc_feature (1)..(1): n is a, c, g, or t
ntttctggaattctcttgctttttcaatgatccagctggtgctggcaatttgatctcttgttcctctaccttttctaaaaccagtttgaatagctggaagttcatgattcatgtactgttgaagcctggcttggagaattttgagcattactttactagcatgtgagatgagtgcaattgtgcagtagtttgagcattctttggcattgcctttctttgggattggaatgaaaactgatcttttccaatcctatggccactgctgagtagttcattaatgattttgtaatcacttcttttctttagatttatattcctttgttctttaaatcccagctgatttctattcatatacctagaaataactctgtgaaatctcttttcaaaaacaaaagaacaaacaaaaaactctttcattcagttcttttctcttctcactattcaaaaacaaatataaacttacataaaatgactgttcctacttgacttctttctttatataggctttttatgaaatacaaaattagcttgatagtagcttaatggttattaataataatacaacaaagttatcatgacaattgttttcttccatgcctacatggggagatgattcattaggcatataattactccctcctaattggaatcaaaccagtcaatcctaaagaaagtcaattctgaa

SEQ ID NO: 28658 - DNA, 1924 bp, Bovine  19866880596474
  misc_feature (1)..(1): n is a, c, g, or t
naagcctacactaccgaatttctttacctaaagatactgtgttttttttttttttctattatggaaattattcctgtacctatatccaggatactagggtttgttcggtttgttggggttttttgcatagtacgcaatatactctgtgtttattttctgtattactgaatcatatccctacgctcttgacttgctaatccagaactgaaaatattagagatagaatcactatagacttttttttgtcacatttattaatgtgtcacatttattaatacttctatcacatgtactatctaaatctaacagatacattcccaatagaagtttcaatattgaatgagctataaaaccatgtaataacatctacaagttcatttggaaataaatggctagattggagtttcaacctgggttaataattggtgtaggcatattgacctttgtacttgttcatgtggattgttatttgctatgtcactggaaaacctgattcagcatcacacaagggtatctggagagagaggtgtgaggaccagaactacagggtgatacacgttctcattctcactctgtttttataataatattaagtctaaaatatgttttaacaaactttatggctcccaaagaggggagagggatacattaggtgcttaggattgatagatatacactactatatataaaaataaataatgacttactgtatagcacagtgaactacattcaatatcttgtaataacctataaataaaatgactctgaaaaagaatatgtatatacatatatatgtatgcaatggcaccccactccagtactcttgcctggaaaatcccatggacggaggagcctggtaggttgcagtccatggggtcactaagagttggacacgactgagtgacttcactttcatttttcactttcatgcattggagaaggaaatggcaacccactccagtgtttttgcctggagaatcccagggacgggggagcctggtgggctgctgtctatggggtcgcacagagtcggacacgactgaagtgacttagcagtagcagcagcagcataactgaattactttgctgtccacctgaaagtaacacaccactgtaaattaaccatacttcaattttttaatgttaaaaaaaatatgttttaagctatttcagctccttctttaaatgctaatcaattaattatttgttctacagacaaagtattctaaacaaaagcatcattgtcttattccttttcaggctttgtattcataataacttcattgagtttattctctaccatgacccaagaatataacttatctttacaataagaaacagtcaccactatcactactactctcacctcacttcctctttatcattttattggcaaaatctatcagccttccatggttggattgaacttgtagctgtggttcctagaagccaaccatgatcaagatatatatatatgattaataacccagagctagcttgagatcatatggtgggtggttaccaagatgcctgtgaacaagctgtgtaattcaagagattagtccctccagctttatccttgcccctagattcagttcaaaataacaaagaccagggggcttccctggcggtccagtggttaagactctgcacttccactacaggtcgtacgggttccatctttggttggggaactaagatctctcattgtgaccaaaaaataaaaataaaaaagaacagaatgggaacaatacatgcaaagcatgtctgccattctagtaaagttccagtctcctgcctctgatgaaacacatagtaaaaaggggaaaatcacttcactatccagttaggaaattaaaaactggaagacaaggacactactaggtgaagacgaagacaagggaccatcaaccagaagctcaac

SEQ ID NO: 28659 - DNA, 1199 bp, Bovine  19866880613252
  misc_feature (1)..(1): n is a, c, g, or t
ntattaaaagctaaagcgatggtgacttggttctgctttttaaatcttcccctcagcataaagcaaatcctaaaatgtgcagcagctttgtgctctcactttctgccatcttgttataaatgcttctctctgaattaattctgatataattgttcactgcataatgctgaattttcataatatatgagctgcaatatcaaagcatgaaaatgatactagtttaaaaaggaaacccattgcaattctgatattttccctgtgactttgtgtatcacttaagaagttgttctcaaacttttgaatcttagaaacagtttatgatcttaaaaattattgaagagctcaaataattttttaatgaaattatatttattaatagtctttgatttagaaattatgttatgagttttaaaatatttattcattttaaaacaacttaaaaaacatgtcaacatagataaaatatatttattaaaaaatgacagtttccaaacaaaaaagtcagtggtaagaatggaattgttttacctttaagcaaaaatttaaacagcactgggctaatagaatacagttacattcttacgtgcttctttattcagtctgttacaatatcgtatattatattgcctctagaatatttcactgaacactcatgagggggtaagggtgaaaaacccaaacaacatcttggtattgtgaaaataattttgacctcccagacccactaaaactctttaggatcctcagatcacttgttgagagccactgacttaggacaatatttattcagtgttaatcacggatgaagataaataaaacccctaaatactaggcgtaagtatatagatcaggtagaaataatgacattacatatattttagccttaccaatatgtacatagtctgctttctgttttataaactgttagttctgctgtctgagaaattattcttataaaaggtatgggtttatataaacatttggcaaaaacatggtcttattatggcagtccacatgaaaaataaccacaagttttgaatcacatgaaattttaagactcattctgaaaagtcttttttttttttttttaaagaaacttttggttttgataaattatagatttagaggaagttgcaaaaaaatacatggggaagtcttgagaactctttagctaattcccccaggagcacttcccaggt

SEQ ID NO: 28660 - DNA, 648 bp, Bovine  19866880716003
  misc_feature (1)..(1): n is a, c, g, or t
natctgcaagcagtagatgacaccgcacaacttaaaaaaaaatcctttatgttatcatgcaatacccaatggaatttttaagcgtttggatccataacctcagaattaatgccacacaccaaggcaggtcatcgtgtatttgatacataagtaataaagaattctgcaaatgaagatttattttggcattctttaattgctgggttaactgaaatggctaaagaaataaaaagtatgtactatttcagcctattattactgctatgaaatttctgtttttgtttgatagtgtttgtttgaaattatgtaccacaaataagaccagaggtagaaaacagcacatgaaataacaaaacaggaaaagaaaaaaaaagacaaaacaagaccacacgtactcacaaactctcctgaaccaactatgttcaagaattaataagctatatcccttacccctgtgcactcacgaggctgctaaaagtcaagccttctgagtttttacaatctaagtatgttctcggcaccgaataagctttttaaaagccagtttaaagtcttcattgaaacttgtgtagagcagagggttgatcagagaattcacataaccaagccaggtcaaaaaatcagccacttcggaggacacagcatagg

SEQ ID NO: 28661 - DNA, 2534 bp, Bovine  19866880759336
  misc_feature (1)..(1): n is a, c, g, or t
ntctttgcgatctgtcccgggattctccatgttgacttaggcaccgatttaagtatcttttgttaatgatataggtgtcagttttagaacttaagaacacttagtagattcttcacactgtattaaaatgcaaagtaagaagcatttccttaggaagttatcctttttttccccatgaatacattgggtttattccagaaacatgcaggttaagaagtaacagaactgaactggttcaaaattgggaaaggagtacgtcagcgctgtatattgtcaccctgcttatttaacttatatgcagagtacatcatgtgaaatgctcagctggatgaagctcaagctggaatcaagattgctgggagaaatgtcaataacctcagatatgcagatgacaccacccttatggcagaaagcaaagaggaactaaagagcctcttgctgaagatgaaagaggagagcggaaaagctggcttcaagctcaatgtccaaaatataagatcgagccaccacttcatggcaaatagatggggaaaaaatggaaatagtgacaagatttcttggggtccaaaatcactgtggatggtgactgcagccatgaaattaaaagatgcttgttccttggaagaaaagctatgacaaacatagactgtgtattaaaaagcagagacatcattttgcagacaaagttctgtctagtcagagctatggtttttccagtagtcatgtatggatgtgagagttggaccataaagaagactgagcactgaagaattgatctttcaaactgtggtgttggagaagactcttgagagtcctttggacagcaaggagatcaaaccagtccatcttaaaggaaatcaaccctgaatattcactggagggactgatgctgaagctgaaattccaatactttgggcatctgatgcaaagagctgactcattgcaaaagaccctaatgttgggaaagattgaaggcagtaggaaaaagggacaacagaggatgagatggttggatggcatcactgactcaatggacatgagtttgagcaaattcctggagatggtggaggacagggaggactggtgtgctgtagtccgtggggtcgcaaagagtcagacactgcttagtgactaaacaaaaataacgcattcctctacactgtgctgtgagcaaaaaagtgagagcctgagagactaggtgagtgctctgtcccggccttgttctctaaacattcatggctctggtttcacatctgcttaaggtcccatgtgtggacactcagcttcactgcctttctcttgccacttactcaaggataaacccagattttctgcttcagtgtcatcaaagttttgcaagtatgcttgtatggtgcttattatttctttttctattattccttgccattgctctaagtgggcttctcaggtggcgctagtggtaaagaatccacctgccagtgtggggatgccacagacgcagtttcgatccctgggttggaggatcccctggcaacccactccagtattcttgcctgaaaaatctcatggacagaagagcctggtgggctacagtccaaggagttgcaaagagttggacataactgagcacaacatggcattgctcaaagtatgaaatgcgaagatttcatcctcctgccaatttctcttcaaatggctttggatgagaatgttctggactgatttacatgattctatgttctgcagagggtggttcccagaccagtgacatcagcatcacttgggagtgtgttagcaatgcagaatctccagactctctccagatttaccaaagcagaagtatgaaaaatatggccttttattgcattttaacacactgtattgaaaatacttgtgaagctctttcttcctttcattagaataaaatttcagtaaaatttcagtttgggagggaatctgtattgtctagctttccattgaatatccaggacctagcatagttcttggcagatggtaggtgctcagtaaatgtttgttgaatgataaatgaatggatatctgcagagtaagtcttgtttgcttaacctagttgttaagtaaccaatgtgtttagaagggctcagtgaaagaataatgctaacagtgcagacaaatgaggtgtgtaattaacacctctggtcctattgtttcctagaagagattttctgcccagttgactgtgattaaggtagggttgacagtctccaaagtgggaaaaggattggcctgtctggcaaagaagatgactcttgctctcttctactactgtatcctcaaattatgagactggtgatccactccttggcaatctgaaactttgcagtattttgatttcaaaaggtcattttctagttaaatatactgatttgtctgtcctcatattttacctctgaaattgaacatctccccaccttcccttccccctcactttttttcttctttggtgcacactccccctcaccactctctgactattccaatatctggctacctagtctccgttcttccattct

SEQ ID NO: 28662 - DNA, 792 bp, Bovine  19866880763487
  misc_feature (1)..(1): n is a, c, g, or t
ncttagttttaggcctcccatttaggaggcctgcttcattttcacatttctgtggtctgggggctgaaaaagacaggcagatatatttcctgcatttgctaagttggcctcagacacctccattcgtttgtttgttgaagacagtgtcacctcatttaattcagcaggaaaacaagtacaccagtaagagaagaaagactggcgcataatctcctctgtatttcaaatatgttttccatggaagatactgcacagggagccagacccaggcccttgcttcctgcccctggaaaagggttaattcagggaagccctggattcacaagtccaccttgggtgtttaaggtcaagcactttgcatctgagtgtagaaactatggtaagtacatattgtgaagccatgtcaagttcagacctgaacatatactactgtggagctgggagtaagataagaatgctaagaggaccctgaactatttgggaaaacacccctcccccaatccacttgaccatctattattccctcccagactcagagatttgatgcaggaagtatggaaggacaacaaggaaggttaggaagaagcatcctgggaggctgacaccctctgtctcatccttctaagccaaggacaagcaggctaaggttgaatacaaggtcctaccccaaactggacgcagatggaaacacataaaaaatgtatatgatattttaacaatgcaaacccttgtttgatcttgaggtaggagcaggagccccttccatttagcctcaattccctttcattttca

SEQ ID NO: 28663 - DNA, 964 bp, Bovine  19866880781472
  misc_feature (1)..(1): n is a, c, g, or t
nacattttagtgtgaataaagcaatctgaagtgaaaaaaataagggtgatacccaaggttatatattacctagatgataccctaaacattatttcaattcttattgtcatggtcgtcccaatgcctatgtaactttgttttcacacacaaagagtttgaaaattttgcttccataattgtagaaagttgagaaatcaaatcaagactatgttttctgaggaaactctaaatgtaaaatgtgactgacgaaccctgaagcacccatttaaggtgagtataacatagaagactcagctgtaccctccacccacagtgtctctctatttcttgccatctggtgagcccccttacaccagctgaagccttttgcttcttcctactgcctatacccagaaggaggtggtcactcctttcaccgtgtcccctctataagtgtgatatcactttcctctccatatttgtctgcatctctctctcccaatcatgaaaacagggtttgtgtcttatacactcaggagtcccccaaacctaggaagtctctcaaatgataaatgaacattatagaaattgttgtccaaatagtcaaatatctagataagcacttaggctgtataagcaatggtatggattcattttgtttaagcacatattttaataaaacactcaggaccttctgttctaatgaattatgtgtgctgctcctccactaaattgtgaggtgctagaggacaggaattttgtgtcatttacccttgggagtccttgcatcatctacaaaaggctttaaaggcagtgagtgctacttgctgaaattaatttaaatccttacaacaggcgtaagtgctgggtgactcattcagcaacagtgaagttaggtccccattgtgtcatatgattctaacatttattactgatacagccagtatgttttcattaattggcccagtccttcattatactatga

SEQ ID NO: 28664 - DNA, 888 bp, Bovine  19866880827059
  misc_feature (1)..(1): n is a, c, g, or t
ntatggatgtgagagttggaccataaaaaagctgagtgctaaattcaaattttggtgctggagcagtctcttgagagtcccttggacagcaagaagatcaaaccagtcaatcttaaagaaatcaaccctgaatattcattggaaggactggtactgaagctgaagctccaatactttggccacctgatgtgaagagcctactcattggaaaagaccctgattctgggaaagactgaggtcaagaggagaagggggcaacagaagataaatggttgaatggcatcactgactgaatggacatgaatttgagcaaactctgggagacagtgaaggacaggggagcctggcatgctgcagttcatggggtcgcaaggagttggacacgacttagcgactgaacaacaatgtgacatatggttccctaattctcagtgtcttaagtgaagccttgttgagcttcacacaggtgccactgaagatctgacaaaggtgaagacactgtaacacctttagaatctttgggctgacaccattgatacgtcttatcctgatgacaaatgccaacttgggttctacaggtacacaaaagttgcaggcttttcatgccatcctggtcatttgactttcagttcttaaagctgcctgtattccttgtgatagggcttagctttctcatagataagcttcctccttgcctctcaaagcaacatttggggaaacttctttcccaggcacttgatcataagctctatgaaattcttttgctctttcttaagggtttctagcacaacagaaaccttctttttcttctcttctgtaccctccatggttctggctgggaaagagataactacatctgcagatatgtcttcttgaaagctaggcaat

SEQ ID NO: 28665 - DNA, 758 bp, Bovine  19866880848899
  misc_feature (1)..(1): n is a, c, g, or t
ncccatcttgtgtttataaaatgcaagagttcccttaaaccatttataattacataggataaaacacttttctataaggaagttggatgttttgattttactgtttatagatgttagattgtacagatttgtctgtattttcctgccatatctaatgatacttttttcattagattggtcttccagaacagtattagttgttataattgattattttgattattcagtatatagttagctcttatagtttagctttattcaccatatttatactgtggatttacggccagagatagaggttatttcaggagagtttatgaatctttctttgaagtccaactaaaatcagtactggaaacaaaagaaaacattctctcaaatttacttttgtttctgtttgccatgaatagtagcattgatttttgactttgtttgttataaaccagttacattcacaatattattgcctgagatattgatgatattgtgatatgaaaatgtgtatattccctgtgcaacatcagacttggcaggaaaaatgaagcacttaatattaactgaaattgctggtactctgaataaataagcatggtcaaggagtgaattattttcttttgggaaatatttttttaagttttattattaaaatattatagttttatttttagggccaaatggggtatatggaatagttggtttctcctccttaaggtttattaccaatatgcataaaacttacacattaaaatctctaccct

SEQ ID NO: 28666 - DNA, 727 bp, Bovine  19866880906727
  misc_feature (1)..(1): n is a, c, g, or t
nacacacgctgcctcagaggttttagagtccacgtcaacaccatttaccgtatggatgttctccttgttctctatgaaacacctcttgccgcccccacctgcaaagtccagctagagagggggctttagcttgcagcctcagctcttttgtatcattgtttcatacctctgaatgtgtattttatatattccctgagttgttctccttagccatccaaataccaactcaggcttgattgcttaactgagtaactgatttattcatttgctggttccttactgagtgcttaaccatgaactggaaacagttgggatcactggtctgctcattattaggctgctcaggagtctaaattttcctcagagaactgtctccatcctcattcctttgggtgtcttcatgaagtagctttgcctaaatcatcccttgacatatgactacttgataccatacaaaatggacaaacatgccaacctgatttcttgtatccatgttgtttatccattttctgaaggaccatcccttctcctccattcttcagagcctctggtatgaccttcctttcccctgagaatcagatgagcaaatgctctctgctgcctcatcccttcctcatcctcttagcaaaggcaatgcttaaaatcccctctaaaattctgttttatctaatggaaaataaatatgatcagatttctataaatctgcccctaagaccagggtctcata

SEQ ID NO: 28667 - DNA, 1095 bp, Bovine  19866880950461
  misc_feature (1)..(1): n is a, c, g, or t
ncagactgtatcctgtggcccctgatgttcgtaacagccatttcttatggccaacacatatttaaacttctcaaagctttttaattacaaagatgtttctattttatctagcaagacagcctccacttgagaaaatatgatgcccagataagaagtatttcttctttccctttattgttctgataaatactccagaagagtatctcaaaaatcagtggcagctgcctgtcaagaagacattctgtcaaattagacaatttaatgattttgcagtgtgacttgaaattcctatttttaatagaattgtcacaaaggttcatcaccaactacagacaggtacgtgatttagctgtgagtcaccaaagttagcaccagctagagaatttatctgaggtaccagacttagtaagaagagagagacacttgtggttttgatagaatgcccatgtgggttctgtttatacagaactagagtgactttgttgaaactctgttgtttctattggtgttttacatatatcttagctttgctagaatctcttaaggctatcaattcatgttattttgccaagaatcaatatcaagcaatgttttgtagttctcaggagatttgataacctataaaagcctttctatgaagaagtgtccttagaataacaagcttgtttaaatctttggcagtaattttccatcatacactctctcataaatgcagactcctgtccattctcatttatttcctcattgacttagtagtataattttcaagttcaatatgataaaaattatctttaaattcttatgtttatcattattataatcattaaattcacattatttcaaatgtcataaataattcataacagtggaaataatcatttaatgctattcagtttcacagcatctcaaatttcacatggttttgctactgttaaatcacacttaagcacgacttttatattgttatggtaatatgacatcaacctgcatttacttttatgtcataaagctctcataactaaaatatggcaactgaaactgacttctccctggattcgggttcctaggaaagtcaaaatcttatataaaccaact

SEQ ID NO: 28668 - DNA, 1997 bp, Bovine  19866881113936
  misc_feature (1)..(1): n is a, c, g, or t
nacaagctgcatagcaacgcccaccgttcaggagtcagcaaggaccaaagaaaaacagcacaagttcaactgaaagagtgaataagcaaaataaagtgaatccacattaaacaagcaagtccctttagtgctccccagcccaggaagcaatagcagaggggaaatgaggtcaactctgcgtatttggaaaaactattccacctgtacttctacagaatgagactaaccaatttgggaacttcagtagcctgtgacacattatctttgccagttgaaattttgtaagtcttgccttttttctctccatcataatttgatagtaggtcagcattatttgatagagatcagcattgttactgaaactaggagcataaagggtgagatttataactcacccatctagattaaaatctgtctaaaggcatgacatggcactgcaggcggtcctgaggaaggagcagatgcgtgtccactccctggagaaggtggtggagcagaagactaaagagaatgatgagctgaccaggatctgtgacgacctcatttccaagatgaagagaatctgacgcggcagccctgaccatgccgtcttccctttgtgtgtgtgtgtgtgttgtctgtctgtctgtctgtctgtctaggtttttcttctctattgacgtcttttttcaatttcgtttttaaactaggttgctttaggaaaaaactaaataaagtttctcttaaatctaaaaaaaaaaaccatttacaaatatgtcagaaccgcctaaataaagagacagaagttcttctaggctttctaagcaatcttgatttttttgcatcaatttctatagtacactctctacaagccttaactgagctaggatacaggatacaaaacgttgtctttctttggtctcatttatatccatcaattgtgttacctccctctggcagtatctaaggatttctctgcattctacacaatgtggtcctgaaatgtggtgtaatctcaagttacttggtgaacacccactgtcctcacatcagtgcagtcatctcagcctctgaactgtccgctccatattataaattttctctatctgctcatgaagctggccctcggaagacagatcaggccttgctttgaaaggggaatgattagcagcaaagatggattctagtgtaaaagagtatttaaaaaattatgaaaccaaaatacatattatcaatgcctctctacacaacagaataaattatccaaactgaatgcagcagcaatatcgctatttgagtttgcctttctctctctctctcattctctctgtttatcttttacctctctcctgtttggtacagtacattcttttaaattacatgttgccaagggcaaacagtttttgctggtactttcctatctctggagggaaacaagggtgagtgtcatttgaaggtagacagcatcttatttgtactgttggaaaccttgcatcctgcaggcttgataaaaactcaaaaaataagaatcctacttctactttcagtggtaccatcaagatcagtgtccttggttataatgagaataaaaaatttaactccataaatgcagaatttgtgatctcataaacaaaaaaaaatccttctgaactcaggcacttgactagctagatgtaagcttataaagtgacagctctgatgatctttttctctccataaaatcatactttctactcctaaaatgaatgcatacccatcaatcagaagttaattacatattttcttgccaaagtttttttttttttaattaataacattctctaaattatggaattttcctcagtggactaacacactgtggaatgtggagataaagatgattgtctgtcacagaaacctaaagctcttactgggttaccagataatgtgggttgatttgtgtccccccaaaagatacactgaagtcccaggctcttgttcctgtgaatgtgatttcattcaatagaaacatttgttaa

SEQ ID NO: 28669 - DNA, 958 bp, Bovine  19866881145397
  misc_feature (1)..(1): n is a, c, g, or t
nttggctgttcagttacgtttcacttttccctgtggctacttggcatctggtgggccctccccatggtaaggctcactcttctcagtgactggaaatgtacagcttgttattcagtaactgccagcaaataaagaactcctcttgcttcccattctgcttccattgccaaatgaatatgctgctctaatatctaatagcctttaccagctgctgggttctgttctctccagctatgattacttggactttccaggttccatattgtcctgccattttcatagcaggggctccagagacattacaaaagaatctcaaaactctgaaacctcattaaaccaaagcagttgtatcttccatagctccccaactgcaatatcttggcaaaaacaaacaaaaaaacagtgttccccgccccccagtaaattttggatcattctctaaggccttttttttttttttttttttttactttacttcccaattcagatcttttagacaacagcatacttcactttatacaaatgattacttccttaatagtagggtgggaatcaggttgttaaaattaaaatatgttaaacctactaggaataattattgcataagagaactccactagaattatttgatatatcagctctttgcttctcaagtgaccattcttaacacatgagtgtgaaaacaaaatgtttacatgtcacttaaccttagctatacagtgctcttgtaagatgtgtttccattactatcttccatttcagggcattgatttgaaagctgaccaatcagagtcactagtgagtcttattatttgaaaatccattctctgttttcctttttgcttatttttgaagtgaaagatcaataaacctcagccctgggctgtttttcccagagataccaggggtgagcagcagggttgatggcaatggaacacactagaagaccagtgtccat

SEQ ID NO: 28670 - DNA, 2004 bp, Bovine  19866881175646
  misc_feature (1)..(1): n is a, c, g, or t
ntaagatgaggtcttatggtgggccgtagcctaaaatgactggagtccttacaagaagaggaaagtgtcatgtggagacagacacacaggggcaacaccatgtgatgacacaggcagagaccacagtgatgcagctacaagccaaggaacgtgagggactgtggccaccatgaacagctaggaaaaggcaagggaaagttctgcccaaaggttcagatgaagcagtactctgctaacaccttgatttttgaacttttagcctcaagaacggtgagggatacatttctactgttctaagtcatccagtttgtggtactttgttacaatattataggaagctcgtactcagggcaatgagctagttgggagcaatgacatccccttttcccagctggagggactgcacctgaacttgacatctcagaggacagagacaccatatagcttgtaggtgctgggcagttgacatttcccaacacgcattaaagaggtgcttgtctcctgttttaccaggtgctcttactctcccctcattaaaaggttgagcaaagggaggaggagttctgctgctggagcacagtccccatgatgagtgccactgtgcccaggtcaagcacggaatgctgaagacacaagaggtgagtgtaagccactgaccctgctcatgagtgccagcctgcaccaagtgacccagctggaacttgccccaggccctttgcaggacacatcatgaattcaaaacaatgtgacattccatttacatatcaaataataaatggagagtgtggaagtataaaacccatatcctagagtcacggtacttggcttcggaatcgactcctctctactagcattgtagccttcggcaatgtattaacctccttggccttagtctccttagctatgaaatgaagataaagataggaaggtttcttctgggtgtccctgaaaagagtaagtgaaaacaaaatccatgtaaagtggtgaacacaattagatgcaagtgttcattgcagtggttgatatttcttttacctgccctgagcactaagtgactgagaatttatttctcatgactgatgacgaatctccagccgcccactgtgccaaccctctgtcttcctgcaagtatcacactgacaaatttcactggctcagcattttcccttgcatgcagttgttctggggcttcatgtccttaaagagagccatgtttactgtttccattatttttccaaaatcagtaggcaaaacatttacttaaatttttgtactgaaaaacagcacagtctgaaggactctgagctcccttgaatgaatgatgattgtgagtatcaggtaagtactgtcaccaccagtcattcagttgctttctcactcaactgagaacaaagagccaccacaccccaagatgtgcttgcttttaatcatatatgtaacttgcattcttctaaccaaattcccatcaaaatgtctataatacagcaaaaactaacgtttaaaaactaaaatatcatgatattagatcattttggttccttgtttattgggaatgatgagtcccaccagcactgggttattcacagagaaaaggattgcatacatataacaccctgtatcctacaactgcactgtaattgctcttattcctggaggatttttttcttttctcttttttggctgattgttttggattttctatatagacagttgcattatttacaaagacagttttatttcttccttcccaaataatgtatcctttattttctttccttgtcttattgcattaggaaagacttctggtacaactttgaaaaggagtggagagaggagatatttttgcattgtttctgatctgaatggaaaaactgctctacaggtagagtgggagggacttcccaggtggcgctagtggtaaagaaccctcctgccagtgcaggagtcctaagagacgtgggtttgatccctgggtcgggaagatccccggaggagggcaggcaa

SEQ ID NO: 28671 - DNA, 3732 bp, Bovine  19866881213267
  misc_feature (1)..(1): n is a, c, g, or t
ntactctttgctataagtcccattgctgttaagtcactcgttaccaagttttggggagtattaggggcaattagtggaggagtaactttctttcttctcttagaagcactgtttcccttcttatttaaatgactagaccttgtgttctgaggaccacttataactgaaacacgagaactgctaccagtaaaattttgtgatggcccgctagaattagggaatgaactagaacacaaaccattttcaacagtctttagtagtaagtcgtttgttggaaaaacaggcaaacttctgcattcctcaatggaggaagttttggggtttggtgtcccattctggtctgtcagcagggggcctgggtggcacactgtctgcagcagggttggcacaggtggatttggcatcactgttgtgtttacttgtgctgtgtcggagacacaacctgtggggacgtgagagagcacatcggcaccctcaaatgtactgggaatgccagcagtttccaaagcctgtttgatgatttcactcccctcttgactaacacttgaattaaagctagtcacagcagtccgaggaaatgtatttggtaaaaatgttgaggagcggttttcggcagcaagaagttgcaggaatgatggatctttaaaacatgcttctgcactgaatgcagactgttgtggctgctgcaggttcacggcatttgtggagagaatcatgctggcaagaagagaaggctgcccattattctgtagaagttcttgagcaatttctgctccatccagtggtttacagtaagatcgcttagacaagtgtccacccagagatctggggttagtgaaagccctgtaacacctgctacagataaatttcccatctctgatgattgccggccatttagcccttttgttgtgcttgggttttctttccttcccatttgggccccgcccgcggtcttttttcactttttctggtccaggctgttgggcaccagcgccactgaagtcatttgcaacactgacttgtgaaggaaaaactgcgttctcaccattccctccctttagaaaggaggaattggtatttccttcgatctgtgaagaaaaatgacttgtattattttccagttgggagaaaacagagttagtcccactgtctgctggtgatgggaagagagagacagagctgctttctgcaggtaacggaaggaaaggatctgagccgctgtcgatattcaaaggcaaaaccgttttggttaggtcttccatttgtgctggcaaggtggtgctagataaagtctccatctgggaacataacagaccaccaccttgttcgtttttatcctgagaaggtatacttggattcatgacactttccaccgagggcaacagtggagctgacacacttgctagatgagctgggaaaatggaagatgagacatgctgcaactgagcagaacaggcaggagtcccactggctttggtctgtggtgtaaaaaatgcattattagagctgctcacctgtgatggcaaaaaataaacaaattttccattatttggtgtatttaaattgttagctttctggccccttttgcttttgcgctgcattttgaatgctgcgtactggtcggggtgtgctgtcttcatgtgtttcccaatactctgtgaagagttgtaggttcgagtacatccctcaacctggcaactgaatttctgaactggcgcttttggaggcactgatggagttcctaaggaattactgaggttgggctgtggtggaacaaatgtgatactttccagcgtcttcagaggtaaattataaagactagatgacgttttaacattacctccacattcaaacttgggagttggtaaactgttctgaaaccctgcctggttttgcacagaaaaggtcatcaggttgctcacttgtctttctaagttttgtgtggtcatgccgtctatcttgagggcttctgaggccactaaagaattctgagtaatctgggtttcattaaaacactcctgttcctttctctcttggaaatccgtgtgacacaaatcattacaagcattttcaactggtacatgtaagtttgtgaccagtgattcaccagtgttttccacagttgagttttcttgctttccaaagttctcctcgatcccctgattgagggacaccttaatggacacggctacttcactggcctgaagcagaggagtgggagcagcgtttcccaaaccatttggcagtggtccatcagcctgcccaagctccgaagcagaaatctggtcttgcttggtcacaggtgattctgccttgcttttatcccaagcaccacttctatcagctgggatggtgttttcaacactattttctgaaggaagcatggatctttctttctcagcattcccttctgcactctgattcactctggaaggctgaacagaatctctggctgaattaagttggtcttcaggaggcagcactttttcaggcgtattgtgatcttccagatgcttttcaagctcactctgagaacggtaaactttaccacaacctgtgaacttacacgtgtaggtattataatgctgtgcttcatggtcatacagtaaataagcttctgaaaaaattcgaccacatttaggaaacatgcactttgctctaaagacttgatgttcctttcggtgggttaagagctccgcatagctgttaaaaccagccttacacttcatttgtatacagatgtatggtttactgccacagtgcatttgtaagtgatcattgagatgagtaacacttacaaaatgccgcctacagtactggcaaataacttttttgctttgcatttcaagaaagcgcttggcatcttcattatccttatgtccctttacgtgagcaattaaatttttaaagtacttaaagccctttttacaaaaagtgacagggcaattgaactcattaacaggtactggtttctggactgggatcacctctggctcgtaagatttgtctttgtcatcagtttcatcatctgagccatcattgtcattaaacactatgaagtctgtggaatagagactgttcttcttgattggccgctgctcctgcttggccacagcatttgtcttctgattctcgttggtagctgtgatcttaggaggccttcccaaccttcttaatggtttcatagctgccagtctctctttacttgattgtttaacatgcaacgtgacgtgagggacaaaagtttctttagaattaaagttctttgcacatatggggcaactgtaaatcccatctttgtaatgcttttgagcatgtcgtactattcgatgaccaaggaactctttgtcacacagcacacaatactgcatgtaggcttgccaattcctgaaccgagctgatataaatcccctctctcttaactgttttatctctctctttttctgcttttcatcacaaatgtctctaaggccagaattagcaccaattccaccattcacagaagtgtctttactatcttcctggtagtctgctaccttctcataaacctcactgtcatttaattcatctattgaagacacaatggatgcttcttctcccattaatgcaagacactgtcgttttaaagttttccaatcccagaattctggatcaaagggccactgagttttcaatacaagtaagagctcacagcgtagagaatttggtatggaagattctcttcatcatatt

SEQ ID NO: 28672 - DNA, 1143 bp, Bovine  19866881234886
  misc_feature (1)..(1): n is a, c, g, or t
ntgggttggggtttcccggtgatgctgtggtaaagaacccacctgccatacaggcgacataagaaccacaagttcaagttcaatccctgggttgggaagatcccctggaggatggcatagtaacccactctagcattcttgcctggagaatcccatggactgaggggcctggtgggctacagtccatgggattgcagaatcagttaccactgcagtgacttagcacacacacacgcatacttagattaatatttacagaaccgtagaatttatatatgcaaaagatcccagagataattacttttctcaatttttgttttttggttgggttaagtggaacttgtatcacaccctactggtgatctttacaagacccagtggttcctaaaacattggaacagtgcctgggtcgcagtctggtcatgagatctaagaatttcactcatgttctctctcctggtgtctggtttatcatgtccacaccatcgtctgcacatcctcatctttttggagatcttccctacccagggattgaacctgcatctcctgcactggaggaggattctttagcactgagccacccaggaagccccttttcttccttagaaatggtttaagaatggagaagagaagaaaaaggaagaggagggaggttgtgtcttggccacggtaactttctatgtcaagaagacacatcatttctcctttattcctttcccatgtggctaaaacctccccacactgcagcacattggacactggctaatgctcctctaccctcgagaattggcctggtttaggtcatcagtgtgtccttgatcgccaaatccaatgcacacttttccaggccttcactgacttgacttttctggacattgacatagtttggaatttcctccttgaaattgtgcttcctttggcttctgtggcaagtctggccttttcctcatcttcctgccccttaaatatttatgttcctggtccatgtgcatccttcccaaggctgtaccatttaactaggaggcaggatattgtaatgcctaaaagcttgaattctggaactagattgcctaggcttgagtcctggctgttccacttgggatcggttgctctatttgttgatgcctcaattttgtcatggaa

SEQ ID NO: 28673 - DNA, 1651 bp, Bovine  19866881241736
  misc_feature (1)..(1): n is a, c, g, or t
natccaaaaatgagggggtatatgtatgtattgctgattcactttgctgtacagcagaactaacacattgaaaagcaaatacactccaagaaaaatttttagaaattaaaaaagcccgttaccttaaaaataaccgtgattgggtcagtggtgacagctgggtggtgtccaacatagctttgccttggggaattcaagttttgtgttagttaattcagataattcagccaattcagcatcacttgccacctcccagcctctcactgttctgtctcttcacagatcagttgccagcctgtatccacacatgcttttgaatttaaaagtcgggaaacatgggttctaatccaaaatctgcctgcttgtgtgacttgaagcaagtatctttacttcctagagttgcaatttctttgtttacaaaatgaagctatgagacgaggaccaccaagattttccaagaaataaagtcctaccatcctatagtgtcttccagcttccacttcacatctacagacattataaataatccacaattggaaagcctattgaaatctgaaaattatttaaggtatgctcatcctctatcttcctcatccacaaaagagcttttacttgtgatgttccctctgcccagagtgtttttcttacaatcacctacatgtttctcggctccccttctttccagattctgatcaattgcaactctggtagagccttcacttactaccttaataacataacaagctccacttccaaatctattcttttaactttactctgctaaagctttttgtatagaacttttgccatctgacatattacatatgtacatattgttgtatccccaaaatagtatgtgtatcagtcagcttttgctgcagcaacaaagggcctcagcactccagtggcctacaacagcaaatattcatctttgcttatgtcacatgatggctgtcggtgggctacagcatttcttcattctcctgagcacacccaggcttggctaggctggcttccacttcaggacttgagttgaaaaaacatattttctctaggataaaatgtccttatggtgaagggcaggaatatgaaaggaagcagagccaaagcaggaaatctcattttaaaattctgctcagatgtgacagtcacatctgctcaaattccattagctgaagcatgtcatgtaaccaagcacaaagtcaaaaagtcaagtagagtatatgtcaagtcacatgacaatcaattggaatctaattagatgcaacaatcctattgttaaaaacaataatccaataagccaagaaatataaactctagcacttaattcttttcctgaactatctgtaaggccctagaagagtaggcattcaataaattctatttgatggattaaaacaaaacaaaacaccacccttttcatcctttctagttccactcttactgctagaacatatcccaacttggcccacaattatcactatagatttgatctggcaaggagagatgagagggactgaataatttttttatggtccttgtaagccagtaattatgggataataaaagatactttgagctttgaaatgaaagtgttttattgggcctccttgaacaatgtgcttttgtcacaaatttcagcatcaatatt

SEQ ID NO: 28674 - DNA, 1147 bp, Bovine  19866881350531
  misc_feature (1)..(1): n is a, c, g, or t
nctggtccgggaagatcccgtggagcactagacccatacaccacaactactgagcctgtgctctagaacctgggagccgcaactactgagcccatgggccacaactactgaagtccacacaccctaaagcccatgctctgcaagagaagccatggcaatgagaaacccacacaccaccactagacggtagcttccttcgccacaactagagaaagcccacgtacagcaatgaagactcagcacagctccctccaccccaaaaaagaaaacaaaaagaaaaaacaaatgaagaatctgccttccaatgcaggggatgcaggttcgatctctggtcagggaactaagaccccacatgcctgggagcaagtaagtccatgaactgcatctggagaaagcccatgtgctataataaagacctagtgcagcccccaaataaataaaacaaaatcctgttgtctgagactgagaaggtagaaaggagaaggtttgagtgcaggaaaatgatcatgagttcagtttagaagggctgtgtttgaggcactgacagtgttcacaaggagatgtccaccagacttaattcatgggttatggtgtgagaacgagacagatcacaatcagagaaacatattttagagcctcaggcaaggaaatatttgtggaaatgatggaggttggaatggagtatgaatatacaggaagtaagaactgatggttaactcccagaatgaagaaaaggaggcaaagaatgagaaggtaactagagaagtgagaaagtaaaggatcctagaaggcacgggcttaaacaagaaagggatggctaactgtttgaactgatgagaacaggaagttagataaggacagagggaaggtcactagatttgcccattggcaagtccccagtaacctttgggagatcagttttgggggaattgggacaggcatacccagatggcaaaagagagaataggcagtggcaggtgagaactggaggcagaacaaatgggtggataactggagactcaggtgggagaacgaggagagagatgaaggagcataaggaggtactacaggtggaggactccgtcctagtgcaaaaaaagactcgagcaaattgaggctgagagtaaagaagaggggggagaggaag

SEQ ID NO: 28675 - DNA, 689 bp, Bovine  19866881683031
  misc_feature (1)..(1): n is a, c, g, or t
ntgatcgaagatgatttaaagaatctaggaggatgttcttaggttgtatgcaaataatatgccattttgtctgaggaacttgagcagctttcgcttttggtatgttgaggagtcatggaaccaattccccactgaaattgagaactgagggctgcctgtagtattatcgttcctcacttatataccagtatccttaaagttacaaatacagtacaaacagatcataaaaattacttgaaaaattgtgggatggatattaatatttcactgctcaactattataatatagatttaataagtccacctttcaggctaggtgcttaaagcaaggctaagtttgatttgattttctataacattatcagaaaattaattctacttcattgttgatattgccaagtaatttccttggttttgaactacttcagggaggtcttaaataaatggagccaaatatgcattttcgtagttgattttatctgtcctctaatatcctgccttatattattatttagaaatgtattggaagccacagtcactttggtcgctggtaaaatccatgttatttacttctctaagaagaaacttctttcaatttaggtacctgccatgtagagtttcaatgctgttctgtttgactgcaaagaaaatactgcagtctctagtattatggcaagtcgtataccatt

SEQ ID NO: 28676 - DNA, 619 bp, Bovine  19866881882668
  misc_feature (1)..(1): n is a, c, g, or t
ntgaacctgtgtctgatatatcctttgtaactaatagaactgtttataaggaaggccaatgtgtcctaatgagtgaacaaactttttctcttttcagttgacttttcattcagttgtgctccctttgttttgtcagagtataagcattgctattcacacagaaatgcaaagtcctgttgagtgcaaagtgtagatgtcttaagtgggttctaaaatatcaaaggtggtgactcttgaagctgggtgatgagttcatggcagctcattatcatgctctaattgtatgcttgtaaatttccaaattaaaaattaaattaaaaaaaaaatagaagtttcctcggtatagcaagccactctggactctaacttttcaagggacatatgaacagataatcctttaaagtgtatgtatttagaattgctattcaaaagcagagacattactttgtcaacaaaggttcatctagtcaaggctatggttttccctgtggtcatgtatggatgtgagagttggactgtgaagaaggctgagcaccgaagtattgatgcttttgaactgtggtgttggagaagactcttgagagtcccttggactgcaaggagatccaaccagtccatt

SEQ ID NO: 28677 - DNA, 932 bp, Bovine  19866882182849
  misc_feature (1)..(1): n is a, c, g, or t
ncctcgataggcttgtttgggctccgtcatatggtggtggtagtggtggcggttagaggggaagcccccaaagcacaagtgcttttcaatcctttgcttgcatcatgtttgctagcatccattgctcaaacatgtcccgtggccaagttcggagtcaagtttgcgagtgctccattgttcgtacttatggcacatagcttactaagtaagatcaaccactgaggaagggaactcttgttgtataattttggcacaattcaaaatctgtcatctaaaaaaatattttgagaattctttggtggtccagtggttaggactcagtgcttttaccatgggcttggttttgatccttggttgtggaactaagatcccccagaccacacagcatggccaaataaataaataaaacattttagagataggtcaaagacagactcagtgacaaatagtagataagttcagctaaaattaatcctttgtccaaaaactttgggaaacattgtttggatgagcagacattgattatgaaattaagtcagagggagttgtgtgtgttctctctgctcagagttaccattgtctatattaaaaaagtgctgagaatctttgcttgggttctagaatggctttcttagataattcagttcaactcatcctattgttgtgtgtctagagttgtagtgaaagtaagtatttttagcttatgtgctttaagtatatatataattataccgtgaagacttttagtagagttgtagttataaaatcaaggtagaatacaatattggagttctaaaggactgagaattattgattcacagagctgagagagacaattttccatcactgcctaatattagggtgaggccagagtgtgaccactgtaactcattctggaaaacagcagaaactgctctcagggataggattca

SEQ ID NO: 28678 - DNA, 2172 bp, Bovine  19866880201889
  misc_feature (1)..(1): n is a, c, g, or t
nataatctttgaaatagttttaatgcagtttttttcctatgcaattgttaaagttttgacatagacaattactgacacaaagatatattaagttttaagagaagattttaaaacagctgatagagtatgatcttatttctgtgcatgataatttatacatatattttacatatgcaaagaaagtctgaaagtatatcatctagataataatagtgattttatacagatgggtagaatacttttttggatgtaatatttcttagtataaaaaatacaattttaaacagcttttccaaaggaattacaaatatgtgagttgtttattcaagatctcccactggcaaccacaggagatatgaggactctcagttgaaaaacatttttttaaaaaaatgatgaagtcctccagcaaaatcatctatcagatcagatcagatcagtcactcagtcatgtctgactctttgcgaccccatgaatcgcagcacgccaggcctccctgtctatcaccaactcccgaagttcactcagactcatgtccatcgagtcagtgatgccatccagccatctcatcctctgtcgtccccttttcctcctgcccccaatccctcccagcatcagagtcttttccaatgagtcaactctttgcatgaagtggccaaagtactggagtttcagctttagcatcattccttccaaagaaatcccagggctgatctccttcagaatggactggttggatctccttgcagtccaagggactctcaagagtcttctccaacaccacacttcaaaagcatcaattcttcggcgctcagccttcttcacagtccaactctcacatccatacatgagcacaggaaaaaccagccttcctcatttcgtacatggtgaatcttcaatcaatcttcaatactagggaaaaatgatttaccatcagctccaagggcgaccattcttatttgcatttttaaaatcttgcttgatggtttcctggtttgtattgagcaatacaatatattatgatttcttttaggtctcaggcttgtggttatgtgctaatatgcagaaatgaattgaatgcagtgcatagaagacagtcattacaagattgtttctttgtttgttttaccagtacccctttgtagcaggtgagtaagaatcaaggggaaatgctttgcaaaatatgatcccaaaatatccactgaaagaagtatgatgtcttatgaaataaagggcaaaggtgttataagttaagccaaactacagactgtatggcaccgttttcattgagaatactcttaagtcatgtgtcaatattgagggagagttaattctgggaaaagagtaaatctccaatattaaaacagtagtcggaattacaatgcaataagctttttttggtttgtttttgctattgatatctttacctaggactgtgtctgagatctgtgggataagcaagcatatacttcatgcttatcacattttggaaggcagacaaatctcattaatttcatttaagtactcaacactgccatctcaaccccagacaaactgtggacaaagaacaaaatgttgacttccagttgccaacaagttagacaagtacttcaatgggaattttatttgagaaactttctcacaaaattcttgctttcttcttttattctttagccaacataatataatatggtgagtggattgatagtcattataaaactggacacaggagaaactagttttcttccttttgatcaaaagatacataagtatactgttgacatctttcctagaggaaatatatatagagagagatgctatcatgccatataaactatataaatatatgtgaatatattatcaaatatattcacatacatataaaatatgtatggaaagatagaaatgaaagaatcatcttttattaacttttgctctttcatactattattaaactaacacaaagattagataaaaatcaacttaataaataatatcagagaatgcatttaaataatatgcatatgcatgcatgtgtgctaagttacttcagtcatgtctgactatttgcaacactatagactatactccaccaggttcctctgtccatgggattctccaggcaagaatactgggttggggttggatgtgctctcctccaggaaatcttc

SEQ ID NO: 28679 - DNA, 1839 bp, Bovine  19866880498488
  misc_feature (1)..(1): n is a, c, g, or t
ntggaagagccggactggaacccggcaggcttagtccttctctgacctgctgcactgcatactttacccatactgccttctttgaggacattgaaattacactttcagtagaagaatcaaaagatcaaatttggttcaaatgactggccacgagttgcagctgtaatctggaagagaatagaggtaatttcctacataagaataaaaatcattgaccttgcaattttagtataatgctttcacatgttgcactcaactctcttctgaagatctcttcatcattactgttccaccattttctgttcattgttactatttccaatacttctctttttgcccatcaactattacttcattttacttcctcaattgttgaatccaacacattcttttagctagaactcttgaataagataaggtaattttttcttgggcttcctaggtggctcagtggtagagtctgcctgcctgccagtgcaggagacttgaattccatccctggattgggacgatccttggagaaggaaatggtaatgcactccagtatttttgcctgggaaatccagtggacagaggagcctgatggggtaccatccatggggtggcaaaacagttggacacagcttagcaagtaaacaatagcaacagtatttcctttgtaattatctttattattattttgagaagtcagtgagatttagagattagaacactggatttggaataaaaatccatggattttaaagttagatctaccatcaagctctgggtgacattaggtagatgacttctctaagacttaactccccatctataacttacctctagtttacctcacaggatggttacaagtttcaaattcaatagaacacacaaaaagcaagaatacttataaaattttagaatttttcattggtcctattattgtgatacaggttatctttgatatatgattatttttatattaatcaattttaacctttgtcaaaaatccaccatctgaaaatgagattttacatatgtgctacatcagagtttctaacacaattaaaagaaatatataaacataaagtaatctctcattgttatttcttaatatgaaggtagcagtaagatggtccagctatttggcttcctgtatctaggttttattttatctaatgtgagttggcttatttcatctgtttactaaacgttgtagaataattgagttggttcagatacttggtttggcttactgaaatatgattcaaagttgcaaaaagccattgttgagtgagttagcagacagttttatcagaacactttcaactgttgtgtgctattccaggtgggacaattagctattattttgaacagttttacaggcatgctttacttaagtgttatactcaatcacagttcagtcattactttgctattcatgaccaattatcctgaaatacactgaactttgtaggccaaactgaactactatatacataaattctcaattttttgaaaatgttttcaactcagagacaaaaagaatgtttacatttactgagaatgatgattttcaacaatcatttaaaatctgtttctatgaagctttagtatatgtagagcattcagttcagttcagttcagttgctcagtcgtgtccgactctttgcgactccgtgaattgcagcacaccaggcttccctgtccatcaccaactcctggagttcactcagattcacatccatcgagtcagtgatgccatcgagccatctcatcctctgtcatccccttctccacctgcccccaatccctcccagcatcagagtcttttccaatgagtcaactcattgcatg

SEQ ID NO: 28680 - DNA, 1363 bp, Bovine  19866880539022
  misc_feature (1)..(1): n is a, c, g, or t
ntacatttggagaattgtaatgaagattagtttgtaaattaaatggcacatttgtaggcattcaatgttagtattcaacatgaatattaattggaaggactgatactgaagctccaaacactgtaatcacttgatacaaagagccaactcattggaaaagactctgatgctgggaaagactgaaggggatgacagaggatgagatggttggatcgcatcaccaattcaatggacatgagtttgaacaaactccaggagatggagaaagacagaagcctggcatgctgcagtccatggggttgcagagtcggacatgactgagtgactgaacaacaaccaatatttgtacacatttcactcattaaattgatcttttcatgtttttcacttttattattttgttataaatgttttctctttttgaggggtgatgaaattgctaaacttttttggatattactgactgtttcatggataagcatattatattttatatttgaaatttatttcacagttgtctattgcccctagatcttaaattgcacaaaattcaatagaaaaagtaaaatgcattaacaatagaagaaattttcatggactttctttagaatgactgcaggggttcaaacataaacctgcttttattatctttctgtgactgcaagcccatgggaagcctaggagtctccaagcagattatggctctatgtaaatgaagaaaagaaaattaaaaccaagagctttcccagctctatttaaagaaaatttaaatggctttccttacttgcatgtcacagagaaacaggtttaaatcactagagctgtgtaatgtgagacgtttagaaattcagcaaagcataagagataaaacactttcaatgttaagtaacagcatctgattgacatagctttcctcctagtgtgtaagagcttagtttaccttaaaggatagctgagatcactcaaaaagtccaaagaaacagatgaacgcttgctttgacatcaatgctcaagaattaattttcagttcagttcctttgttaaacatgattatttgccctatccttgattttgattttttcaaaagtataacttgtttaaatttggaaagaatgaacttacattatcataaatattttaagataggaaagaatgaagcacagttattgaaccattctccaacagtttttgaatagattccacaataataaccacgtaaaatttagttcatgtttgcatacctctacagagggcaaacttactgtttgtcaaggaaatccatagcatcattgaatattgaggtttaaagaaagtcccattagatctagtattttttctgtattatagagatacagtcacttca

SEQ ID NO: 28681 - DNA, 1062 bp, Bovine  19866880596617
  misc_feature (1)..(1): n is a, c, g, or t
nttcctagtggttagagatgcaaggaagggcacataaaactccaaggaaccaaaattttgacatatacattatatatatattttataaagcatgcattttaattatcatcatttcttacaatccagctatctggagtttgtaacatatatcatgaatgtttttacatttagaaaaggagtgtgcaactaaggattaaacaaatatttgtgagtcagattatttttttcattgtttggcactgatatattgttgaaatgtattagaatatttttacaagtgactctttcacagtagaattgagaatgcaaaagaggaagtagaaggaaagaaagcaactggaaaaaaatcttaaaaacttgagattattacagagaaaaatcgtcctgtgacttcttctgaagataaagtggtagaataaagttagaaatttaaatcttagattaaggcaatattaagtgtttttatagatcagaataagatgccaagatagagtttaaagtccctttctggaaatctcttagaagtgaaaaagattattatgcacctaattgaggtataattttgcctgagatgtaaaagatcaactaaataacctctcaaggtccttttgttccaatctttcaataattatttaaatgaaatcaagaattaaatgcttgctttgacttgcaatatcttagtgcactgacctgggctttgtaacttaatatctatgagtactaatctattttaactagatgggaacaggaaaaatgaattgcaaaacatggtaatgagatcaaagatctcaatatatcttgcttggttccaagacccagaggtcaaaatcttatctcaagagaagtgaagtggaggaggatgaaaaggaggagcatcattcagagttgagcttttagtacatgctgtggataacaaagcgaacttaattttactgtgtgtgtgatgagaatatactttagttgaaaaatttccttcctatgggtggttgtaattgaacgaagttacatttcatctgaattaatgacctaacagtagccgctgtttctaattataaaaatcac

SEQ ID NO: 28682 - DNA, 724 bp, Bovine  19866881026330
  misc_feature (1)..(1): n is a, c, g, or t
ntaagtacatattggaatcatgtctctaaagcctaatttcaccatgaagccagagttattagaagcatatctttcctgcaaggaaaatttaaaatttataaacatactggataatggtcttggtggctcagcagcaacaaatacataatttagtatttgggcttattctgattgccctacacacatcaattatcttcactcccagactgtatattaggttgacaggcagtattcaaatttaggtctgtagtcaccgttccactttctcatcacaaggattattacagatatgtcaagtatattgggaaaattagaaacgtatctaagaatattcataattaaatgtttaaaaatttactgaagatgatataattttaacagcaaaagggacattctgcagtgtttctatcatgtatgaatattgtttcaaattaaaataatcggattatatatatatcaaaatttctttttaaagtttgaagaaaactaattgggattatgtggtttaaaagaggagacttgaatactatttacatattaagagagaatctaaaggtctttgagggttttactttgagaatatgaattaagaaagatgtgaatatttcactggactgaaaatataacccatttctcagctaggactccgtacaaaatctgtgaggcactgattttgatctgctcagtccttatgatattttctctagtcacatatttctatatt

SEQ ID NO: 28683 - DNA, 739 bp, Bovine  19866881081496
  misc_feature (1)..(1): n is a, c, g, or t
nagagaatcgtgaaagtactataagatatataggtacctaatattatgctgaaaaatatagttgaaatatagtattctcttaaagtacaaggcttaccatttgaggtaaattacctaggaggacaactttcagaaaatgatagtttgccaagataattatttcaaatatacaaacagtttatttccaagagggagcatgttttattctccttgactctgctgtgggattaggatctccatctaacatttattgaacatcaccacatacccagaactataataaaaccttgatttaactggagcccaattattcagaaatataagttactcaaatgtttttctcttgtattcaacatttatgcaccagttatctgaaccataattgaaatgaaaggcattttaaacaattgcataggggattctactgtgaagccagagttgagaataactggtcagattcataaggtttcaaccttagccacatatggaattacctggaaagcatggattattgatgccttgatcttaaccccagatatcctgctcgatgctacctgatcattgggtcatttaatagattcaggtgatttcaacatgcagttaagattctgagggtttcttcagtctaatatatatgaattaataaccaatatgaatagtctatattacttagaagggtgaggaaacaaacaataaaaatacttttcataagagcacccactatgtactgctgctgctg

SEQ ID NO: 28684 - DNA, 777 bp, Bovine  19866881084066
  misc_feature (1)..(1): n is a, c, g, or t
nttttaatacctgagcaaatgttcaatgtgaaccgatggcttttatttccccttagggaagttctatcctttaaagtgtttccattttagaatatcaaaacaattttcattatataattcttcttgaaaatgaacaagaaaatataaagtttagacccagatttatccttgaagttccataaaaatattaacctgtatttctaccatgaaaaagaaaaacaatatttaacttcctcttcaccagaacagaggcaaactaaatacttattttctgctgcattagtgtaaagtgatgcttttatttgttcttcttggacacaattattccaggtcaattctgagaagagtgtttagggccaggtttacaatttatatcaaatttaataaaaaattaaagttgttcaggtatgcattagtttttataattttgcttatctaaccaatgttaaatacacattctggaaacacaacagaatgcaattttggaagcaaatagataatacatttgatatttattcaaatctgagttaagtcaaagtttaatgaatttatagagttctccatttgtgttttatttagcttgcagacagattctgataacaaataattcttttcttagagtcagtttgtgattaaccaacttcttttttcacactaagatctcaccttgctaaaaaaatgttttattaaagaggtttgcataagaatacattgtttactctaccggttctaaaatgcacgtcccataccctacttaattttgcctaagaaaggagt

SEQ ID NO: 28685 - DNA, 1362 bp, Bovine  19866881448396
  misc_feature (1)..(1): n is a, c, g, or t
nacaaaaaaatcacagatccagaacaaataaaattcaatctcttagcttacatttataggctttgtctgaaccatattttttttgctattttttcataattatttctttccaagcaacaaacagatcttcctatgtcttgtgatttatttgtaatattgtgctcatgcaaaagtaatacttgttttattgcgttaacatttaaatagttttggatttgggtcccaaaactatcatctaacattttacttgatgttgcttcatccatattgtcactttatttggagtgatatgatgatttgtttttggtgagttacaaaatgacaaacatagccagttgaccacagttcaaaaatcaagattttaagcttcttgatcatgcacattttactttcattcttgcaaaattttttgaatcaggaacaccatttgactcaatatttattagtttttttttttttttaatatttctaaaaacaacaacaacagaaagaatgaaagaaaatactgtcccacatccactgttcacgaaaaggaagagcagcaagaatcacactgaccattgttagtacagtcaggtggtgacaccggtaaacactgaaggtcattgaatactgcaggaatgtgatcgttactataacccatacttctgtaacagttcagattgccactggcgtttgcgctctggaaaataatctggaatgtggatttttttaaaatcctgaatacactttttcatttcttcttccacacttagcttctcacagactttctttttggaaagattggtttcccgggacttgctgatgagcgtctgaaagagttcactgtttctacgtttgtctggtgggggcatccattgcacaggtgcttttttggaaggacgatccaaagttaaagtgttaggttggtgagctgtcgcctgctgggcactgggtgggttgtcctggggagtgctcgcctctgagtggctgtcgcaactggaagtggagagctcattacaggaagtcccactctcacttcctttatccgtgactttgtcatgtttcctatcttcgtgttcttgtttaggtgacactattttctgaggtggtcctaaaaaggagaaaagaagtagaaaaactgagtaagaagtgggaaggtcaaattaaataagctttatatatattttattttcaaccacaaacatttaagaaaaatgtggtctgctaccctaatttatatttgaggaattaaatccaacacctggtgtagttaatgcacactgaagcatgcaatgtgctgattaattattgataacaattaaatttgaggggtttgcttgatgagcatttatcccataacagatcatctataacttcatg

SEQ ID NO: 28686 - DNA, 864 bp, Bovine  19866882081875
  misc_feature (1)..(1): n is a, c, g, or t
natataagtaaagcatgcaacattactgcttttcccactcctacactatactttggtgagggtacccaactcacacctaactcaggtttagggcacttaggggctttagaaacatatatacatatgtgtatatatatatatgatttaaagatagatttgcattcttactttataaatattgacattaaaatttttgcacatctcaaatatgagggttcttttctctaacataggcattttgacattctggcagggtctgtgataaaaactgtgaattgccagatggataaatatgtaacatcttgactgacagattatctttactatgtagataaaatttaacactgaaagtgggaacaagatgcttctgatttcctattgatctacaaaaacaattagtgaaatcaaattgtacaatatttgtatagatcagaagagatctgaaaaagtcattataatgcttatgggagatttcaattacctaaatattgtctgtgtaacaggcagaaaatttaagagtgtgcttcttagagaaaatttcattcattcgtaattcaatttgatgaacaactattctgacagaatagaaagaatcattttgttatatattgtgagactctcagccaggaattattgataaataaatacgaaaccaggatctttaactgcatgataataaccatgatacagttgacacacacacacacatgcacagacaaatgttacaaacctgtagattataaagtgctgcatcattttctctggttcttacaataaatttcctgcccaagaaagactatattcaactaatgtctgtagttaatcttctttctctatgtttcctaattttgggtgagatataat

SEQ ID NO: 28687 - DNA, 1153 bp, Bovine  19866882202769
  misc_feature (1)..(1): n is a, c, g, or t
nactaacatgctgtcagagagatgcaggaaacataggcttagccttcctctgattccattattttgaccccatctggtcctactggccacaatctatttagcagtaatgttcagtacctatgcatattcataagaagagggtttattcccctaattcagaagtttctagatatagatatctcagtcttagcaagggatttaattcttcattactccatagacaccgatttctcttccttcccctttctctctgtcttcttctttcactccattgttttataaaactggctttcttgttttgcaagaaactggtacctgaggttgtaagcaactctcttgtgtttttattttcttattacatggttcatggagcagaaaaaagagaagtctgaaaataaaagaattttagaaggtcctgtcctaaggtgaaatttaattcaatttattgaattgatattcagtttaattatttgaacaccagttataaaatgaagcctagaaaaaatatttctggtaaattcatcttttgctttgactgatggtggtggtgggggcagggagatccattgctaaggtactcacagtttattctccactcatgatatgttgaacattacacagactttactaattatgttatcactgcctattagaattctatgttcctaggcaatgaattgtaaaagctggtaaaaaaaaaaaaattatttaaatgcggagagagaaaggacaataatatagcattatagtgaggctagaacaaagaaaatcaaggtatcattttacattgtaggatgatagtcacaaagtcagaaacagaagagtgagggtgaaatcaggaaaacatagaaagctctagaaaaaaaataaattgctgagaaaagacaatacaacagaggaaatgcaaaaggaaaaaagaaaataatgttaaggcaaaagagaaaagtttaagaaggagaatgagaagagtcaaaaaaaaaaagagaaaagaacaaaaagtggaacaaaagtagagaggaaaaataagaaggagaaaagaaggaaagaacagatgaaatactgaatgtatcagatcaaatgtgctttaactggatacaaatggaaagaatgatataatatccaatcttttttattttatataaagagaattata

SEQ ID NO: 28688 - DNA, 1709 bp, Bovine  19866880351222
  misc_feature (1)..(1): n is a, c, g, or t
naatgatacaggaaagatgcccagagctggaagagtaccatcgagaggggctgactttgcactgacaagcatctttccctgctgaaaagatagttaatctgaaacgtgaaggataaggaagcagcctctgggtggaagaggaaggggcattccaggcagatgccaaggccctacagttgagtgtgtgctttcggggagttgaaagtattttgacctagaggacaaagagaagtggatgtgtgtggtaaggctctcagttccttctcttgtaatatcccaagctgcctttctagtttggctttcattcacccctttattcattcaggaattcaacaaatgaatgtcattatcctgtggcaggcacagtgttaggtatggatacaacagtgaatacatccacagactctggtcccaaagatgtcacaggaaaagagaaaaggatgcccgggggctatggggtcacagagggaaagctttcatcttggccatgaattaccaggatgaggatgagaagaaagagaatttcaagccaaagaaaacatatgtacacaggttcagaggcaaaggaaagcttggcaaggcaagaaaccttgagaactcatggaggcttccagagtagattgtgaaggtctgattggatgaaatgaagggaaaagaagcaggcagtaaccagtccttaaagggttctttaggctgtattgaggatcttagatttttcccccctgatagtcacagggagccactcaagaaatttaagcagggaattggtatgaccacatctgtactttaaaatgatcatattcatgtcaacatggagcatggatgattggctaagaagctactgcagagacattgctgagggaaaataagggcccaagttaaactagtagcagagtgaatcagtaaatggggacaggctttgtggccattaggaaggggaagtttataggacctggcatctgactagatgtacaatagaaggaaaagtgttaaaaatgtctttggttaaggatggtttctgttttgggcagctatgtggacagtgggcagcactcaaaagatagaaaacacagaaaaaagagtttcttaatctctgtgtttcttgatctgtaaagtagacattattttaatcatcttgtagggttgcctgtactacactaagaactaaatccctggcacagagatgttcaattaatagcagcaattatttctatggacaaagttgcatagaagcagttagccactggtaataggagacaaagtggttaccaagtatgtcaatgaagacatggcagggctattgggccaagcttgaaatgatgagtaacgaattcccacggcataaatggagggatgggtgacaggaaacattcttgggagagatcacaacaggcacagagctcagagttcttcaagaaacttagaaatggcccactgttcctggagcataggagttgtggaggagacagcagacaatgagctagaaatctagggcttctgaaagctctataaaccaagatgaatagtctgtcatctaccccagtgtttgctgaagtttttctgcagaatataaatttcctgtagaatgttaatagggtcaaattaatatggaaaattctggtttaaacaaaattaactttattgcctttttaatactgttcatattatagcaccactgatttaatggacatgaacttgggcaaactggg

SEQ ID NO: 28689 - DNA, 1710 bp, Bovine  19866880351517
  misc_feature (1)..(1): n is a, c, g, or t
ntcatcaacacatttttatcatcttctctatattttctctacaactgaatatttaattgggttttttttggccactctctgcacagcatgcgggatcctaatttccaaaccagggatggaccccaagctcctgctgtggaagcatgtagtctgaaccaatggaccaccggggaaattactaaaaatttaatttctaaaattctaatgctaaataaatattttataagcattgaaaaagcattctgaaagtgttcatctcccaaacatcctctgcatcctacacagaatcaaagaaaggttaagatggagtgaagacattctctcaaatgcatttataaatccttgcagctcttttttttcttaacggaaaaattcctttgtggctcatattagattttagctacaagacaaggtaccttttacatttttattactagccaatcagttctgtaattcagagtataagatcagcaaattataattaaaaagtttccagtgattaatacaatttggtactcctgacagaaaaatctcccacattaaggctgcaaaaagttttaaagaagatatataatcaaatagccttgttctaataattcctgggaccacacagaaccccaagaaaactgaaggtcctttagttaattatgatgaactgagatctaaaggcaaagtgaaaaatgttaaaaacctcatgagacaccctcaaagcactccacgtatcttcaaaaatgtcaataggagggaagagttttcaagaaatcattatacacagtcattccatacaacaggggcagaggggaaaaaacacatgttcatccatgatcagcaaaaaaccacgttttgttttgttttagaaaaaaattaacctagcttttcttgtaacatataactgattagaaaacattcaagtagatactgttcctatctgctggattaaaaactagttcaaggaactgcatgaccttagttactgaggcacagaaagtaaatacaaaggacaccggagatgacagacacataggaggcctaatcatctaggggcactagggacaaaccaaaggagcacagaaacagaaaacaaaaccacctgggagctttaatgggaatctgtgagagcagatcaggataccaggtcacctcttaggttggccagtttatggtacaaaagatcagaggtggatggccatctgtagcaaagcttacctgggaccagaggggtggggctggagactgaggtatggtacccaatggaggatcccatgaggtttcgaggtggcaccaaacgagctgccaacagaggaggcggtgtccccaactgaagtcgctcagatgcagcagcaccatgttcacgagagtacatgggctgtcctacagaggaaagaacaggagggcagctgggattgagagtcacaagcttctctaagtaatgatctacttcctgagacttgagccaagaacagagaaagtacaccaatgggaatagtacttgagaaagatgctattaatattctttctaactcaagaaagagacatgcaactgggtaggatgcactgaggtataaagaaagggtacgaattaggtagtgtgactgcataatgtccgttttttatcatcttaaatggaataactacatgctgatcttaccagaaactgatcaactatatcaagttattgacaaaggagcccctgagctattattcgtgtag

SEQ ID NO: 28690 - DNA, 651 bp, Bovine  19866880418271
  misc_feature (1)..(1): n is a, c, g, or t
natataccaacacagccaaaaataaataaatttctaagcatccaactgtagtcacttaaagtcttctggctgagcctctgtcatttggctaatgttcccacacatcagtgcagagaaacctgtgaccctcctgaccccaggaacagttttctgagcctgttgtgttagatttctgcccggagcacttggccataacaaagtggagagggaaaaatcaatacaaccggaaccgaatgcacacttaaaacatcagccttcaactgtgcaatcatgtccttgtcactaacatccaagtgcttttgctccatgatctgctcagagtcttataagtaaacacgaaggaggaaatggaaacggctccagggcatgggagagaaaagtgctgttacaaacagggacacacacagtgacagcttcccagggtggaggggtggcaagaacacagcttgtttgactgtccaccgtggatccttcagaagttcctcaccctctttgagccttagttatctcatctggaaagcataagcactaacacagttaaggttgtttggcaaggtcagtggacatcaatgcctgtaaagtgaccagacacagcctggctctcgaacagtgttcaataaatggtagcttattaaccagctttttctgttg

SEQ ID NO: 28691 - DNA, 1032 bp, Bovine  19866880484151
  misc_feature (1)..(1): n is a, c, g, or t
natggaaaaggacagttagaagcaaagtggagaatttcacactacttacctgaatcaatcgggcatataaagaaaatcctgaaatgatgatattaaagtaagatttcagatttgagttattcaggggtaattgccttagttttccagctcactgtttccccttcgctttccttacatggacacaatcttcagaatggacctctgtcaaaggccacagtcataattcccccgcctccttttttattttttttttaactcatttgcactctgggtagtgattgttggagccctgtgggggaataattgaagaggaattaacctctgacatttttctaaaaatagccctaataaatccaatcataggtaatttacctgtccatgttcctccagggataaccagtattgaagaaaggcttggcaggctggcattccttcagcaattatctgtgatctgagttcctggcgcctgtgtattttctctgtttagagatatacagtacaaatttccctctccgctctgacctcgtgaccctgttttctcagcacctttctccttgcagtaaagccctgctcttccagaagggtgtggtgggcttaccagaaaagggggagcatttccagggttcctttttgaatttccaactcctggagtttccctgatagtttctttgagttgtgtcccttcatttttgatgtctgagcttcaagcatctcaaccctgctcatcagccttcagtcctcgtttagattccacagctgaaccccatttggggaagtttcttggtgtagaagaaagggggatgcagaaggccatgggtgggaaaagagtctgtggttggtagaaattatcaaagaaaattgccatttccctgagccataaggaaattcattttctattgcccaaaacaaaagaatctgaatgtgctttttccttttgttctctccagttgttcctagagaccacagtgcagtgtgggcatctaggaaatttacttccccaagtgccacttctagggcacttcaaatacagga

SEQ ID NO: 28692 - DNA, 1674 bp, Bovine  19866880497558
  misc_feature (1)..(1): n is a, c, g, or t
ntccaatgatgacaggtggacatgcaccagatttgaaggataaacttgggataacctcacttaaaatgtaggctctctggcatactcagaattcacttaggggattccctgaggacacttcaaagaaccagacaatttctagtgtggttgagactgcggtacaaggagagactgaggagagacaagtcatacctactcagatgtgtacagataaaaaggcatctttttatctattcttgtgaaatgatccctaagatgtatatttagcaaaagaatatatatatatatatatgtaaaatgtaatgtgtacatatctatatatatctgtatgcctagacttagaatttatctggaagtctatataagaactgcccacaatggttgtgtcctgacaggtaactgggtggccagggggatttacttttttacttcctctcccttcttactgtgggaattttggatcacgtacacttattactccagataagtaaattaaataattaattataaatattaagttctaagagaaaaaagagatgttgacagagaattttctgtcagtgagacagtgtttttcaagtatgaagccttgagggctggtctctgaattgcaaggattgattagcagtcgaggtgcttggcacccgagtaaccccagtggaattgtgtccatgggcaatgacttcagggtggtggtggatcttgggagcattggatgggatggaccatgaggtaatactgtggaggtccccaggtagtggaactgagcctgtgtgacggcaccagaacacacacggtttctcccctagggtaccctgtgtgaggactggctggcagtatattgttgctggccttgctccatctgccaggtggcccgggaactcaaggtgagaacctcccaactctacgaaatctatacggccccttcgaccagagaaactattatttgacagagcaagaaaactcctccttcctcacttccccacaccctcctcttaaatccctcttggtggagagattgttcttaaggtttccctgaagtagtatgaaaataaatggtttcccactactgtgtttactgttgtcctttcttcacacataccccctgatgaaaacgcttattggtctgaagttgctgtcccagctcggccatgctaggcaggttagagaggtaagctttgtgccctccacaccctgcgtggagttgggaaggttgaattccaccccccatcttcccctttcacaagggatgtctgggaagctggaagaattgttatatggctttcttatgctaagcctcttttcccaaagtatcgatgatggggcagaagatggttaattaaattttaacgttttattttcttatttttaaatttttattggagtatggttgatttacaatgctgtgttagtttcaggtgtacagcaaagtgaatcacataggacctggactgggccctaaacaccactgtaatataggagcattgtccttcctttgtcctgactccttcaatcctgactgcataaaggagagagcctcagcttgttgctgactttgaacaactccccagcacatgtaaatctttagccccagactcaaggccttaggtgggcagctgttgaattgtgcccctcccccaaccccttcctaccaaagatatgtttaagtcctaa

SEQ ID NO: 28693 - DNA, 1084 bp, Bovine  19866880522526
  misc_feature (1)..(1): n is a, c, g, or t
ntcaaagaataattttattacagtgttttaagttctgtgttattagtacgaagcatagctcttaaaatacaaagtaggccattaaatgattttattcctggaggaagagggatcatgtcctctttctacatctaacatccagcacagtgcctagaatagcctaaagtcctacaaaaagagcaattagtcaacattagtattacttttacttaaaaataaatatattctgcttaaagctttaaagtaatatttggatatagatattcaaaaacatttatgagagatcattacataatatccttcagagataaagaatttttagacctcagtgaggtcagaaatgccatgcccaaatgacatttagtatgacaaaaagttaaaggcagtatcacctcttggatttgcatccatatctccagatgttaggccaatcaagtttgggcgctgtgtctgcgttcttgaaaaaaactgtctatattgagatctaccagaactggtaatactaggagcttctggattataaccatcaggttcataggtatctgagggaaaacaaaacaacagaacacgtaaaaatcaagagtaaacaatttattataaaataaccacaaaaatgtattttcttcaacaaataaaattatatcaacccacatgtatttctctttgaattaagagtaaatccagtcacaaaatacagacatgcaaatccattctgaattatggatatgtttctggattcatttacctaatgtcatttttgtcctctataataatcacataattaaaacttcactgcacatttttaatagaaatgttcacatatacaaacaccatatacaaaagactgagtttcctctgtactcatgtctcaccactttctaggtattcttttaattaaaagagaaacaataaatctattaacttggttatctgcatttttttttttggccacactacacagcatgtggactcttagttccccaactgggatcaaacccatacccactgcataaggagtgcagaaatcgtaaccagggacagctggggaagtcccggctattgcactttaaactagagaaaagag

SEQ ID NO: 28694 - DNA, 850 bp, Bovine  19866880574742
  misc_feature (1)..(1): n is a, c, g, or t
natcaggatgctgagatgcacggagctcaagtcactcacccaaggtcaggtagccagggggtggcagagcctaaataccagttcaagcaccctcctatttatcatgctacgctgccttccagtcatactgagagtgctttaattttgtgtgtaaacggcatgagatcctctctgtaggaaggtcaggaatgaacaaacaaacaaacgaatcatgagtgatggcttcccttgggatcagccctcacgcttgtcccaccccagccccctcaggatgcagcctctcccagatgccactggtctggagtctctaactgctctgaataagtcaaaccgcacatgatcaacctcactgcaatagattgtggggctacatttgttttctccatccttctctctgtcaatacgttacagccatctcagacacgatggtttccctttccataagcatacagggcacagatctggatagtcagagcacaaatgtgttggcacagagaaagaaatcaaagatattactagaaaatggttagaccctcggcaggctcatgaaagtttaaaaatcagagtaaacacgaggctctctaattagatagccctctttctcctgcccagcatttctacccgattcccatttctcctagaaatagatcttcaggaaggcaagcatctttttaaaattctgtgctacagagagccagactaagatggttctgttgaaattacaaaacactatactttcaaatagctgctgaattatttagtgactttacactgtccaaatgcggggctctttgggtagacaatgtcttggtttccctcctatttctttgttatgacattcagtaaatgg

SEQ ID NO: 28695 - DNA, 1185 bp, Bovine  19866880581394
  misc_feature (1)..(1): n is a, c, g, or t
ntttaaccattcagcaagtattgattgagcaactgaaaatgtcattcataccatatgagttggcatatgatagcatccaaatgaaaatgtatataaagcattattaatatcaattatgaaggggaggggagaagtgagcaaaaaaaaaaaaaagacaatttaaaaaagttcagcacattgatgataggacaagtatataagtgtaattcctcccatataaatttctttgtgaactgtgagagttcagtgaacagaatagttatcaaaataccaatgatgtttatctatggctaatggaacttttatttttactatttatcttgtctaatgtatgacagttttcaatacttatatgcattgtttacacactaaaaattataaagctgtcattgtgaaaaataattcatagagtgtctattatgtgtgaggactaagtctctggctatcaatgtactaaatattcacccaagttctaactattttcttggaagtcccatttgtaactcttcaaatgaaaattgatttgaagagtagtgaaaagtggacactctccaattctgtaacaagaattccattaaagttctcttacctgtaggttcaagtgaaagggctttgggaatgaacttggctcttaggtttagagctcctttggtcttgggtcttggcttaaacagtaagggtaagatgatacttgtgagctcaacctatcatttcataaggggcctggagaagggtcttggaggaatcagtgaaaatcaattgcaatgatggaaaagtcatcgaagaaaaaatgtcttaaatcctgtgggttggagccagcgcctctgtacataaagggtctcaccgtctgtgtttattgacacagaacgtacttttaattaccctgaaggaatttctggcatgttttgcctaagccagtcttaaaatctttaatcagtagtttcatgacaaccaggcccactggcaatggggacacctgggggcagctggtcaagggtagtgtattgcagagtggctattagtgacagagcaaaagtatgctttatcagagagacagaagcaggaaaatgagatggccttgactttgaaaagtttggcatgtcttgtgtctgagaagcctgggtttccttcccagttattgaccatgatctaagcaacctccataacctctattttttgtatatt

SEQ ID NO: 28696 - DNA, 2487 bp, Bovine  19866880596711
  misc_feature (1)..(1): n is a, c, g, or t
nactgtcttctcatcccttgacagcttcagcaaccagtcaggtcagttttcccacactgtcactctacagagatgtttcagtctctggccagccagaacagtgttctagttaggggatggcctctggagctaggttgactgggtttgaataccagctctatgatttcctggtagtatgactcagggaaatttcttaacctcatgtcccatttttttctcatatataaggtagagttgtttggagcataatgctttaaaaatgatgactggtacaggctcgataaattttagccaatttatgcattgtccaatatatcaaaactgtgaaacttacatggtccaatagatggggttttggtagcactgaagcctaatataggtagcatttaactcacacaggtgtactttctttcaattctcttttcctctttcaaggacaaagtcttcgttagtttctagtatgtccattaccacctcttttacattcactaacagaaatggtatgaatagtttgaaaaaccccaatccagtccattagcactcttctgcagtcacacaatttgctacatggtctccatgatcaattctgtaacctcttaaatgaagagcttattcatacctatccaaaatagcctggatttgtggttttctctagcagagagggctcaagagagtgagtattgatctcgaaacacctttctgaggctgattcccaggttaataagtcttgctgaatattactagtttgcacctaggcacatctttaccaacatattaaattagcctttttaatttccctccaagctcagctccctctcttctctcccctggtttggtaaatggtgccacagttttggtggataagtttcatattttagcttatcaggagtggtttcctggaaggtaagatcttacaatctaagaagagtagaatggaggtcagttactattttctgccctgggtacacagtgagcagagttgatcaactcttcagttacaatgaaagtggacatttagtcccttttctttgactttattcattcctccattacatctccttgggcttacatgtcttcattttcccaccagttcaatttctactcctcctgaagatgcaacaaaagccctatctttctttttctaaagactttgttttagagctgttttaagtttatagcaacccttagagaaaagtgcagagatttcctgtataccttctgtccccacatgtgcataacctcctcccttattaatgtcacttaccagaatggtagaattttcaccgagatgaacctctgttgacataataatcacttgaagcctacagtttactttagggttcactcttggtactgtatgttctatggggttggacaaatgtgtaatgccatgtatccatctttatatcctacagagtagctttaccgccctaaaagcccactgtgctctcacacaccctgtctcccctgcaaccactattgtgttttattgtctcaataattttgctttttttcccagagctctgccttttttaagtagttagaattatatagtatgattttctttcatttttaatttatttggctgtgctgggtcttggttgtggaatgttggatatttagttgtggtgtgacaagtgggatctagttccctgaccaggaatcaaacccaggttccctgcattggaagtcttaaccactggaccactagagaagtccctatagtttgattttcaaagaggtagccttttcaggttgacttctttcacttactaatatgcatgtaagatttttccacatctttttatggcctggtaactcattctttttagtgctaaatagtatttcattgtctgaataaacagcagtttatccattcacctactgaaggatatcttggttgctttcaagtgttggcagtcgagtgaagcagctataaacatccatgtggattttgtatggatacaagttttcagctcctctgggtgaataccaaggtgcatgattactggatcatagttttgtaaggaactgtcttcctgggaagctcttccaagtggctgtagcattctgcatcccctctaacagtgctcctgtctgtccacatcctcttcagcatctggtggtgtcagtgttctggattttggccaaactgataggtgtgtggtgaatcctattttcctgacccagataatgagtcttagtcattttagtttcccacacaatgttgagtccataataattgctaaataaatatttgctgaatgaatggaagactttgccttcttttatgtaggttgttgcattgaacagcctatatgtttttctgaactacttacaaaattgtcttcaaaactaaaccgggcactatggagggcaggaatcaaccagaccttactctcacttgtttaatactcattgccttgttcacaaacattcaatttgagaattttgtccttcaggttgtggcacgccaggtctagggaa

SEQ ID NO: 28697 - DNA, 1779 bp, Bovine  19866880629856
  misc_feature (1)..(1): n is a, c, g, or t
nctgcttgaggccccagtagtgggagggtggggttccttttggaagcttgattgagctaaggtgaaaggtgaggctataattcagatatactagtgaaatgcaaacagtttcatgtattaatggtcactaatgacctgtaatcaagctatgatttgttaggttaaagatgcaattagtttatttgttcaggggtgtaaatggaagaatttatcaatctgctgattgttcttctccattggaaacggtggacaggagcatagtctggagctgtgggacctcggggtgccactctctgttgctgagattctcccagctccagcccctcttagatctaccatctttgtcaaatgggatgaagagagtactcttctggcaccctctctctgtgacttttcctcttgctaagcaagcccctgcagtagtcatttttctctttttggctctgctctggtcctaagcttctactagctgattttctcgaagtactactatttgttcaaacatgtaacgcataaatattgagagccagttatgttccaaacactgccctaagccttaaggtttgtaatgattttcaagagagtcttgtctcaacctttgcaaaatttacaatctctgtgtaggtatctttaaaattttctgtgacagtaactactccctgcagtgcttatcaccaaaacccctcagtgaaaactctcttggtatgaaacagatgctctgttgagataggcatctttgagaacaaggcactttgatcttttgggggtacatcaaaattggcactagagattttaagggattagaatgactccttagaaaagatagacctggtatcttccctagtctttcatttaacccaaggaagtaaatacatataaatccttatgggagaccatgacattaaaatgtaaaatcctttcatccttaatcaggtgaaaacactgtgttctacttgacgtgcaaccacagagcaacaatgatgcaggttatcctggcgaggcactggctcacttgagagcatgctgaggcagtgggaatgatcacgctcccatagcacatgacttctttttaatttttattgcagtatagttgctttacaatgctgtgttagtttctaccatacagcaaatcagtcagtcatacatatacgtatagcccctccttttgtattttcttcctactcaggtcaccacagtgcttgcagtagagttccctgtgctgtacaatatgtactcattcattttcgattttatacatagtatcaatagtgtatatgtgtgaattccaatgtcccaattcatcccacctcccttttcccctttgtatccatgcatttgttctctatgtctctatttctgctttgcaaaaaggattacctatgccattttctagattccacatatatccattaatatatgttatttgtttttctgttcgtgacttacttcactgagtatgacactgtccaggtccatccacgtctctacaaatgatccagtttcactcctttatgtggctgagtaatagtccattgtatatatggaccacatcttcttttatccattcctctgttgatggacatttaggttgtttccatgtcctggctgttgtgaatagtgctcatgtgagcattgggccatagcacatgacttctttgctcatcaaaactaatcacattcacttgcaatttactcatcccaaaggactatcaatctcctcccctcaaaggtgcgaacttgtgtctctcactcagcatttatcctagaatgctaaaacag

SEQ ID NO: 28698 - DNA, 758 bp, Bovine  19866880630450
  misc_feature (1)..(1): n is a, c, g, or t
ncatcctagatagaaccatcactttcaggctttcgacccgactctgccactgattcctggtcaccaactcctttctctattctcagctagtttccccaatgtcaaaatactgatgtgacctcagtgagtgacttggagcttcagagcacgctatggaggagtgaggagatggagggggcagggatttgggcccctccgctgcaacttcaaacaaggttccaccatttccatctgccttacatagtgaggtttcaattcttaaaggatgtttagtgctaaccactgggttaggactctgagttttcctctcccttcaccctttgctggttccactgggcacactcaccagcatccttcaccagttccctgtgtttccccaggtttgtagctctgcactcctactcagcccatggacccgatgaactggacctacagaagggagagggcgtcagggtcctgggcaagtaccaggatggctggctcaggggcgtctccttggtgaccgggcgagttggcatcttccccaacaactatgtcatccccattttcaggtgcgtcctctccaatctcaggcatcagagggttggatcatctaggccagagtccatctctgagttgaatggctgaaagactcaatcctttcagagtgtgggccaagaaacaatttttgcttcactatcctcctaatgcttaattaaaaaaaaaaaaagtaaaatggttatcttttaaatagctcttcacattttacaagtattgat

SEQ ID NO: 28699 - DNA, 5502 bp, Bovine  19866880637762
  misc_feature (1)..(1): n is a, c, g, or t
ntgtgaatgaagagtgagtcttcctactggacaggatgactctgctactgaggccaacagagggccagagcctctgaaatgacagaagcttcagcaatcaactcccaatgacatttaaaaaattttaattggaggataatagctttacaacattgtgttggtttctgccatacattaacatgagtcagccctaggtttacatatgtctccttcctcttgaaactccctctcacctctcaccccatcccacccctttaggttgcccaatgacagacatttaactgcttgagcagctctggggaaaaatatctccctaggagtcacaatgaacatttccatttcagaggctctgaaagatctagcagttaaaaattggttccaaatttgtggtagccacaaacattttggggggctgaaacagagcttcattccttccttcttaccatctccaacgtcactccctaggtcaggtcaacctcatctctcacccaagtccatgatcatggtctccaaatctgacctcttcatgctattcctgctaactttccatcctttcttctctcaacagatagtgctctccttaaagtatgaatgacagctccttccttctctgcttagaatccttgctggtgtttcactgtgttaaggtgaaattcaaccttcccccatggtctctaagctcaacatcatctggtgctaaaaccagcccctctgacatcagctttcatcattctcttcctcagtaccttccagccccagtggcctcctcccagctcctaaatgagggaagcctttcctgtttctggacatatgctcttgcttcagcctgaaatactgtttctgagactttatatgcctctccctccccatccttcagatctcattttagctatcttctctttagacaaagcttttgtagccacctgctgctgctaagtcgcttcagtcatgtccaactctgtgtgaccccagagacgacagcccaccaggctcccctgtccctgggattctccaggcaagaacactggagtgggttgccatttccttctccaatgcatgaaagtgaaaagtgaaagtgaagtcgctcagttatgttcgactcctagcgaccccatggactgcagcctaccaggctcctccatccatgggattttccaggcaagagtactggagtggggtacccgtcaaaaacacaagctcctgtgccctgccccagacctgctgaatcaggaattcggatggaaaagagaggtagctatgtgtgtattaacaagcctccaggggatgctgatacaggctaaagtttgcactattctatgatagtatcctgtttatttcctgtgtgtttatcacaaactttaattatttcttctttgtttatttaacctgtattgtctaactcccttactagactcactgtgtggataggagaattgtagtccaggaccataacggaagttaattactatttcctgacatggaacacaccttgcgtaatattgctttaaataggatatggattagtttatggataaacttcaagtgccatgagccacatgccaccaatttttctcttttctctccattcaattatttaatattcctttacatctcttacaggtcaggcactatttcagacaatataaacacaaacacgagcaagttcttgttctgaaagaaattacaggtaagtgagattgaaaaataggtacatacatgactttcattctggcaggtgctacaataaaacctagtaaaactcatcaaaatcattagaaatacatatgcacttgtcttctgactttgttataccggttgtaaaagttaactctgtgaaaataatcaagtatgtatacacagatttatcaaaaggacatttaccatagcattatgaattatagtaaaaaaaactcaggagcaacttagatgtataagtatggagaataattttttaattatcctaagcatcagataaaatactgaaaacatttatgacatatgaaattgttcataatatattgttaagtagttgcattacactgttaatgatatataaacatagttttatacagtatgttggtgttgttttttagtcactaagtcatgtctgactctttgcgaccccatggactgtagcctgccaggcttctctgtccatggaattctccaggcaagaatactggagtgggttgccattttcttccccagggaatcttctcaacccagggatcgaacccgtgtctcctgtattggcaagtggatttctttacccctgagccaaagaaagccctaatatagtatgtacactatatatttatatctgtatacaaatacattgaaatatatatctttgtatagaaatatatttaatatattgaacatagaaacaagtatattggaaaggtgcataccaaaaaattaatagaagttcctaggtggtgtggtaacaggcaatttaattttcctccttctgtgtttctttatatttccaaatttcctacagtgtaccattacagagaaaaatgccaagggccacgggccagactagaagaagcaagtaaacctgctgtgtggaccggagggtataaacacagaggaggtgtcatttgagcggtgacctgagaatgcatggggcctggtgtcaggaagcggtgacagcacaagcgggactcagagagcagaatgtatttggggggcaggaactagctcagtgaggcaggagcagtcgtacaggggacttgcagctctccagaaaggtcagcctacagggagtgacttgtttgtttacctccacacaagaaggcaaagccccatatggacggagacattctttattaatcaaaatcagagtctacttacgcatggtgggccagccaagctccacaaggctctctgcattgtgaaagccacagacagctttccctttctggaaacgataatacaaataaatagaaattgtactgagatttcactccagctgaattattctgagatagcatcagatggaggagaacattcaaaaatattctcctatcttagacctcaagctcccagtgccagaattctagagacaggcctaatcccgtggtctggccatcgtcaatagccaagatgactgaaaaagcaggaaaacacctttttgacgttcattcatcactcagcaccaatacagaaatttcaaaggccatgataagtggcttgacaacctggagacagatgataaggtctcagcttctgatcactaaacacaataaattcattgtgaacaggtgctactaatttttttttaaagacttatcttgtgctgtcaataactgtcaggtcaattacatgagaacctgttgacctgaagcatacttggatttagctaaaattaagtcaaatataaatctggggaaaggtccatgtggtttaaatagaagggattgccctgtagatgatttatagcagaggttacaaacttaaatatcaacagagtagtggcaaatgatcaattttctaccaaatcagttcttctctgttgtcatttggtagaagagaaggaaatctagggatcaacctaaaggaaatcagaatgtgtacatcctttaaaccagaaccccctcttcaaagatgctatgcgcttgtacctgtacatgacagatgacagagagtcattcactggagccgtgcttatagtagaaagttagaaacaactagaaatatacctgtaggaaaggtgttgaattctggaacatccatactataaaatacaatgcaatctttaaaaaggataagatggctctaaatgtactaagaaagaactctaagacctattgctgaacacaaaatacaagttgtggaataattcagtccctaacccagcaaacatttattaatggtttatatgtttgggcttccctggtggctcagaagataaagaatctgcctgcaatgtgggagacccgggtttgatccctggagaaggaagatcccctggagaaggaaatggcaacccactccagtgttcttcctggagaatcccatggacctcggagactggtaggttatagtccttggggtcacaaagagtcagacacgactaagtgactaacactttgactatgtgtcaagctctgttctagacactagataaactaatgaacaacacagacaaagactcttatggaacttaaatgcacacagaatgtatattttaaaatcctaaaactatacattaattagcaatacatatatttatcatttctcaatacagaaaaaaagacataatgatacccacaaaattgctcacagcagtgacctctggtcaggggagtggaggctgaaggtaggaatagtaactgtttggtctctatccttctgtgttgttttcattattattataggaatgcatttacgcatttgaattcctttcaatggaatgcttttcaataatggagccagaaaactaccttgcaaagtcctccttggaacccctcaaggcctatatagagaagacgagtgagacagtcttcttccttcttcaactggcaccttcacttactttatttattcatacccacatgtgagatttcttttgatgcaagatgtctgtggcaacaaagcttaagaacagccaaccttgctcattatcagaaaattagaatacacaaaggagtaaggatgaaacctcatttgggcccaatactagactgatcccatatcatttaaaggtttgactgtctacttcttttattgtgaaggctcctctgcctgtaaaggacatgatatgagcttttcagatgtcaaatagtactcaataaacatcacaaatgagttcagatgtgaaaagcacattttcaaatagaagagtttttgttttattttaaaattgtattagcacctaaaagacccctgtaatagtgaagataaagttaatctagtaatgcatttaccatagcaaacctccagaacagaaacacattacttccctctgatggaattttaaatcagcataagggattatacagtattatccagctgatggacagtgacctggaaaacgcaatgggttatgggaactgaccctcatgggtccgatcatttgtgttgcaggaactctttttggacgttccatgattaatatatctggtatacttctgggaaggtggtatcttttctccctgaacttctcatttcatcttttcaaaaaaatctgcacaaagcagaaccagtcttcatgctcttctttcagactgtggtttacacaatccagcattgaattaaatcagtggaaagggtctccacttctgcatttccttgttcagtgtctggctgaccagggaaacagagtacattctcctttatattagtacacccaccaaaatcacaaattatggcctacctactaaaataaatgctgtctgaagaatacagagtaagtggactgaatgacacgcagagcccaaaggcaatcaaagtctatcccttctttcttttatatccttttcagtttgctctaca

SEQ ID NO: 28700 - DNA, 754 bp, Bovine  19866880651338
  misc_feature (1)..(1): n is a, c, g, or t
naaaaagtcggtatataaatgcttacaattttatagctcattagttttcaagcactttaaaatataatattgtacttgaccctcctaaaacgttagtaattgggtggcatttgcttctttttacacataaggaaactaaggcacagagaataacttaactcagtcaaccaaattacccaactagtaagtggtagagcctaaattggaatccaaatattcaacaagtccatgagtattttcatgactcttgagcttacagtccatttagagatatagaacagttataaagaataatgcaagcaaatgcaaattaatatatctcattacagttaatatctaaaagtacaaagagtaaaaatgagagattttagtgagatagcataatcaaagctttccaggaaattcgagtatgatgaaagtctttccccccccccccccaagtaaacacggagatgtgggtcgcagtactattaagataccgtgtcatttctgaatatgtgtctctcgaggaacctaagaagaaagagctgctttttcagcaccatggacagcacagcaactctctgaagggttgttccatatacagcatgaacaaagtcctgtctgtttgatagcatcagctctctgaagcccaggggagctgacctgaccttgtaatgttcactcagtggggaacataaatttaaaatagcagtggagttgcattaaatgcttattcaggagggttcattagtgtcaataagtatgacacatt

SEQ ID NO: 28701 - DNA, 2336 bp, Bovine  19866880696757
  misc_feature (1)..(1): n is a, c, g, or t
ntgtattgattttgtatcctgcaacttaagcaacaaatgtttattgaacatttacgtgcaaaaccctcagtacaaagataaaaaacaaaattctgccttcaagcagctcacatcctaggtaagataagctgtggattgttaaatactaatgtgaaaaatgatgctttctttgggagagaacccaagcaaatggtaagtgaacgggccagaccaagtgtgataggacttcagagaaaagatcatttggtctaaaataatatgtaagtaaaagatgaggcatatgaatcaagcagaatatgacacaagtgaaggaggaaccatcaggacataaaaatgggaaatatccagaggtatggtgtacatccagtttgaactagagaagttcaaaaaaaggttagaaagatgaattaaggcagcttaataagctgcagtgtcttttattcctgtaagtgctttctttagtcctgtaagtgaaagtcagctgaatctatgggaaaagaaaagcagcaactggataccagagcaaatagaaaacacagacaaaagatattgtagccagtttacctgagactgaggctcaggaaagttaaataacttgcccaaggtcacacagctagacaatggtagtctgaccttaagcttaaggcagtctgacagcaaagtcccactattaaacatcatgatccaagagagatgaatacatatgttcacatgaaaacttgtacatgaatattcatagcagcattatatggtatataataatagtataaaatatatgtatagtatggttccattcatgtaaaatttttagaataggcaatttcataaaataagaaaatagtgtttgcctagggctgcagaaattagggaaagggagtaagtgctaatgggtatgaagtagttcagggttttttgtggggggaggagatgatgcaaatgtcctaaatttaggctttgttgatgattgcatggttggtggtattatctttaatataatcacataaactgtaaaatttagatgagtaaattctatggtatatgaattacatcatctcaaaaaagtagaaaaaaaatttaaacatctaagaagactatattttggtatgtagcaatgtacactattgctggtatcacaatgatacccaatgtgaaacagagcttgtgcaagcagtcagctctgtgaacggaacaagtcccgtgagagtccttccatgagaaacatgatatagaaaccagtgacagtttgttctactgccagggagctgacaggtctgcacgcccgattccaaccctaagttagatggttggctttctagctggcccaaacacgttcaaatcagttaataaggaggtactaaatttgttctcttttgctttttgttctgcagtttttgaagagccagaagatccaagcaacaggtcatttttctctgaaattatctcttcaatttcggatgtgaagttcagccacagtgggaggtatatcatgaccagagactatctgaccgtcaaagtctgggatctcaacatggaaaaccgccccatcgagacttaccaggtacagacccccacccatccacacgtacactgggcacttgagggttctgagtcagcctctgcctgcaggggcttacaatgtagagcaaaagacacagtgagccacttcaatatccagaaatagctggtaggcaggtcagtgtaagtttggatagatctaacctaaatgagggaaaaggcatggcaccccactccagtactgttgcctggaaaatcccatggatggaggagcctggtaggctgcagtccatggggtcgctaagagtcagacacgactgagcgacttcactttgacttttcactttcctgcattggagaaggaaatggcaacccactccagtgttcttgcctggcaaaccccagggatgggggaacctggtgggctgcagtccatggggttgcacagagtcggacacgactgaagcgacttagcagcagcagcaacctaaaggaaaggtcagaactaccctgaggccctagggattacaggctgggaagagggaatggatctggcaagacaagttggagaaaagtgctggtaaaatgggtgagaaactgagaggtgtcctggaagccaactggagaaaccatctcaaggaggaagtcaccaactgctgaatggtgttgttgaatcaagagaggactgaaaaagggccactggatttagtgacatggaaattgtcaggtgacagaggtgaagccataggaataaatgtctgattggagtgggttcaagagagatcataaatagaggatgtgaatgtagtgaaatttggaaa

SEQ ID NO: 28702 - DNA, 794 bp, Bovine  19866880720509
  misc_feature (1)..(1): n is a, c, g, or t
ncactgcagactccaacgcacaactgcaattttccttttgaaagtttagagcattgctgcctaaagatgcctgggttgagccactggagctcacagattggtagggaatcgcacagccacaggtgcccggaaatgccatgggtatgggagaaaaccggagcctgtctcagggcggctgcgaaaggaacacgcatgccattaatcttctctcagagtcacccttcgtaaccactcccttcctgacaggcatttgtcttatttttagtttccgtctcaagagctttctgttttaaccccctgtgtcttcaggggcttgctgagtccggttttgattctctaattggcttttacccttcaatcctttttgattcccccagaacgataactggcccatgcctttcctgtgttatcccaacttcttccactctgtcacctcatttcacctgtttttcatcttccagtgagacttaacctcccttttccccaacatgtcatgggggagatttgtcaagtctctcaaaccctggcttccctgaccttgcccagtgaagtgcttcccaggggtaatttattcctctgatcctcaagttccacaatccttggtttggatcttccctataacacgttctatgccgattcatatccatgagtttctgattgataaagatatgccagagaacggacttccctggtacagaggataagaatccactcgccaatgcaggggacaagggtttgacccctgatctgggaagatgccacatgccaaggggcaactagcccattcccggcaa

SEQ ID NO: 28703 - DNA, 1113 bp, Bovine  19866880776789
  misc_feature (1)..(1): n is a, c, g, or t
nagagagaggattttaggggttgcatagagaactcaattctatactaatctttaagcctttatacagtggaattaccaactctaaaggtttttaatatcctacttggaagaagccatctatgctcaaaacaattcagaataaaatcaaatacaaaagggtgctaattgaatagcataacaagaggattagtacacataaattaaacaccctctgccaaacaaataagctggagagaggcttatttcatcatcctctgtgtgagtctttgaggagtatacatttaagcataaatcaagaaacattgggtttgctttttgcctatctccagcacttattgagaaagggtaatgctcatatgtcaagataaaacataatgcagactgtgtatatacaatgatcaagcctatattaacatttttaaagactggaatgaaacacactgaaagatttttcatgtaatcttatgcattatgagtgacttgtcaatttgttacttttattgttttcattttctaagttcttacaatttttattttaatattatggtaaaagagggaaagtttttaatgtatatgaatcccccaaatccctcaaatgtaagaagccagtgtataaatctataaagtaatggttctgaaatagccagcgtagggttattcaagcatagcttatctcaacatgaccagatctccactcatctgttcctccagattccaagtaatttaattcttcctcataactgtatttattgttttgtttacatttttgtgctagttgttcagttgtgtccaactctttgggaccccatggactgtagtccaccaggctcctctgtctgtgggattctccatgcagaagtctggagtgggttgtcattcccttctccaggagatcttctgatcttgatatcccaaaagtgaatgtgtttcaagttcttatcttttagttttgtgtaagttttactcaaaggctcaacagactcaacacaacttagaatggaagaaacttctgatgattttgacttaattacttcaggcagagaaaaagtatctgattatcttctctaggctagctttgtattatgaaatttagcctattgattattataataa

SEQ ID NO: 28704 - DNA, 1205 bp, Bovine  19866880799981
  misc_feature (1)..(1): n is a, c, g, or t
ngaagtctcatgctgtggccagggcctgggcctgggcctgggcccgggcctggaccagggcctgggccagggcctggcattggaggcattaacattccaggaggcggtggaggaggaagcccaggaggaggtggagggaaaggaatcatgcttggtagagcaacttcatcaacaaccaagggatcatttccatgatcaaactgacaaaggtcaccaagtacacagaatcctctttctgtaagaatcaaagataaatttcactatgatctacactgagttcagcaaacaattccctgaaacatccaccaatctgatttatggagtgctttttgtgcaaggaatttaaagccttcttagtgttattctgttaccattgcatattcctgaggtaggaacaggtgtactctctacttgctatactgtgacactatgctttactgagacagcaaataatcaggtcaaaagcaggctaccaaccactatcagattaacccatttgctactgagttttcataataaaaattcagatattttaaataacttaacaaaggtagagaggataaggaatgtgaattagatgacctactttcaactatctactttcatgatattattctaaagcaacaatttttgctataagttgaaactttaaattattcaactaagtattatgttccaggttattcactgcagaattgtaacagcaaaatatctgaaacatcccaaaagtgtcgtaagtttaaacacatttttgtacatagagcatacaaagaagtattaaaaaaaaaatgctgaagaagctctttatagttactatatttacataggatgactgccaggaaataatgttaagtgaaagaaaaacaaaatgcatagtatgaatgaagtataaatagtataaagtacaataccatttatgttaaaaacagagtgggggagaatatgtttttatgtacacatgcatagattaagtggaaagatacacaagaaactgacaacataaaattggctttgagaagatctttggggctgggagaccagggtaggggtgagttaatgcctgaatcacgtgattctattccctacttaaaaataaataaaaagaaaaaatatatacattctatatttaaagaaaaatgttatgatgtctagtcatttgctataaatagcctgggagctgggaagtatacagaaaacaagactgc

SEQ ID NO: 28705 - DNA, 3815 bp, Bovine  19866880846329
  misc_feature (1)..(1): n is a, c, g, or t
ncaattttctcttcctcatcttttagagctctgtatccaaattatttccctgttgtcccaaagaactaaacagcaaaggcaaaacagagcaatggattcaaggctaatatacaaggcagacagccaacagattgctattaaattaaccctggggcttgacagatctgttcatcctgaccccaactgcttatggcattccttattaatgctgagcccaggcaaattacctctgctaacaaaaggggttaatatgcctctctgctgggactggaggcagtgctggggacgggagggggcacagccagtttggcagctgagctctacgcttggaaggcaggaggtgggaaggtgagggcactgttgtgccaggcaatggcctaaggcatcatttaaaataataattgaagacgctaggaggtcacctcttaagggatcagcttcaaacaaataaaaagccaaggccataaattacatccgcggtggggtaaggagatgaagagggttatggcaggatgctcaaggggagatggggaccattcaagagtcatttccttgatcccaaatttggaaaagttttccataaaaatgtctatagaaacattataaaggagaaagactgacaacaaccttaatatacagaaacagggaaatgattgagtaaattctgggtgatatcattaaattgtttatgcagtgaaatgccaggtctgttaaacaacttgcaggaaaaattctatctatagtgtgaccataatgccatttaaaatttatactctgaaactgatggcctaaaaggcaaaactaccaaatgtcattgatagttctactggggtgggtctatgaatttcttttcaattatcagttttttcatttctacattttcttttagtgaaggttgcactattttaagattgaaaaagataagatttttttaatgcttattatgcatatgtataattttaggtgaggtaagttagatataaaatatatacagtctgatcatagccatataaaaagaatgagagaagagagagaacagaatggaagaaaatatagttatatatcacaggggttatatatttaaggttagtattatgttatcctttaataatgctagcttgggttcatccatttgttccttcatgtatttcataaatattcacaaagaatctgccagggatagattccaggcacaggagctatagctgtgaccacagcagatcaaaaaatcccctgaaccatggatcctattttctagaagggaacatggttactaaacaagctagataaataaatagaatatatagtttattaggtagtaataactgttaaatagacaaaacagggaagagagaaagtatatatgtgtgaatgggcagtgtgtatgtgtgcacatgtgtgtgtgtgtgtgtgtgtgtgtgtgtgtttgtgtatgaccctagattgaacagaataagactttctagataaattaagaatttaaaaaattttctttatttttctgagccctactgtggaattaatcagcattaaaattgtgatgtaaattccttgtatatacacaaaattaggtggtgagattataggtcattttataatatctacaatgaatccatattattaaatcaagaaaacaaacagtgagtaaagtagttttcttggcttagaaccatctatgagacagttgagaaatcaggaaccgcatctctgggtaaagctgaagacaatattgtgataaatactgcaattgtaacaagtggggtcaaaagattagaattcattttgtttccacctctattttgctccaagatatgggaaagtcattttctctctctcaggatttcaatttctttgcctttgaatgggtatcattctgttaactctgttagtctgagaaattttgatgatcaaataaaacagtggagaaaaagttatttattaaatgtttttgcagtggattgaataatccaaactttcaaagaaaacatgtctttttttccaaagataacttttatatgcattaggtttgtgagtttttgaagattttctcatatgcttctgtctttatctctgctaattttgctgatactaagaagattttttccctctcctttctttctaagccaactactggtagcagagcccagcaggaggctggactctagatttacctgggtaagacacccatgttcaaaagcagtcgaggcttttcagatagcacaagtctgccagtactgaaagtggagaatagccttgaaaactgggcatattagagctggattctgttttagggagcaagagtttatctgaaatctttattccaaagtctgaatttaatctttggatagaaagcagtgattacaagccatccagatcttgtcagcagaaaggacttgctgcttgatggcaacacactgaaaatctccagagaggactccgagggatcttcctctcttaagagcttaaaaaaagccaatgtgcaaatattcatggagggctttgccagttgctaggctcactgtgagaggactgacaaagagacacatggtgccctaggcggtgcttttggacacgtgttgagctgcgaaagacatgggataagatgtcctttacaactgtgggtggggggtacttgaaagtcccataaccacagccccttgcctattcatgtgacacagagcttgaaatttctccattagaaaatactcaatacttccttcaaaggccaatccacgtgttactttctgtatgaaatgttctagcccttctttcatgatccttcctacccacgtatccatagcaccttgaccatacctctaggaatacacttaagatactgtgatagagggcattttcctcgaatataagagtgagataggcctagatttggagcttcactggtgactcagtggtaaagaatccacctgccaatgcaggagaggcatgttaaatccctgggttgggaagatgccctggagaagaaaatggcaacccactccagtgttcttgcctgggaaatcccatggacagaggagcctggcaggttatacccatagggttgcaaagagttggacatgacttagcaactaaacaacaaacaggcctagattttaatctcaaatcctgtggccagttactacctaaccctcattttaaatgcctttgaacttgtgaatttatcaacaaaaaaaggaagaaaactataggagatgatgtaatccacctgctacttcatagaggcaaccccctcccccaccccaaaaagactgtcagtctcatcctccctagtatggttacacgtctgtctccctcggtccacatgctcactttggaagctttgtgaaatgctaacttggtgaagctcaacatttctaaaatgtttctggttgtggtggggtaacaaggttcattctctcgggtgaattgagggacaaaagagagaaagcagcctctctgtacacacgcaggttttcccagtattcagtccaacagtgatctacatgctgttataatggactctgcagacctggttaaaggccccagtcagttgactttaattgaatcataagggaggttatcctgggtgggcctcaactagtctgttggaaggcatttaaaccaaggtttaggtcttccttgaggaagagatcccaacagatgccgagaccacaacttctctcttgatggccatatgtgaacgtggcctgtggtgttcctgcctctgtgttccagcttcttgtggtctttctgtgcctgactgctggccttacagactttgggtggtcaggcaattcactgtaatatgccaatctgtc

SEQ ID NO: 28706 - DNA, 1792 bp, Bovine  19866880855574
  misc_feature (1)..(1): n is a, c, g, or t
nctcttccgaactccctccccgcccagcgccacgcagctcagggcggcgtttactccagcacccagagtcccctagctcaccgcctttcttcagacacctgtgttccaggatagcaaagagaaggttcccttgagcaaacaggaagtctacatctcggcctcttttgctcacccttctatcaagcatatggtctctggatgaaggtcaagggtgaggcctggggtttgaagcctcacccagaaagcagagaatggctcagaggctagcttaagcccttctctgcgttaggaataaatggggaatcagagaccagaacttttctgaggatcacacctgacttctccctttcaaagagagtaaaaaataacttttaactgggggtgtctatactatcagagggaggaagagggtcgaattatgaatctagtcaacatgctctgaaaaagtccatattccctaaccctttgcactcagttttggtcaaactgctccagcccctcgggtgggttttgcttgctaagacacagcattgcaggaaccgctgaatttgctctcccagtgaaaggtacattggagccctgtgcccccagagcgccactgtttcccaggaggaatttcaaagatccaatgaataccaaaaagtggcctgtcttcctacttcacctaggaagaaaatacagaagtctgccccgcccccaatttttcctgaattgccaaatcgcagatttcatatttgaaagaaaatgagatcattactgttatgaaacaacaatcatttctgaagcaacccaaatcactagaaagtcaatttggacaagaaatgtccctgatttcctcttgtagaaggtattcatttcagtgagcgtcactgcaggggagagacatcagcgaatgttttgctcagttaagctccacaagtttagctggatgagcccagagggatctgagttaattatatacatacaatgcttcggctaacacaatttagaaagtatttgaagttcaaaaaaaaaaaaacgggaaaacaagtccttaactgaggttgggaattgccattagacttccatgaagaaaacattcttctggcaggtagaaaatggcaaggtcctcatctcccgaaaccaactgcttatctctggcaaaagatagaagaaatattctttgatatataatattcagcttacaaaagattccatttaattctcatctggtgattaagtcttccctacttctttgactgtgtgtgccaaattcacatatgaaattccaggaagagatgaagactgatgtacaaattgatgtaatccacttcagtgccagttgccatggctggttctttcatgttatgagtcgtatccatcaccaagactccagtggtcagctcatctgtagttattcagtccagcttctcttgcagattggcataagggggtaggggaagggggaagaggggaaaagctaaatttatcttaaattggtgagaggacatcttgctttgagttgaaatgacctttagttgccactagagaccttggagtagtatttgagatgaaaagtgaaagtgttagttgctcagttgtgtccgactctttgtgaccacatggactgtagtctgccaggctcctcagttcatagaattcttcaggtaagaatactggagtgggtagccattcccttctccaggggatcttcatgacccaaaggattgaacccaggtctcccacattgcaggcaaactatttactatctgagtcaccagggaagctattctttcccatatcttcccaggag

SEQ ID NO: 28707 - DNA, 1343 bp, Bovine  19866880857850
  misc_feature (1)..(1): n is a, c, g, or t
naatttaggaaaataccccttcactattgccagccatagtgggagaactgtcaactcaaactgccctgggccggtcaagcagcaggcatgattaggctaggcaaattgggctccattgctgacagagtaattctcagacaggaaagcataaggattaaaatgtttggagttgaccagtttgtcaactatctcttgattatgcatcttgtccctcgtaagcacaggttttcgtttatttcctgattttgtgaactgccccatagcctcctaatgaaattcaatgtttgcttcagtattaatttcctagggctgccataacaaaatacaacagactggacgtctcaaaacaatagaaagtattctctcactggagaattctggaggctagaagtctgaagtcaatgcgttggcagagttggtcctctggaagctctggggaaagtcttttccatgcttgtctccaaactttggtggttgctggcgctcgctgaccgtgtctggcttatagatgcattatttaatctgtgcctgtcttcacatggcaatctttctgtgtgtgtccaaattggattagagcccaccctaatctagcataacctctttttaacgtgacaacaatgcaagactgtttctaaataaggccacatgcagagcctataggtgaacaggaattttgaggggacagtgtttaaccctatatagtaggcaaccaaaaaagactctgatccagttatgttccagaccagtgttcttgagtaggtactatgcattatctgctttaatcctgacaatctttaaggtgggcacctttatttaccctcattttaggggtggaaaaatgaagactgagaatttgttcaaggtcaaattgccagtaagaggcaaagttaagattcaaggcgaggactatactcaacacaaatgtgttctcctaaccactacattatatttcaagctttgctctacttagaaatgccttgatatcccaactcccaatcaccagctacaagctatgaaaggaaaatcgtccagttcccaaattggggtaaggtctccatatctccctatggttattctgccttctctgtactacaatactgggtaacaactgaagtcagagagtgtggacaagaaccaggaagaatcctgacagaatcagagaacagctgccataattgtctggtcaggagttcacatgggtagcagtggcaggaagaaatctgctgggctctgggtcagatggtcaaagggacagcaacagaaggtatggtttagagctgggagctctcttgtctgtgaggcccaagcaaacagtgaaggctcgggcttggatgatcaaaaca

SEQ ID NO: 28708 - DNA, 1704 bp, Bovine  19866880866102
  misc_feature (1)..(1): n is a, c, g, or t
nattagctactagagcttgctgctactgctgctaagtcacgtcagtcgtgtctgactctgtgcgaccccgtagacagcagcccaccaggctcccccgtccctgggattctccacacaagaacactggagtgggtttccatttccttctccaatgcatgaaagtgaaaagtgaaagtgaagtcgctcagtcatgttccactcttcgcgaccccatggactgcagcctaccaggctcctccatccatgggattttccagtcaagagtactggagtgggttgccattgccttctcctagagcttagaggaacctgaatcagtgaatcttagtaccaattattttctattgcttggctttggaatgtattctattctaatggcaagacaattctcatatttttcttattatgaatgataaattactatactgagaaagacagaaattagaggtaaaacataaagaataaaaattcttaaaatccctcgagtccaggaccaccatcattaaccaccattatcaacagtttacagttcagttaataatacagtcacagtatttttctatgcattttttgaagagaggtacaaacctataataataccacatacatagatttatatttctcattttattgtaaaactggtacatagaattgtagaaaatgaatataaaagtaaaaaaataaaataaaactttctcgattccactagacaaaaacaactattatgaaaattttgtgtatatccttattttgtgtatatccttatattatatatattattgggatgtggaattacataaactgtttttaataaatgtaacatactatacacagcttatactatgcctttcccccagtcatttatctatttataccaacatctatctccacataatgtataactgagaattagttaaaggtctaggaatgggagacattaataaactatagaaaagtcatacaatggaatactattcagtcattgaaaatgttacagtattttaggagaaatatttcacaattacaaaggtattcctgttactaagtgttatattattaaattaaaaatctggttgcaaagttatagaatatgtctcacttttggtaagaaacagatttatccatgttactttgctattccttttaaaaagccattaatagtggttctctctgtataggaatactttccttatcttctctctgcttctctgaattttctaaattttttacagtgaacaattattactttcatagcatgaaaaacaagtttagtatacattttcatctaatcataggtattatgatagaaggagacatctcagtaaaaaatttgtcttcagctggtaaataattttaaggtctagcttcacaactgaatgttggttttatttttcattaaaaactgtaaagctgggactgtattctagcagaagattaaaaactgtacccagctataatgagataagcacaattttttttcaagataattgatggtgaattcaattcaattccccatggttaggatgcctggagtcattcttgactttattatcacaatttttcttgactcagtatcttgaagctttgtggataaaaaagtctgagaaacatgtggctgataccatgagtaatggctttttcttccttttggctggctctctgagtagtttatcattacttgggcacctttaagcacaatcttat

SEQ ID NO: 28709 - DNA, 3112 bp, Bovine  19866880881322
  misc_feature (1)..(1): n is a, c, g, or t
nttaatcaatagggacccaaataaacatagataaatgaaatctggtattgtagaggtaggaatagggtctgttcaatgctcggtactgggaatatgagtgagagatgatttttctccgaagaagctaaaaatctaatagtgggaaagaaatatgtcaaaaattacaaactcacaaaaaaccaattacagtgtattttggtgttaaaaataaagcaacagagtgcctcagaaatacatgtaacaaaggaactaattctgcccgaaataaaaccttcatctagtctaattgtcactcagttttgaagagcacaattggatgttaaaagaagaaaaagaatttccccactgtataactgtgtagggtatatggggctcctggcaatgctatttaaaacttaatggcaggtatggttataatttagaaaaaaacatgaaatttggtttttgttgaattaaaatgtcacagatactctgaaaaggatttaaataatgaaatacagttggaagtgtatggaaaaacacctattaaaaacaactatttcctttgacatacttaagcatttttacccaaattcagagtcgccagtttagtgtatggttttggggtttgaggttttgttttgctttgttttcacaggacagaaccattttaaattatatttctttaaatttgacttgtttcttttgcttctttgaagaagatgtaatagaaatattttgtacctgctaagctccttgtattgagtgtgtgaaagattagtagtagaatataacagcctaaagattgattcttaggttaaaggcagttgtcagtcttcaggtgaatttacataaattacttttatctttcagagaatatatttcctgttagctgtgtacgattattaaaacatcatattcttaaacttgagatgcctcatttaattctgtgaagtacataacatttttctgtgcacagtcacagattttgatgtctagaaaagtcagtctatagagtcatatattgtctagaatttctctcccctcatgtgttacttggatttgttttgcattagttgtcatattgcccatttcaaataatgtctgatgaatatcaaataaaggtattcatcctaagaaacacttaaatgtcattgggatgcagttagtaaataaacttgcatccattgtgttaagtattgagttcctactatgtgctaggcaccatttagaccctgaaactttaaaaagtatgccagggaccttggattctaatagagaggacacataacaagtatggccaataattggaaggtatagctttctattttcttctgattgagctttcagtttaaaactcatcttaagacttttttttcccttgtgaatacacttgaagacaaagtcaggagaattacaaagagtagctaaaattttagtttgaataaagactatcttcaaaagactagagttaacattgtgtgtgtgtgtgtgtgtgtgtgtgttgctcagtcatatctgactctaaagaatgaaaatattgctatcaatcagacatataagatacatgaatgatttacaataggagcatgaacttaggagacttgcattttgaaattattcagtcactctacactgataaaaactaaattgaatcagaatctgaaaaagaatatatgcacacacctatatttatgtttaactgagtcaaattgtacatctgaaattggcacagcagtgtaaatcaaatatattccaataaaagtttgagaaaaaactaaagtgaatgaatctaaattatgactggcttatcttcaccatcattataaccaacttgatttttttaaactttttattatggaaaatttcaaatatacctaagagaataaacactgtagtaatcgtcattactcagttgctggtttcaacatttatcaatgtattgattaaccttgctttatctgtaactcactcctgacttgattatttaaaaacaagttccaaacataccatttcatctataaatctctgaaagataagggataaatacacacacacaattactatactttatcacagtcccaaaatataacaggtattattgtcaagtatctaatcagtgctcatatttcccagttgtatcatagacattcctttatatctggttcatttgaagatgaatccaagcaaggttacacattacatttagttgatgtgtttcttaagcctttgaatccataacaatttctcctacctctttttttctcccttgacacttacttgttgaaggagcagataatttgtcctaaagaattttaccataatctagacttggcgtatcttgcatctgctggtgacatttaatgcattcctctattccctgtttttttctggaaattggagatttatctagatgtagattaatagggtcacatttagggtttttttcctccttattttgcatgaatgttgtactgatggggttttgtacttcctactgcagtatatacctggtgtacaatatcaagttgtctcctttctgtgttacaaatattgatcactgtgtacaggtgttttcatcctgatccatcctttcaaaaaattgctcttggttgtttgtgatccctgcccagttctctttgcttcattgggggctataaaaatgtgatactctagttctgtgatttcttctacatttattggctgacagtctacaaagtagaacttggcagcgttcaccacttggttaacctgaaatgtactttttacgggaaagacaggataaatgcttctgtcctttaatttatcagttttcagaaaatgagtttgtttccaagtatcttccagagggaccactgtactttttctaagtatcattatgaactcatggatttctaatgtttggtatatttcaccccattgtggcctttttttggtgttcagattggctcttatttgaccatgggaagcctcttcatgttggcttctggaggttgctttgttgtattttttacatgctggtgtttggtagccatcttgcttctggagcattatatgaaggtgtaccagactcatcgtacaagttttctatccagacctagaatcaaccttttacctaaggaactctattttt

SEQ ID NO: 28710 - DNA, 2588 bp, Bovine  19866880896542
  misc_feature (1)..(1): n is a, c, g, or t
nactctagtagtaatcgtggagagtgcctcgcacatgcctgcctgtcataaaccctctagtggtggtggtggtgatgagggtggtgagggtgagggtaaggatgggaaggaaaaggtgctggtggccaggagaacgcccttgccttgaatcctacacaccagacacagtggttttccttgactctaaactgagaacaggataggagttgaactgacacaaggaaggtgaaggatatgggctacagcagcaagaacaaaagtccaaaagccaaaggaagcagggcgcctttagagaactttacagggttgaaaatggctggagtgtggactcttaaggaggcagaaagaggagggttaaagtggagctagcattatgtcaggaactgaaggctaggttaaggatttaggatccatttgcgtgctgcgattcatggggtcacaaagagtcggacacgactgagcgactgaactgaactgaactatccttgggtgaacataaagtatgtactcttaggcttactctggctatggttgggaaaaaataggttggaggtagatcatttaggaagctatttcagttctataaaatgatagggactctgaaagtagagtttaaagaatttgaagtccaacaagagaagatcctgccaacaggttgttagtgtgtgggaaggagcaacaaagatccaaggagaccagagaagaagacagagttttatttgccggacattttggaatattttaatatacttttgaaattgttatctcatggtcatgataattctgtaaaatagatgaactgagcagaaccacttccaaatcagagaagaatacagaggctttgagaaagtaagaatcacgtggttagttgtggcccaaaggacaatgagattatatcttttaacttgtaccttttttctctcttgtgagagaacaccactgacttttctggtcttatagtccattacgaagcgccccccaaccccccacccccacccttttaggaatggatagagtagaatctgagctccttgggaccacatttcccttgggactatttaaaacctaatctcctatactccagtacttctgagggcagggggacagtttcacaatctctcttatgataaagtagtttgattgcaagcccctaggtttataaataactaggtttatgtacataaataactaggtttatgtacttagccaagaataatgttcagtacactaccaagtgtcattgactagctaataaaaataatgaaatcaagacccaacttggtcattattcatagctgacacctggataatttttaagcatcaggacaaaaaagtctgcatttaaaaattattttaactgaatttgccaattgagagtcgaggagccagactttctaagagtcagtacttggttgtaggacaattgggaaatgcaaacagtgcatttaacctgggcttttcttttccttttgggagggaaaaggaagcagagtcagttggaaagaatagttcttttaaaaatgtgcaatgatactttacatgtctcttttacccaggcgtagttaatgctgccttttggatgagatggaccccaagtagaattggtactagtgaataattaaagagcagagagaggactacacacattctgatagagaaggtgttactgcctctaacttctgctttgagttttgatttttatgttatagggagaaaaaaaagaacttgaaaaatcctctctcatctttaaaaaatctcagctcaaattccatatttcccccaaagtctccttgactatgtaatctcttctgaaccccagcatcagggattctaattcgtaatgcttataaaatagcatattggccactattatttaatgcatatctgccttgtttctatttctggttgtagcctccttgagggtagactttatatctttccctctagagggatagatgcatcaggtcagggacacatctggttcttttatgactttaatttcatcacagtgtctcacatgttatagacaatcaatgaataattttgaatgagcagttctaatatttcagcatcatttatagctctgatttttatgctacatataccatactggtgattgaaaaggcaatttacttttcatttttaattagaggataattacagtattgtgatgctttctcccatacatcgacatgagtcagccataggtatacgtttgtcctttaccccatcccacccctctaggttgccacagagcactggctttgggtttcctgtgccacacggaagacccccactggctatctattttacgtatggtaatatatatgtttcagtgctattgcgtaaaaccaagttggagtcaaagtaggaccattggaagtgatagaatctgagactgatctttgaactctggttgttgtggacctgccaaaaaacatggggtatttgcggactgtctaggttttatgaaactctctgttggttttatttttagttaaatccttagaacagcacttttaaacctccagttgactaaatgagagattactttggttattctaaagacagagaaaacaaactaagat

SEQ ID NO: 28711 - DNA, 1474 bp, Bovine  19866880901569
  misc_feature (1)..(1): n is a, c, g, or t
ntatgtaaaaagaaatcctcctgaggagcttatggaaagaatcttattcttgatataagagggcaaagcccaaggaggagccagtccatccccttcctgcacactttggatatgtcatgtgagggcatgatatatcaagccgctgtggcagccattttgcaaccatgaagtaaaacctagagacctagagagaagaggcctttgacatccttgagctgacaaattaacaaccctggagccatgtacctttaaacttcttgttacatgagataattaggtatccttacagtttaagctactttgactctggtgtcctgttacatgaagccaaaggatcctgactgatacaatatagctcatcttttcagaccaggtcactcaggtcccaggtcactagctggctatcctgtagattcactgtctcggagtcacacacctacctccaatccatgtgtttattcccctgctccaaacttctatgaaatttctttaatctgcagaaaagttgaagaaataatacagtgaacaccaaaatatccctcacctaagattcaccagttgttgatatatgcagctaaatgctacatatgttcattgtatatttccatatatttgggggtgtgttattttcactgaaccatttgaaaggaagttagagagcttatgaaacttcatcctgaagtatttcagcaattatctcctaagaaacaaggacattatcctatataactaagttgtcattatagtagattcaatacatattgttattctatgatataaaaatcttactaaattttttgtttttgcttttttctagtcccctttattctacaaaagctttttttttttttttttggtctttcctgtcactgactttcagttcagttcttttatagaatgttccataatttggattatccagttgcttcttcagaattagatttatgtaaagatttttagcaaaaactctacagaggtgatgttgggtccctctcagcacatcacaggaggcacaggaacccactgtgccctattactggtcttgctgtttaaacagttgattaaggtgctgtctgccagaatgctccactgtaaaggcatcttttcaaactttatataattaataagtaatctgtgggataacactttgagggtatcttgtttcccaacagctttcacccgatgttttagcagccattcataaaccttgcctgaatcaactattatatcagtgattacaaaaatcactttttaaaatattttattatttcctctacattaactggcattctatttaagagctttctctcccctcacactcaattttcttgagtattattatgaacttggatttttcattaccactaattttcaattttcaagttgccccccttcaagcagggagccccttctagctggtctctgtccttcagacatgaccccatcaatgtctgagcacttctttgctctctag

SEQ ID NO: 28712 - DNA, 1122 bp, Bovine  19866880960980
  misc_feature (1)..(1): n is a, c, g, or t
nctcctccgtcctgggatttcccagacaagaatactggagtggttgcctactccaggggaccttcctgacccagaagagtgaacccatgtctcctgtattggcaggtgaactcttcatcactgagctacccgggaagcgcgatataaggataatgttgtttaatattgtaaaatgttctctggctgccatatgtaattattgaaaatactgcatttatttatgagtgcttacaggtctacaagctggaacttgaagaaagcaagaaagtagacgctcagtactcctgggaaacgatactttatcatgcaagaatctatagcattcatgacatctgagaggaaggatttgacaagtgaattaatttgtcttttcccttacctaaatgcttccacagctcaaattctccttactctcctaagcagtgtccttctatgctgttggcagcaggacaactcacaattcttcttgacatttgattaaggtaccttttgctttcagaacagagagcaagagatgtggagaagcattttctgcaacctaaatggtattagtcatgagtgtggatgtttaggacgacggctactctgtgtcatcgtgggtacccaatctcatagggtctttaacaagcttaccgtttcactgtgtgttcgtgatcatcagactctctcacaaatgaggtccaaggtaagagcccttcttgaccagatctacgggccaacctaagctcagtaaaagaatcgaatactagttatctgtacaactcatatgtataaagtagacatagcttcctcccaccagtacctgaataaatgggtgttcctttttctaggcatcttttacactaatatatacatatatatattcttaacattaaaaaatatatataatattttatttctatttacttatttttggctctgctgggtctttgttgctacgtgggcttctctctagttgcagtgagcaggacctgtgctctagttgctgtgtgcaggcttctcattgcaggcagcttctctcgttgcagagtatggactctggagcacacggacctcagctgtgggctatgggcccagtagttgccactcccaggctctagaacacaggctccatagttgtgg

SEQ ID NO: 28713 - DNA, 1308 bp, Bovine  19866880982173
  misc_feature (1)..(1): n is a, c, g, or t
ntttggagcctgatttcttttctatccaaggactcctgctgatttaacaggccagttttctctttggggaaactttagtgatgatcacagcctcactcttttcagggtgacattgcaagcaaaatttatgggaaacagcaatctggggagtctgactcgaactcccaaccctcgaaaggccaaactatgatttgttgttacagagacagagtgtactgaaggaggctgagctttcaagcaggcagccacatctgggctaaccactgaacttctttaccctctcagggcctgccagtgaattacgagccttactcctttgttgacgtgcttcactctccataacagcaggtaagaggcatgaggggcttaatggggttgcttcctattgagagggagaagcaggcataaatacagagtctgcctcccatcaagataataagttacacaggatctggagttacactgcctccattgtccacccccaaatgtgggcaggagtttcagcttgctgttcacaacttttatttattatttaaaaatttttttattattatcttttttggccatgccatacagcaagcaggatcttagttctctgaccagggattgaactcatgcccccttcattggaagcacagagttttaaccactggatcaccgagtaagttcacaacttttagtccttaaatgggaaagtgcctgtgttagtcatatcctgcttcttttatctttgcctaagtgggtaccggctctgatgctgggcacctgcctttagagatgggtcaacccatagctatcgcagtgggcccagaaatgactgctttggtctgtacatcaggcctgacatcagcagctgggggcatatccctctgaaactgcaggtaaggtgatttgagttgactgcttcttgatctcaagggagtagtagcggtttgttagctctttaagtacctttattgtgatgtagcatttctgagagtcagcacagggacagggtagtgataggaaacaactgccaatggagggctgactgccacatgaatctgaccttcgggttgtgctaagtgatatagaaagaacttccactctaggatccactgacatcttaataaacacctcaaaatcccatcagtggcaggaggtgtgaatttacctgtggctggcattgtgctgtaccgggtagcagctcatatcagtcctgtgtctacaggccaggggctttaggattggcaggtgatgattctttgtttattaagtgatcaggggacaggtctattgaagtagaaaaccctggtttctgcaggaaaa

SEQ ID NO: 28714 - DNA, 1389 bp, Bovine  19866881057877
  misc_feature (1)..(1): n is a, c, g, or t
ntccccaagaaaggtttgagtgaagagcaaaaatttgaacaatcaagtactaaccattacctcaactcaactgttttaagaactaaggggtcacatatcaaagtaatagaactctatgaagtgattagaaaactcaagtgctgtaggtaatacaggcttctattgagaacaaactaataggctactaggctagggcattctttccttgcttctctttcataaaaggaaaaatataaatacaaagaaaaagtaacaatgtttatcatgcttcctgattgctgctgctgctaagtcgcttcagttgtgtccgactctgtgcaaccccatagacggcagcccaccaggctcccctgtccctgggattctccaggcaagagtactggagtggggtgccattgccttctcctgactaccacaactcaaaataaaaatttgaaggaaaaaaaaaaaaaatctttgcagattttttgcagaagcctaagaggagactaaaaccacaaatatcctgcaaacaatcatcaaacactattctgaccttaatttcacctatatcaggtcacccatctcagagtgtttgggatggtttagtaaacctaaggttgattacagaaccaggtaaatggtagatgatcctgtagaaaggagatcacttggcagtaaatcaatttagcataaatgaaggtgattcataacacatcaattagaagcacagttttggtttttttttttttttagtcagtgtaggttggctcctcaaataatcttggagactaaaagtgatacaaaatggacaggtctgacttgcaaaattttggttcatttaaagcaaacctggcgcatcttaaaatgatcccatgggctgacatacacactcatctttattggaacataactagacccagcctagatactacaatggggtttgcaattcaaaatgtatccttggctttagaataatttacatcgaaattagtaaaaacttcaaataaagccagtaatttaatgagagctccattttagtaaaatgtttgacttgttactattaaacaaatttaactatgttcagaattatgcttgccctctcccaaaagcctcagactagtgtttaccataaacatatactagataaattataatctattcaaaacaaatggcaacacagcttatttgctacttaattcataaaatatggataaaactgtttatttgaaaagaaggaaaatgaaatttactcccattctttagtattttcctgtataaactgagatttgaagaacgactcttcttggacaatgaataaacatttggagggaactgtatacaaaaaagcagtttttaaaataagaaaatgggagcccaagcgatatacttccttttcccatcaccacc

SEQ ID NO: 28715 - DNA, 1629 bp, Bovine  19866881061657
  misc_feature (1)..(1): n is a, c, g, or t
nttggctatgagaaattaaatcccacatgctgattatctttcctcttctgtatattttcctggaatgatgtgtcaaaccaggatcatttttaagtttttatgtaactttcccttcataatggacttcctctttctaggttattactatcttttctgataacacaaagcttataagagaaggaaaacatcacaatggggtactagaataagcaatcttgctccttcttcctccatcatctctaatgaaattttcttaatgtctgtggctcagtatagtatatattttgaaagattcattgtggtgaatattttgagtcctgacagtttaaacgtgatagagggaacaaaggatttatatattttttgtacaaagttttttcttaaactgtataattttgtaaataatttgtttggttttttttgtgtactaaaactaccagcgtatagatttcaataagaattgttgtatttttgtatttggaaactgaaaattacagtaaattaatggagctgtaagaaaattttcagtagactgacagttcagcagaatgagattccttttcatatgatttttttttaacctaaaattgacatcttattacactctcagtacagacagagttaaggatttgtttgatttttagttcttgggggagatggggtgaaagagaaggatgttaaagtgaagaataaatagacactttttccagtaagtttttaagccctttaaaacttagtttttgatacaccttaaataggactaaaacgctttcaaaatgtcatttctaatgtttgactctcaaaaataattcaaaatatgcattgaatattggaaaatttaaggttagcataaactagttgaatgtatgtatgttttcctttagggctgaggtcccaaaccattagaatttctcttaaaagcgagtaaacatgatttgttttcttggcatcttcacttacagaaataacacataccatctgaggcaaattctgttcttttgaatgtgtatgacatctttctaagtagctattaagcaataacaaccaccaacctggcttgttcaacttggttttactagtggcttactgcccaggcttaaaaaggtaaccccggggaatgtagaatttccctcagtttcttcatgttgtaacattgagaaaatattgtcactagctaaggtgataaattggaaaacgtcttgtgggtggaaaaagaaaggtccatggtatggatcattatttaaaaaaaaaaaaaagaaaaaaatcatgtgaaaaggaatagtggttcctcttgatgtatagtatgcctgtattatagtttttacaaaattgtgaacttgtgtaatagtataataggagatattgttgaatttctaactgtttatacatttaaattcatatatgtaatgtttgttttatcaattacaatctgaatttctaagaagcatgttgacttttgcaataaagatgcaatatggaatggttcacaattgggaaaaaagaaagaaaaaaactaaaagttacaaatttaaaagaatttgcaaaatttatgaaccattccaaaaattataacaatcaccaaaagagctgtaattcggcttgttcggaaagaaagaaaatgtgtgtgta

SEQ ID NO: 28716 - DNA, 1746 bp, Bovine  19866881119734
  misc_feature (1)..(1): n is a, c, g, or t
naatttggaactattgttaatatccaggtaggtgtggctatgttggtgacagaatcccgtatatataatgtagtttttaaggatttatttctttttggctgcactgggtctccattgctgtgtggggctttctcttgttgtgtaggtctctttgttgcggtgtgcaggtttctccttgtggtggcttctcttgttgtgaagcacaggctctaggtacatgggcttcaatagttgtggcacctgggcttaatagttatggtacatggggttagttggtctgtggcatatgggatcttactggaccaggaatcgaacttgtgttccctgcattggcaggcagattcttaaccactagaccataatgtatctttggaaacagctcacttttgcttaagcaaatcagtgattagtttgatcatctctgctatgtgttttaaatcccaccatgtatttgtatgcccaactttacgttgaaattgtgctgaatttgtcctctgaatgcatttggtttctttctgaaactcttccctgaaagacattggggctggttattgtatctttgttcatagttttatgtctggacaaatgactttttttacctgctttagtattctaactaggtagtgagatttttggtagtttctaagattgtatttttgtctactgaactggcttttgtgaaatattaattgattaaacatggttctaattgtgagaatttcagatactaaaatttaacatcaggtaaatcatagcttttatattttgctatgtgcttgcgaagtttttgaatttaccaatttggtggttgagtgttttgctgtaattgagggtaataagtagaagatgtgtttaaattggtatttcagtcagtttacttagtgttgccatcaaatcaaaatatagtttacctatctcttaactaccttttttctcttaaattgttctaggtcattattctttatggcatttagaaaaaataggtagcttaatgtagatgagtatattagtcggcttgggttgctataataaataccatagcctggaacccaaggtactagcctatatggatcttggtttgcagatggcaccttcttgctgtgtgtttacgtgttggaaggagagggagggtaagagacagagagatctcttcctgtaaattcactcgtcctgtctgattagggtcctgtcccttagataccatttaaccttgtttacctcctaaaagccctgtgtccagaggcagtcacactgggggttagggcttcaatgtatgagtttagtgaggacataattcagtccatagcagtaggccataatttatataaacactattctctggggaaatttacttttttttttttttttaatagaaacaatgctatggtaaggctctttctggataaacttttttttcttttaatgacacattgctgaaattaaggaaattttaaaactttttatttgaacagccaaattgatactcccaaatgcaatttatgaggcctcatcaaaactataatacagatccattaaaaatttttagaccagtttcataagtgaaaaatcgtacttacttgaatttgctttgtttttattcctacgtagactctaatttatatacaccatttgcaatacttttgcatttacctatccactgtctttgctcatttttttaagtgaaggcagtataataatgcttttccaaacctttgcttgttatatatattaaaattactttttcat

SEQ ID NO: 28717 - DNA, 891 bp, Bovine  19866881227455
  misc_feature (1)..(1): n is a, c, g, or t
ngactgtcacaaggaaaataaaaaacatttcagaggaagaaagagccagccacagagaaatggatgcaggtgtctggaagcgaggatatgcatttgtgtatctaaatgttaggaaacctgccttgggaagaaataatcttaattcctccatatgttgaaggtggcataagcttaccataaaacacggagttataagaaataacctgattgttcatgtaccatgctcttctcagcacagaaaatatcatacagaacaaagctatcttgaaactcataacactatccctactccatgttttattacggagggtcttgctttctactaaacctaaatagtcttccttacttttaaatagtcaaggtactctcctaacactcccatggcactctgaatttcctgacacagaactgaacacacaaataccacccacttgtccatcttcttcaccggaccctacaagcgcagggcctgtgtctttcccattcacagttgcctttgagcccagcatagcacatagaggaccgaagattataacaagaaaattatgatagagtaacctggacgctctgaggtgtcccttgggaaacgtcatgagctgatacaatggatggagagggaggcgtatggaagtaaaaaattaaaaacagcttctggttttcacggtctctaatgtctggagtcttgctctgttcctgtcttgaagcagtcgaggattaaagggaagaatttgtttgggagaagaggggcaaagagtgggaccatctggtggagtttccttctccactatgacatacccacctgcagagcctagagtcaatcctcattaggcaccacataaccagaagaaaacggcttttggtcaatttcagccaaggattcagtataagcct

SEQ ID NO: 28718 - DNA, 1781 bp, Bovine  19866881230251
  misc_feature (1)..(1): n is a, c, g, or t
ncatttgctgagcaagtcattttgctcagcaaaaaactgagtcgtttgctccagacactggagttttttactctggattttgctgattgcatcctctgtatttcctgtgaattggtagagaaaatgatttttaaatatagtttaataattgtagaatgtttttgtcagcaacatatggttgtcatattgtggctgccattttatgttgcctggattttactaaattgttatcttctgttccattcactcatttcctgatttgtgcatttttaaacgagcctctcattagatgggcatttgtttagctcttccaaatgtcttcatttgtcttaatttccctctagtaaaggccatatatttatttttttacttatttatttttggctgtgctgggtctccgttgatcatgtaagctttgtgtagttgcaggggctactctctagttgtggtatgtgggtgtctcattgagatggcttttcttgttgtggaacacaggctctaggtacctgggctcagtggttgtggtgcatgggcttagttgcctgaggcatgtgggatcttcccagactagagactgaacccgcgtcccctgcattggcggtggattctttactactggaccaccagggacgtcccatgtatttgttttgagattaacttgtgtttaaaaaattttaatagaatcactagttctgtatttctggtcaatcttgacttcaagttttaaaagaagccttaacatttccaataattctgataccatttttccataattcacacgaaatacttagttttatagcagtggttaaattaaccatttgttccttaaactttgtctgtgaaataaatctaaagttctcctcaaatgaattatattgtgaatatattttataattaggaaaacacacaaaccattttactatatgatacttagaagtagagatttgttatttttactgttatattttaaagaatgaattagttttcctcctacactgctattagggtgagatttaaaatttaacatattgctgttaaagtaatttcaacatctttttttacttcttcctgttggccaactttgggggatgtgatttgattgtagtatttaaatatatttatgccctctcttgtggccagaaagatttatcaggtggatgtgttttatagtttatggaagaactgttcttgtttctaatgaatattttcttgtaggtatttcaggagccagcagaggaagaacgagatggcagaaaaaagaaataccctagtccccagaagactcgttcagaatctagtgaacgaaggtttgtgtttatctttaattaggaaaacattgataactcactttccagttaccttataaggacattagcaggatttttgacatatgctctactcctctcattgtaaaatgattaaagaagtaatttttttttccattccctgtgttttttgtctttgtcatactttctcttccttttataaacaataatcattatgtgctttccccaggagctcagaggtgggagcagtctccttagagaatattaatgaaatgttccatttggttaggggtgctcagtattaaaattgtccatagcattttatattacaagtagtgcagtttatatcttgattcatcagcctaccatcaaaaaattagtttttgtttaggaactctttgttttgaactttttgtcttttctagttgtaaatatgtttttccttttacccctccccatgctttggattcacctctttttttatttctccccacc

SEQ ID NO: 28719 - DNA, 725 bp, Bovine  19866881252605
  misc_feature (1)..(1): n is a, c, g, or t
ncccaccagtaatagttttgctgattaaaggacacatgtttcaattatacaaaatgacttaaatttagacatgtcctatgatacatgaacaaatggcttctttttagacaaactcctttgactccaccctgagaatagagccctgactttgtaacaaaaatcaagtttttgtgacacaattccagattttacattgctcagatgtattaaaggttgcttgttggtgttcagtccctaagtcatgtctgactctttgcgatcccacggactgactgcagcatgccaggcttgcctgtccttcactatatcccggagtttgcttagattcatatccatcgagtcagtgatgctatctaaccatttcatcctctgccgcctccttctcctgttgccttcaatgtttccatcaaagggattctgacacccctgtgatacaagaagacaagcaactatggagttttagggggaagccacttggactcaccaacactcctatttggatcccggtctttgctgcgcccccggcttcgactccgacttcgactcaggcctcggctcttactccggctcttactcctgcctcttctccagtcatacttctcacggtacagttcattccgctcatagtaccggtcgtagtctctccacttgccatcttctcttttcttctcccgtgtcctgtaatatacagatataaagccataggtacactacagaaaccagga

SEQ ID NO: 28720 - DNA, 2003 bp, Bovine  19866881261509
  misc_feature (1)..(1): n is a, c, g, or t
nttgaacaggtaaaaataggggtgcatgtgaatccagttttgaggatatgagaccctttctgcatatggctattttgtgactgcctcctcaatttaatcttttagtggaatctcgacatatgcaaggaggaactcaggaatgctacctgagacattttgtgctattactgtttctgctaagctcttcgtgggcgccacagggcaggggagagggatgggagctttcaccagatgagaattgcttcacaacttaccgtgtgtgtgtgtgtgtgtgtgtgtgtgactttgagcactgaacccctctgagcttcaactttgtcattcaaaactggaaataatagtattcacctcatgaagtgcttctggaaatccacaaagtcattcagataaagattttaacacaatattggctataataatagttgctactattattagaggaaattatgtgttttccatctcagttttgatcagatgttagcttgtctgtctccagctgcctaaaacctcagaccactgtcacacctcttccccacctttgttcacagttcttccttcatgggatggtcttttacaccaagtgatatgtctgaaaaatggtcattcctctagacacatattaatttagagaaatttcctcttgtgttttttccaaggcatcttatttaaaagtggaatgaattttcttctttgggactggaacttatttctttatcatcagcaaaatatctcaaagacaactgaatatttgatagagcaacttttcatgagctggtagaattagcgaagacatcctctgcatttaagcgaggcacaaatttcaggatgtaaaatggatgctttacaggagactccattggtttactcttttcttcctcagtattagtaacttaacaaccattttcttttaaaagaacatcttaaaataattttttaatcaccagactgtgacaagtggagactctgaaaagatgtgccccaaacaggtggtctagacaactttctcaaggtgactctctgctggacttgtacgttacaacataagaaacggtgtgtgtcagggtgacttaattaggtgacttaattaaagtccttctgatgtctatttgggagaactaatgagtttcttttatcaaatttattccaagcacttcctgagatgcaaaatctgaattaactaacttctctataaatctgatgaggaaaccaagttctaaaaataacatgtgcagtgctggaaggatctggatgaaagcatagaagccagctgagtggatgtcaagaaagaatgtctgatcttgatgttttcaagcttggctcaattgaaacacttctgcaacttagagtagtacaggtgtcctcaataataagtcagatgccaacatgaagggtggattcacttcacattacggaaagtgtatgttgttccctccatgttctgggtactgctctttgaatacaggagtcaccttgaaattcagaggaataaagagtagagagtaaaccttatttctcttatgctgttacacctccttgatgaagctttttttttttttaaccagaatggtagcaattctgaaaattatccagtactacgtgggacacacacaatggctagacatgggtttcctgtgctcagtctcactaaaaatgtatttaaaggctttcagaaatcatatcaaaactgtattttaacttataaatggagacattaacgggcctactgtggttattatttacaactgtgagtctgagtgacctttttgaaattaatattcaattttctacaacatataaaaaatccttacctagttggaactttaaaagactataaatttgctaaagtagtatatctgacacttttgataaaatctgcttattccttctgaaacctctgtttccagctatgcattttctaccaagagttaaattgttggccttattagctcttcgtacttctgagaagaataaaattcttaattgtgtttcaatgaaatatgtag

SEQ ID NO: 28721 - DNA, 1789 bp, Bovine  19866881301778
  misc_feature (1)..(1): n is a, c, g, or t
nttgcatatattagtcatgagaaaattttgtaacgggaagaactcttaactctgaagaacaataaaatagcttctaaagaaaataggtatttgtgtgcacccactggataggataattatgaggttgtagtgcataagaggctttattcgtgtgttggaaattggattatataatataatgtgaaacctgatttccctttaaatactctcagatacagcactgactaggttctttggaactgtactggtgtgttttcttcagcttgtcttttctcactgagcttttggcataattcttacttcctttgttattctagctgtgaataatgttatcataaagtgctttaagtttgatgttagtagctgctgtgaattttggaaaatagagaaacattagggggagtttgcaattgatattcctccaagtatctacagaagagctctaaacttaagacttttccaaaagccctcaggattctttgatatctaagagaactgagtatgtgaaatgaaaaaggagtgaaattcaataacatacttctctgtctgctatgatagccagcaagttgtccaattagtgccaattgtattgagggtgattatgatctaggtccaggaggaactaggagctaaaatcatcatttcactccacaaaggctgtggagtaactatttgattataatgactttaaatcacttaaaaacccatgccacatatgaactaataatttggaggtgaaaagctccatttcgcattatcaatccctaaggactttcaatcattctcatcttttctctaagtgccttaaatcttgtgtagttgcagatttaaatttcaacattttcaatgataagacaggtctgggataagaaaagatagtaaagccactaagaaagccccaagaattttatttgcagtaatgaagtacatggggaaacatcaaagcagatgtgttttgtcacttaggagcctgattgggtattaaggcttctttgaaatagtttgattcagaattgcttggaatgatgagggaggtctgtttcagagagattgagatggagggacagaggcatatctgcggtaaaaagccttgtgcataaaatctgctggcaggacttgtcattgcttctgtaagaaaataatttgataccaccgatgtgcatgttgaattacaatagctattaaagtgaattgtattcttccgctcaaataagaccatggctgtcatgaagattgggcctgctcctttctcattttaattttcagggcttgtgctgtatctagggatagattatatggcctctgcagaacctctgtaaagactcttaggcaggattgccttcatggtagttgcaggtaattgctctgtaaaccctcagatccctactctaagcttgtcatcctttagtctttgtttcccaaggataatagaatgcctggataacttgtactcctcgaatagctgccagctgcattaatgtctccttttatctttttttaaaatcttatccctctcatgctaagagtcatagtctcaaggcagcatgagggagtatagctcacggaccacccagcaatctactttagaaaagggtgggaaataagtcagaagatatcttcagtttctgtagatcaagttaagcataaactagccatgctacgcttagaatgagcaataagcccagaatcagcatttgtagtcatttatggtgtttttccaccttgtaaaataaagccatttgatgttgaaaagtctcagaattgctgaaataaatacatttcttttggg

SEQ ID NO: 28722 - DNA, 1088 bp, Bovine  19866881306836
  misc_feature (1)..(1): n is a, c, g, or t
ngcaaaaagctttcattgagtaactgtgttggcaacaaaattccgcataaaaaatgatgtagacatttactcagaagttttagttagaagaaatattgtgagatgttaggagcaacactgaccaatccgttaggataaaacttgtacattgtaatgtttgtcatttatttcttgtttcaggtatactatttattctccaaaagatggacagccttgtatggatcatgacagacaaactggggaggtaattatttgtgacatagaatagttgttgtcataattcttaatatagtcatagagtttaagaaataaatcagaaacctaaaaatagctttattccagtattgaggtataagtcatgatactctggtggctattaaggaggaggcaggtagtcatcataggtacctgtatcttctctagaaccttgtctagaaccttgctggtaggtttagctgcatcagcttgtgctggaaaagcacattcttggatttttttttttttttttgtcacttagcttggcttgcaggattcccagatcagggattgaacctgggcccttggcagtgaaaatgtggtgtcctaaccactacactgccagagaattcctagagaagtagattcttgaacctcacccccaaattgctaaatcagaagctctgagggtggagcccaggaatctgtcttttaatgtgttctctgtgtgattcatatgcctgctcatgtttgagaagcaccacttggagagtgcactgttctaaaaagagaccatgaggaaaggtaatgagatatgtggtttactcatgtacacagattccatttatacttgctttggtcacatgcctacttattttcaaagtacttcaagtcatgcatgacatcagttcattctgcattcctggaggacacattagtgacattgttccctgtaatacttgaatgaagcaagggaaaatcattcgtctaaagccttggcacagtaaatcaacaacaatgaactttgtagtccctatgagtgtgtcattctctgttaccacctttgaacgcattcataggctaggactacctttcaaaatcagccttcaatt

SEQ ID NO: 28723 - DNA, 2924 bp, Bovine  19866881317490
  misc_feature (1)..(1): n is a, c, g, or t
ntggccctgcggggcttacactctgtccaatgcagcaggcgcagcaccctgcccatggcgtctgctcacatcactcagagtaaggggcctacgggaactggttggcacacgccgaggccccccactctactccttgctaccctctaccccactgcctccgggcctttacattagctgttctcaatgcttagtagctcagtggtaaagaaactgcctgcaatgcaggagacctgggttcaagccttgggttgggaagatcccctggaaaaggacatggcaacccactccagtatttttgcctggagaattccagggacagaggagcctggctacagtccatgggatcacaaagaattggacacgacagtgactaacacttttttttttttttttaatttaaactggagccgattatacagagtgaagccagaaagaaaaacaccaatacagtatactaacgcatatatatggaatttagaaagatggtaacgataaccctgtatgcgagacagcaaaagagacacagatgtatagaacagttttttggactaacactttcatttatgcttggaaagcctttccccagataccactgagatgcactcattttctccaggttcctgctccaatgtcgccttctcaggtgaacttgactactcgccctatataaataatcccccagagctcccactaccctttttccacttttttttttgttctcattttatcaccatctaaaatatcttacacttgttgcacagcagaaacacaacataattgctgtaaagcaattatattccagttaacaaataaaatttaaaaatcaaaaaaagaaaaatatcttatgtatttacttggctacacagtctcttccccaatactgggaggaaagcaccccaagggtattctgtccatggctctatcccaagcatagagctggcattcaacaaatatttattgaataaaaggctgaatgaatgggtgttgtctaaatgggctaagagacttccctggtggtccagtggtgaagacgctgcacttccactgcagggagcatgggtttcgatccctagttggggaactaagatctcacatgccacactgcacggcaaaaaataaaaagttttttaaaagatactgacccaaaagtaaataataaataggcttagaaaatgggaatcccctgcttactggggccctgttctatgctactatctacgtaagcgagtttgtttaatccacatgtgccatgtaaacagctccaccaaacccatcttaaagtcccaaggctgagaagggccgtgcctgtgctaagacccagaactatctgagtcaagccacatttacactggaagaatgaacagctcccatccaaagaagagctcacagaggaatcattttttaaaatattaataattaacaccctcttaatgtgttttccctgcccctccaggttcacgactacctccgcagcaagctgtgctccctctacgaaaatgactgcatttttgataaatttgagtgtgtgtggaatgggtcagacaggtaagaaaggtctgatggctgggagccttccacgggggggccctctccttgcaccggccctgggccgtgtatcttaaggggctgcaaccaaagagccatcagaatcggccctgaggcctggcagggctgcaccggtggcccagcgggtgaccctcgaggtcaagtctggaaaggaacaggcgatgggtgagaccctggactcctctttcagaactggctcaggtgaccctttaacctcacaaaaatcctaccttatacaggcaagaccctcccagagctgggtccatatacctaaaatgaagctcccctggcaaattttaaggatgaactattccaatgactttaaagtgtgctgtctggatgggaaattatccctcgaggctgcccgcagagactagcctaaggccctggtggtcatgaactgaattctcatcagccctcgtttattctgtgccctcaaagagatttatgactattagaggcctttggtttcaacagcacttccttatacctccccgcagtttctttttggcttgatgaatagatgctgctgtgatttccaggagaagccagcacaggctaccaggggctgttccttagtgaaggcagcaccagcagtcatactgaaaagcagggaaattctatcactgcaaaacattcagaggcgagcttctagtgagcacaggctctacctctctgacccctgttgggttttttgggccagtgatccaaaaccagccttctactcagcaggcctagcaagagtcaccacatggtagacgacccagatcacaccacccagttagtggagggcagagggcccagagcaaagcaactgttacttagttgaacaaaggccctcaggggaaaagtagctatccttgccctgttattttattttcgtttccattggtaatttattcatttattcaatgttcattatgaatagattttttaaaatatttgtggttatttttgttcaagttccccttctatcttaaccaagattcaaaacctatacttactaggtactttcacacatcatgattttttaatcctgaccacaatccatcaagattgctttcactgtccccattttacagctgaggaaactgaggctcagccagatactagttcaggagcttgggcagatcactgtaagtagtagagacaagaggaagaatttaaatcctaaaatgaacattctttccaccacattacagtttctttccataaccgagaaaatgttatttttggtccagataaggttgaaattacttttttacttttttccaaaaaagactttctcctatggtttaaaaacaagtcgggtggtggtaatggaagcagaggtcagtgcgtgggaagcaataaggcca

SEQ ID NO: 28724 - DNA, 2594 bp, Bovine  19866881340346
  misc_feature (1)..(1): n is a, c, g, or t
nctgtgttcctcctgccccacactggatgccctgcgttaaatgtgttctgatcagctggcggctattccagggacccacacagcagattggagtccagctctggttttccatagatgggcagtcctgccccactaatggggatttaagcaccttcctttcaggcaagacagcaggtcgagaatataaggcacagatgtgtatgattagatttagagttttccaaattgttgcttaaacaccttctgtggcccagctctctattttgatgactgggccatttgcccctggtttagacacttgagacactcaccccacctcctcccttcacttctctttgttatagaaaaattcaggagagaaaagacctaggaggagtgaaaatttaacttgagagatcttgactgaatgccatcagtaagatcaagaatgaataaaacagtctctaaaaggaagaaaacgaaagtgacggggctgacaacagccttgacaattttcactcaaatggcctccaagtaggctgcgatatttgaggttagcatcatatgtggatatcacattcgtgtctttatcatgaccttcctaatcatgtcatgtcccctcactgggaagactctgatgcagacagttgggggtaggagaacttttattttctacattgcaattttgttgagaaatctggccccctaaaatctattctggaattttaaaactattttaagatgatgtactttatgaaaccttgataagctctttggacactttgggaaggagatggataaaaaatagtattttcagtgaatttatcactaaaccaggatagaaattgttattagtaatgctggatggaacgcaacgagttgctacagcttaaggaagaaagaaatgtaccaattgtatacaattcttataggaatgtactctttttaacttaatttttattggagtttcattgctttacaatattgtgttagttttagcgccagcaaaacgaatcagccatacatgtatcccctcttttggacttccttcccattcaggtcaccacagtgctttaagcagagttccctgtgctatacagtatgtcctcactagttatctattttatatagtaccaatagtgtctctgtggcaatcccaagctcccaattcctcccaccccacccctcactttcccccttggtatccatgtatttgttgtctatgtctctatttctgctttgcaaataaaatcatctatatcatttttctagattccacaggcatgcgttaatacacaatgtttgtttttctctttctgacttacttcactctgtctggcagtatctaggtccatccacatctctacaaatgacccagcttcactccttttcatggctgagtgatattccacttcatatatgtagcttagacttaaaagtggcaggcagtttggacccttatcttgtccagcattctgccatttgtgtgattccttctaggatcgccctgctgagtgatcctccaatgttctatgaatagcctcagccctcaaaagttgaagccctcatattccttctccagggaatcttcctgacccagggatcgacactgctgggcactggcaggcaggttcgctactactgagcctccagggaagctcaggctatttctccctcttggctattgtgattaaccctatgtgaacattggtgtacaagtagctgagttcctgctttcaattcctttggatatacacacctagtgggggaattgccaagacatatatttatgtgggtatatagtttccccaacgccactgttgaagagactgtctgctccattgtgtgtgcttggcgtctttatatgtgtgtgggtttggctctgggctgtctattctgttccatttgtctacatgtctgtccctgtgccagtatcacactgtgtactatagctttgtataatattttggaattgtgatgcttccaaccttgttattctttcttaagagagctttggctatgctgggtcttttgtgattccatataaatatggggattgttttttctgtttatttaaaaatcccactggaattttgatgaggacagcattgactctgtagatctctttgggttctgtggaggttttaataatactgcctgccagtccatgaatgtaaaatgtctttctactcgtttgtgtcttctttaatttctttcatcagtgttgtataatttttgagtactagtctttcacctccttgattaggtcttttcctaagtatgtttttttaatactataataaaaaggattgttttcttaatttctcttttggattgttcactgctggtatatagaaatatagttgatttttgtgttttgattttacatcttgcaacattgctaaatttgtttattagctataatagattttttttagatttctttaggtagaagatcatatcatctgtggatactttgcctccttgttttctgatctggatgtattttctttttctttcccaattgttctagctagaactatgtgaatagaagtagtgaatgggcattcttgtctgttctagtcatagaggaaaagctttcaaactttccccat

SEQ ID NO: 28725 - DNA, 2918 bp, Bovine  19866881368413
  misc_feature (1)..(1): n is a, c, g, or t
ntaaatcattcactgcttgtaaaggcaaccaatcacactggataacaatgctgccctcagattattctgtatagaaccttgaggtaggaagagggaagcaggcaaagaaagaacttacaaaatcaaatcagagacctttggagttctcctcgtcagtcattatgccaatggtcctcaagcctagcagatattcagaactgcctggaatatagccgagaactatgggtaaatctcttggccctgtgcttggagattctgaattggccagctggggatgatttaagacattcttagaatctgatgatcacccagattggatgaaccacggtctaaacccatgcatcctttctgctccaaatccctcctccccacaacaaaacagaaacctcacctgtgcccaaggttctagcaacttctaccatctacttcactgttttttttttctagcctctgtttactcatattttggtttatatcaactattcagatgaatatatcaggcattctattttgcacaagagtcagaatagtagaatggatttttagaatcatacagacatgaattcaagtccaagtactattaactagtgtctgacctcaggcaggatatttaaccaatctggctttgggtcccacatctctgaaatgaggtttattttagtacctacatgcatgtatgcatgctcagttgtgtccaactcttttgcgaccccatggactgtagccctccaggctcctctgtccatgggatttttctggcaagaatatcggagtaggttgccatttctttctccagggtaccttcctgacccagggattgaacctgtgtctccgcattgcaggcagatgtgagccacccgggaagcctattttagtacttacattacaggtttaccttgaagattaaagtagccaaaggagcatctctggaagagagcaaatgttaacaagtgcctgctgctcttattgttatttcagtggaagtagttcctttgtctcactgaatattagccaaagaacaggacagggacatctacaaccatcacccccaaaaggcaaatgtgtcaaaataccaacgcttggtggggagggtagtgcctgagactcctgtggagtgctttctgatcccataaatgaaaccccatgatacagaccgacagaatcagataatgatggcaatcaataatgataacagaaatgattatttattttcataaacacagagtatgtgcatcccgctgagttacacacatcacatgccagcatccacttgcagggcagtcaatcaatgggggattgcaatatccccccacggagacaggagggaggatgagcggaggttgagaaattacccaccccagagcgacacattcacaaagttaatctaatccaggggccgtccgggtgccattgtgagcctgtgaatatggaacagccttgattgattgtgcactgcagtagctaaatacttcattgttacttgcaacaaatataaggaaaggaaggctgaaactgtaaaagggttggctctaaagcccccagagcagcaacaaaccacaaagtgaagtctagaaaaattaaaaatgggtaggggaagactgtatctgtgtcctaagaggcctctgttgtcaaagtgtaagcccaaaatgaaaacctaaggtgctgatggtgatcctgcctcaaccaataatttgccccgccatgggcctgggattacccattctcccggagtgagcatcaccacagttatcacaggggcagcaagagagcacagaggttgtgtctagacagaatgcatctgatcctcagttctgcctcccagagcctcccagttcttcctcttttcttgtggagataatcacatccaggttatcagaaacagggaactaacagtgcatgtcctgcttgactcccaagatccttggagcattaaatgattaccgtttcccgccactgcctgcccaccgcccagcatgaaagacgcatcctgcaaactcttccctagtcttacccctctgttcttcctctgaacgaccatggtgatctcctgtgcttttctctggatgcttacctgatttggtgtttctcaaagtctgacccagggatcacctgtatcagaatcccctgggggtggtttctaggagggagctggtcagtaacaacattgggtacgactcagacctttgtcctttgagcggctccatcttgacaactgaactcgcacagtgtgataacctagtgattgcactgttttcatcagtcacatttttacaaataggtagactcatttatcggagaaggtgatggcaccccactccagtactcttgcctggaaaatcccaaggatggaggagcctggtaggctgcagtccatgggggtcgcgaaagagttggacatgactgagcaacttccctttctccctttccctttcagacctttgtaaccagaattcctagtgctgaggccagtgactgtgttctaaaatatatatacaagtgactgaggggcactgtgctttgaaatccactgcttgaagtgatttcaggttgtagccatctgtaatgctcccctccttgcccgtggatggcagcgtgcttcactcatctttgtaagacccactttgtagtacgtacttcatacagtgcctggtgcatagtaggcactcaataagtaggataacaagatgaaaagtcctacgtgtcgatgttattattctcactgtcgtctagatcaagaaccacgcaataaatagttctgtatgatggtgattgggcaggagccatgggatcagacagacctgggctcttttctgggctttgccacttatcatctatgaggccgatgcttatctccctgatctcctctttacacatctataaaatgggcatgatgcataagccacaggactgtgatgatg

SEQ ID NO: 28726 - DNA, 983 bp, Bovine  19866881376538
  misc_feature (1)..(1): n is a, c, g, or t
ntcctgtaatggcaagcggattctttacctgagccaccccacaaattccccacatttggataaatgagctaatgtgctacttccagagagcttagttttaggtaataagctctcctctctttgtgattcagttcaatttagttcagttgctcagtcatgtccgactcattgtgatcccatggactgcacaacatgccaggcttccctgtccatcaccaactcatatccatcaagttggtaatgccgtccaatcatctcatcctctgtcatccctttttcctcccttcaactttcccccagtatcagggtcttttccaatgagtcagttcttcgcattaggtggccaaaatattggtttcagcttcagcagcagtccttccaatgaattttcaggactgatttcattgatgtctaagcatccttaaagatcagctcagccatcactcctgggaagtcttttattttcccatctgtgagatatccttcttatctgttcccacagaattttgtttcagtctatcataccaattagagtatttttattatctggactcaattgtctcacagatgagactgtgaacttgagggcaagaagtgtgttttctattttaccagtacctagcatatattcttatcaagatttattaggcaggcaaataattgcaagcgtgaatgacttagcagagttacattaacaaatgaaagagaattttatctcatagactataaatatcagcattccccatgattagacagatgtggatatattcgtatgtctcagaagtctcatttaaaacaaaaaagtatgagaaacagttgggtatgggcattaaatgcaaactgtatgggcattgaaacctgaccaactaggttgagagggcttctctggtggctcagatggtaaagaatctgcctgaaaggcaggagacctgagttcaattcctacatcaggaagatccccggagaagaaagacaacccactc

SEQ ID NO: 28727 - DNA, 1041 bp, Bovine  19866881392709
  misc_feature (1)..(1): n is a, c, g, or t
ntaattgtcaaaagaaccctgcaaagaggcatgtattttcttctattagctgtaaaaagagtttcagagaggtaactaatttacttggactttaagttctgtgagagccaagtatctggtacagaggtatcattcagctaaatgttggttgaattaaatttatccaaagtccttgatgggcagcagtgggccaagcctgaatttgaacccaaagctgttggtccttaaagcccatcttctttccactactgtttctcctctaaggaaaatttcttgtagagaaaacacagaaccaacaatattagcttttcgtttttgctcttagctttttctgctcaagctacataaaacttgagttttcaacatttggccccaaataccattttcctctgtgctgtttgcccagagatgatgctaaagataaacttgacttcctggcaacaactcagccaggaactgagaaactgttagaacaaactcttcctgataccctaagggaacaaaaataaacatttggaaaaaataaagttgccataatggtaacactctttgcattttagactctgtctccccctccctacccgcagggtagggtgggctagtcgccatccagacacagccaaaaagcagcaagttagaactttatcttgttttattgttatgctttgcaattttatttttaacagaaatctggctctcccaagtcactgatgactactccatgtggtcagcagatttaaaagtcttttcctaaactatagtttaaaaaaagagagagagagattaagttttttaaatcgtattggggtataattgatttacagggctgtgttcgtttcaggtgtacagcaaagtgaatgttttatgtgtgtgaaactgtcagttgctcagttgtttccaactctttgtgaccccatagactgtatgcccaccaggctcctctgtccatgggatttcccaggcaagagtactggagtggggtgccatttcttcctccaggggatcttcccaacccaggaatcgaacccacatgtcttatgt

SEQ ID NO: 28728 - DNA, 682 bp, Bovine  19866881449936
  misc_feature (1)..(1): n is a, c, g, or t
nctggctgaaaagttagagaagatatccaggacatcagagcattcatggtcctagtagagggatcaggagagtctgtaagcccagtccggcaaagcagcaaagcaagccattcattactcccaaagccatccaatgttggcagtctctccagccttaagatcctggtatcctctcatagtaagcagacaggcagcagcctgcccaacctcaacagatggtgtggagtcccttgtgccattggcatcatgcgtcctttagatttattcaaatgctctcaaaaaaaaaaaagaaaagaaagaaaaaaaaaaaaaggaataccctttggggccataaagtcccaaatctagcaatttcctgctgtatcacagcaaagtaccttccccccagccctgcccctctggctgttgttgagatggttaaccagtaattcctgaaaacaattctcttctgacacatgcacagcattttcctttgtaagaacgtgaaggcttgatgcctccagagcccattacatagacagattggcccctgagataattacaagaagatagtctaatgggctcgattaaggcaatcccattaccttggtgaagaatcaccagtgaggtgcaaacccagaggaagtcttccccatcacaaaaaataagtactttctacctagaaacagaaagagcattcagt

SEQ ID NO: 28729 - DNA, 1377 bp, Bovine  19866881485633
  misc_feature (1)..(1): n is a, c, g, or t
naatggagggagaccacaggtaaaggctgatcctgggccggctcctctttctggacctcacactggacactgcacaggaactcacgcccacgatggagggtcaggagggggccccacgcctctatcccgtagtgtgggggctgagcacacaggtagctccaagcttagcgggtctgggtggaaattcagcaacagagctgaattcagcaacatagcaacagagctatgttatgaagctttggacaagtggcttgatctttccaagcttcattttccttatctgtcaaatagacataagaggcatatataccctctagtgtggttgagggtcagatgagatctttcacgtcaagtgcctagcacagggcttgtacccacaataacacaggaggcagcagcaatgcagaagtggtgctgcttaatgcaagcctgctgtgcaatgagtctggaagcatgatgtgcttttccactggaaccagatcttaagagctactggttgttaagtcgatttctaggtcttctatctgggcctttgatacacaacagctttgtctctggaccatcagttgatacataccttcctcagtatacgcacctctcatttggtgctgaacattgtcagcccctccccaccccacccccattctgatgactcaggcacaggagagagagagtaaaggaaactggggaggagggtgaaaaaggaacagactcagaatcacgcacagggttttaaatcgccgacttctgctgacatttcttctgtgcagaagcacagctggcaggcttttccgtttggagacacggccgacagtttccccacaatggggatacaactggcaatcttcctacagagtaaggcagatggcaattttccttcagaggtatgtgcaggccacagttttgcccctggagaggaaaggctcactgattgagatgcagccggtaatctttactatacagaagacacattgaataattttgtccagcgagaaaaatggccaacagttttcccacggtgggtaagaatgcccatggaccaataatgctcgcctttatccagctaaggacagcgagagaagtttaagatttaattagtggctattgtactaccgtgggcataatgacatagtctccagacatgagctggagactggagcttggatccgatgaagactcagcggattctgaactgggaaacgaccaagcccagtgggctctacttttacagtttgtttttcatacagaccttcactaatcctacagatgattgtttaacagtgaagactgtagcaacacaatgcatagcatgatggagcaggaacagttcatctaggagagaactgtggtctctgactttgtgtaactgtttccatg

SEQ ID NO: 28730 - DNA, 940 bp, Bovine  19866881491471
  misc_feature (1)..(1): n is a, c, g, or t
ntcatcaaagagcaggccgtggcttgaggaagccacagcgactgtgagggcaccgaactgtctttcccagctgtattttagtgtcggggaaaatgtgaccggaggaagtggagtgcaagctgaaggcaaagtggctcagagcctttcttggaagttgtaattatcaaatctgttctgcaaagctcctcttccctttgcccagggcttctgcaaggtgaaggggagcaccatcttcacttgtactaactcagccaggaggagtgggagtgttagggaacctggcctggggcagcctctcattctggcagtaaacaacatactgtttcccacctcttccaagccttgacccacctgtcagctaattaagacccagcacccaggagtgtttccctgctcaccagctgtctggcggccctttgatgcaccccatatgtctcagccccaaccccaaccccctttctttctccccttttgtgtgtctttctgtaataggcactcaacatacagctaaaaatcactgggataatatgataaaacatggcattatgctggggtcctggaaactgggctgggggtggcagggagtgaagaaatatgatatgaaaaagtcccggttcagaagttactcatctcactgactgccagctggatgagtaacttcaagagcaaaagtagaacactcacaaataatggtggctagcatccattctgagagcaagactgcaagtcaggtacctgccacgggcattgtctcagggggtcctcctgataacactcacgaggttagtgctgttgacattcttactttcagaggaggacgctgaagcttgggaggtggtgacttttgcagggtgagagcttttgagtgctggaaccctctttcaacccaagtctacctgaccctgatgcctgtgcactactgtatctctggcccatcagg

SEQ ID NO: 28731 - DNA, 896 bp, Bovine  19866881609385
  misc_feature (1)..(1): n is a, c, g, or t
nctttgaaaggaaaacccgagtaatctctgcagatgctgggtttgaaagaatcattgtccctcatcagaaagcataattaagagcctctctgcccgttaaatgaggcagtgaatactaacacattttgtaagagtataaaatgctctataaatgttagttattgttattcccgagctccatgggacagcggcttatgttgcagaactgcgggttcagaatccttcagaagtagtaaatttacccagtagtcaaggaaaggaaatgcctctggtttatttccttccatcatcccgaaaactaaatagaaattcattcttctcctgtgtttccaaaatccagggtcagagatatgcaaatttaaatatgcaggctgcttttaaatgatacatgaaagggatttttgaaatgaatgtgctgtgattgaatttctggtcagtcacccagaaggcattttgcactaagctctggacccaattccactgaaaatgcatgaaactttggtgcctgcagccagtctaaccccagacggagatcagggtccttgccacagaacttccattaaacgatgcagacccccaggctcaaagttgaaaaacaaattagcacaagcctaaaagaaatccagtacaaagttactttaaaaataccttttccataaccttagcctgacgacataaactctttgatttcaagctgcttgataagaacaatgtgcattaatatataacttagttttttcaatggaggcacctttgtcagtttcaaaagaatttggctattctttgggagtaagaatattgtgaataccaatagataagaaacatggataaaataaatcacttattgtgtgtgacttggactgaggtgatttgtaagagtaactgacaggagttgg

SEQ ID NO: 28732 - DNA, 1434 bp, Bovine  19866881666581
  misc_feature (1)..(1): n is a, c, g, or t
nttttggagccccccaaaaaagtctgacactgtttccctgtttccccatctatttcccatgaagtgatgggaccagataccatgatcttcgttttctgaatgttgagctttaagccaactttttcactctccactttcactttcatcaagaggcttttgagttcctcttcacttctgccataagggtggtgtcatctgcatatctgaggttattgatatttctcccagcaatcttgattccagcttgtgcttcttccagcccagtgtttctcattcagttaattagtattaattaattaaccagtttttagttagtacttgcctagcatatattcttttaattaataatattgttgtataatttttgtttcatttaaatttcttattaatagcctgctcaccattttggggagaagttcttcatcaactttcttggaaaaaacaaaacaaaacatgtagatgactaatcctcctgcagcctgtatccactgggcctcaccgtcctcctttggtggcagtaattgtagctgagcaagcaggcactgttctatcctatgctttttttaagtattcacctattttaactaaataggaatattttaaatcagtgttttatttattgtagtatctaattaaaaagaacttcaaagctttttaatgtatttaagtaagtctttaatcatccctttgaatttgaagtggataaccctatcaggtcatgataaccctaatttttaatcttaactcatttaaatttcaagataaccatggaaagattatcagtaaatggctcacttctgtgtgaacccagatcttttttagcttttttttaaacaagtctactgaaatatagagtggattattctgtatctgttgtgtctaacaggaaagaaaaggaacagccaaagtagactttttgaagaagattgagaaagaagtccaacaaaaatgggatgccaagaaggtgtttgaggtcaatgcatgtaatttagagaaacagaccaggtgagcaatcatttgtgaggttctccatgtcatacttccataaccattggctcagaaaaggctgtgtggcaggaataaagcagattgtatttataatgtctgaaataggctgaaggaggtgacttccattttctctatttcaaattagcatcctctttcctgtggaattcttaaaggattttttcctatgtaaaggtttttttaaaaactattatttctcatagttagacaaaggagagtgtttttaagttttgtctttgttgactgataaaaggatgtcgttctgttacagagattcatattatagtgataattatctccaaaggcacagaatataaattttttaagggtttctgtaatcttattttattaaatgtatattgcctttgatgttaagaattggatagtaacataattaaatgatactga

SEQ ID NO: 28733 - DNA, 1333 bp, Bovine  19866881685864
  misc_feature (1)..(1): n is a, c, g, or t
natggaagaaatggaaatctaacttagctagtctgacctcagagcatgtaatcttatctactctgctatgctgccggctcctagcagataaacaatgatatgtacttgatgatctctaaaggatcgttcagttctaacattctatgatttgtcttaatgaatctgtaataaagcattcaactaggccctgtaatctcaaatcgtatgaagcaaactaaggaagcgcaataaaatctcttcatatgacctgaaagttagagttcaggtttcctaggattatcagaattggtctttctccacatgaaatccttcaagaaatgcaattgttttcttgctatcagtcaatatctaatattttctcctcatatgaaaagagatgacacagacaatatctaaagacattccagaaagaataaaaaaaataaatatgcaatactgttggcttgatctttaaacacaactggactaaaggtaaatctgataaatgcagatttctgagggcggaaaaaattctcttctttaaaacacctaaatttaatataatcaaataactatttataaattatcaatactagccttgaaaaaatactgttggtggctaactgaatatatcaaagctaaaagaaattattttaagacctatttgttctttatacaaaatactgagtgatcacaatcaaatcaaaatattctcatttgttcttttaaaatcatcatcagagttctttttaaaaaggaaaactgattatctaattactcttcttaaaaaagaaaaacagctaactccataacggatgtaataaaaaagttgctagctactccttacccctcataaataacatgaagtacagctcatacaagaagcatactgacacttttgcattaacctgaagtactcacagcttctgggaaacagcaaacatctgttaaaaaacaaaaacaaaaaacaaagtatggtacaaactatttctatttgaggcctcaataaggaaaaaaaatttattaggtccaggaattgaagaaaacttggtatagttacaagtacatgcagaatttggtggtcagaaattaaatctatttaggtccagcctaaggttctcagagcctacctataggcacaatcatagcagtaatatcctcaaaaaccagggtaaatctcctgtgcctttgtttaatgaactaaatagatcattgtatcaccaatatctgcccgtagcccattttcagtaagatgaattttcttgttcatgagatccacgtggaaaacagcatgctcagaaatgggggtcttttcagcgtgctcttttcccaggacaggaactcgccgaggccc

SEQ ID NO: 28734 - DNA, 1019 bp, Bovine  19866880369407
  misc_feature (1)..(1): n is a, c, g, or t
natggggtcccagtaaaagacaggagatagtgtttttaaaaacccagtagaatttccagttggctcttttcaaatgacgatgaagacttaaatgactatgtgttaatgttgaagagcaacttctctgagtgaggtcctcctaaataaaagcagaaaactccaagataactactttttactgtttacatctgttcttcttaagttgtttagactccatttatgggtttcttaggaaatgtgaattgtatgatatttcatgggggttcttagatggaaaatttcttagaagatagctgaaagagatacagttttgtgactaaggagaagtagtattagaaaagaaagaaaagggtctagtttagagacttgtttgaagttaaactgattctgtaccatactttgaaaattaagtcttgtagatgaatgtgtcacttcataaaattaatagttctcttttatttttgataacttttgcagttgctttgtattcccagtctgtttatgtttgtggtatgtcccctccaaaaatgaatactgtaggtgaattcaaacctttggagaaatgatttcagcataatggcagattttactattttgtaaactaaggtttcttttccctctttttcttcttctagtgagagtgagtagtagacagctgatcttaagaggactgtgcattttattttcatacttagctgttattttaatatttcattgaggaagttgtgtgttttcccccctagctagttcactttagaaaattttgttggtgtcagtatataaacaactgagaggttattaagtaggtctattcagtttttgcttccctggtggttcagagggtaaagcgtctgcctgcaatgtgggagacccgggttcgatctctgggttgggaagatcccctggagaaggaaatggcaacccactccggtacccttgtctggaaaatcccatggactgaggagcctggtaatctatagtccatggggtcgcaaagagtcgacgaacgacttcactta

SEQ ID NO: 28735 - DNA, 1578 bp, Bovine  19866880597259
  misc_feature (1)..(1): n is a, c, g, or t
ntaaataaatttttaaaaggaaaaagaaaatcactatttggtcaccatgccaagtaggggttgattcaggaggctaagggtgtctggtggaggattgatggggaataagatgttggcgtaatctaggaatatcttcccacaaaatactagttaccaagagaaaaaatagtgtctttatggtggagaaacctgcaggcaccaacatgaccaggtgatgaaggttcatggtaccagtgacgcaacaggttggcattgtgtgccttatgacgtgatgcattgagaagggcacagcatcagttctgtgccaagaaaacatggcctgcgtctagtcctaaggaaacatgtgggtcatcattcaacatacaaaaccagaagtttctaaaacttctaaggacatgaaagataggaaaagactatggagctatttcaaaatggagaagcctgaatgatatgactgctcaatgcaacacatgttcctggagggaatcctggaccggagggaagaagaaacattattgggtcagtttggggatgggagaaggagaaagagaacaagtgagcacaaatacagtgaattgttaacattaggaaactagatgaaagggatctggaagttctttgtactgcacttgtaacttttctgtaggtttgaaaacatttcaaaatatattattttttaaaaccacgcaattgcttattttaccaaaccattttagatcaaaggctcattgcttaatttcaaccaattctgttcttcagggcaaagaggtaaagatatggtatgcctaaccccaaaccacaggtatgcaaatcatgttgctaaccaggccccaattcatactaattcatcaacatttccatgcccagtgctgcatcagctctctcaggtccaactgagacaccaaggtttgcagacttcacttccaatgtcgcaggtgctcattgctcaaaacagccccacccctgctgtgatgcaacaaagaggtactcctttgtggtaacagtccttatctgtcatctgtcagcctttggcaaacatgtatctcttcagtgtccctctgatttttttctacgtgctcttcctctgtcacctcattctctgctcctgctgccttgagggcttagggggtagttttgaggctcaatagttcgtggggacacgacttagcaactaaacaacaacaacctcctcaattagcatcctacatgcagggtctccctccgaagtgtcctgtccctcaagcacaaaagttctacaccagggataaccaaatattgggttggccaaaaatgtctttcaagttcttccataagcgggcccagaaaacctgaatgaactttttggcaacataactatatgaaagaaattagataatatgaataattaaagaatacaaattaaaccacaatgtggttgtcatgaattgtaaattagtagtcttcatggcggcatgatggtaatgtatattgagaatcatgaaaatattcatgccttatgtcatacattttgatacgataacctgacttttagaacttttcccagaaagattatgcaaaagatagagtattatttgcaat

SEQ ID NO: 28736 - DNA, 1836 bp, Bovine  19866880998125
  misc_feature (1)..(1): n is a, c, g, or t
nctagaaacacagaatgacaccttggaccttcagtgagcgaaaagcctgaagcaatatattaacacagggctctgaccttcctcgcatatttctcctttgtatcctggcacacagatgcaaactcccatgatgcaggtgccgtggccaaagcacgttggatcaatgcattgctcttctggaacatcgcactctggccccttccagccatttcggcagacacagtgtcctttttcatattctccattcccaccacacagcacagggcacgaatctgaaggttggcaaatgaacttgtaatgttctcataatgcttgtaaaatctccaaagagtaattctctattgattctcatataatatttctggcaaaaaaattgtactatttctggcttagcctttattaaatcggcacatgttcatgattacaaacagaattttcctcttatgggattgggggaaagataaattataaaaacaccctgagtgaagaaattatttcaagcacttgcttttgatactcttaaacaactatcatcatcaccatcatcattattataagttaggatttttctctcttttggggtttcttcctcaggcagataaaattcatagaactaggaggaaggtattcctattatagagtgttatctttcaaaagttgggcatttagagaattggtactggacagatggtctgtgcctattccagctgtgcagaccttcattggaacattcactctgctctgttattcctttggcttcttattaaaaaaaatatggacctccctgagggcagggcctatatctcgtcttattcatttttttccataccagccataacctctgcttctaccccctaccctccttaagatctattggagaactgggaatctagcaagtgctattgaattctctgctgaatagaatttaatctaaagaaactgagtggctgagaaacctgagatgaaagcattagcagactgagaactttaagaacacattgtgaacaagcagaaagcatctctaaagtattgataataactgtaagcctgtggggaaaacccagcatgatttacccacagcttttcaagaattaaactatgggcaagtctggtttagtaaagtttgaaactttaacttctgccttcccagtctttgctttataagctactcagctagctggtgactgtccacctcttccactttaccctagtttgtataagtggttacccaaagttcctccattataaatgagtttatgaagggaatagaagtactgagttggccaaaaggtttgcttgagcttttccgtaagatgctatggaaaaacctgaattaactttttggccaatccaatatcatggagtagttggtttcagaggatccaggtatctcagtggttagataaccttagttaagtgatttgacttctctgatgttatttctttgcccattaagccaggataatagatctatagcataggattattatacaatatatgaattaaaagtcccacaaagtgtttagaatggtgcctggcagagcaagtgctcaacttccggtagagaccatcgcggatgttggtactgctactctcactcctatccctcctccttttcctattgttactaattctaagttctcaaatgacatcaagttccctaaccaatcggtataacagggcaaccttacctctagcgcagtcaggtccaaggaatcctgggaagcagtgacaatggccagagatacattctccatttccattgcaatttgtcgaacagtcatccattatttctattaatagagagaaaaagaagaaaaaaaaaaaagaacaaag

SEQ ID NO: 28737 - DNA, 930 bp, Bovine  19866881048156
  misc_feature (1)..(1): n is a, c, g, or t
ntgtcctaggctttcatatcctttaagtaaaagatactgaaactatggttgactcaaagggcagctgagtgcattttaatatccacatgtcctgtgaaagaatattgaagaaccacagaattctaatgcaggattatgttccatctgaatgcacaatgattacatggatggagttgcagcagttttttactttggtacaaaatgaatctttactgactgggtctatgaaataaatatagtgaaactgtaagtaaatttagaattcaacctgttgttcagggtccagaattgttattgcataaatggccgccaaatgtaactatgctgtaggtcaaaagaaaacaaagccaaaaaacaaaaacaacacacacacacacacccccccccccacctcttcagctaagtctacaaggaaaggtcagaaaggtgcattttgtgttgctgcttaactttcaattcccaagggtacttgtttgagtgcaactgcatgtgtactgctttgagaaggagggactgtttggagaacctagaactttggtgtgaaataaaagatttgcaaagtactcttagggagaggagggagatccagacagcagagtaagaggatgtggaggtcacatccctctaggaacatatcaaaaatacatgtacaagacttccctggtgttcccatggctaagactccacacgcccaatgcacagcatctgggtttgatcccggtcagtgaactaggtcccacatgctgcaactagagttggcatgccacaactagagatcccacacgttgtgaagactgaaggttccctgtaccgcaactaagaactggcacagccaaaataaataaataattattttaaaaagtacatctacgtgtgggacaatcctcactgaaaactaactgtaaactggtaggactcctgtatgaccaa

SEQ ID NO: 28738 - DNA, 1049 bp, Bovine  19866881171293
  misc_feature (1)..(1): n is a, c, g, or t
naggaggaggagaagggcattaagcaccacaagtaataggtttgttcactctgcgactggctggcaaacactgctgaagcatgaagccgaaccacaggggctggaatttctcttcacttttctaagtttattgctcaaatgccctcctctgggtcacaataacttggctcctgtctctctcaggtcctgactttctccctgtacttgagttcagtgagtcatttaaatatgtatctccatgtcatggaagtttcatttaccttcttttcttcgtttcgactgaatttccttaagcatgaaggttttttgtttcctttgttcctctggagtgcaataaataagcatctgctgctgctgctgctgctaagtcgcttcagtcgtgtctgactctttgtgaccccagagaccgcagcccaccaggctcccccgtccctgggattctccaggcaagaacactggagtgggctgccatttccttctccaatgcgtgaaagtgaaaagcggaagtgaagcatctactatctaaataaatactttgactgcagccatttgaaatcaccccagacttgttattgaactgggggagatacttcaaaatggagatgactaagtctcttggaagaaggcaaactttgactagatctcctggcagagaaggtctttcttgtggtacgtgagcatttgagttttgggggttctgtttaaagctttaaaaggttagaactgcacatagtaaacataatgagaagcaactaagcctgtgcaccacaactatcaaagtccacatgctccagggcccgtgagccacaactacggggcccatgcaccacaagccctgaaacccacgcacctagagcctgcgtcccacagcaaaagaatgactgcaatgagaagcctgtgcacgacaacagagagcagcccctgctcgccacagccagagaaagctggtgcatggcaacaaagacccagtgcggccaaataaataatacaaaatttaaaaaacaaaacaaaaaataacagatcaagaagaaagaaaaataaacataatg

SEQ ID NO: 28739 - DNA, 1261 bp, Bovine  19866881533017
  misc_feature (1)..(1): n is a, c, g, or t
nccaagcagacactgatctgctttctgtcactatggtttagcttccaatttctagaattttacataaatggaatcccctttcaacaggctttttgcagcataagtatttcaagcttcatgtgttgaacagatcaatgattctttcttttttattgatgaatagcatatatatatttatatatattaatttgtccactcattactgatggatatttgggttatttccagtttttgttggtgttcagttgctaaatcatgtccaactctttgtgacctcatggactgtagcatgccaggctttgctgttctttgctatttccaagaatttgctcaaacttatgtccatggagttgatgatgctatctaaccatctcatcatttgtcacgcacttctcctccttagggctattacacataaagctgctatgaacattcatgtataagactttgtatggacatatgttgtattttaggggggaaaatacctaaaagtaatatttggattatgtggtagttacatatctaacattttaagaaacttccaaacttctttccaaaatggttagattttatatgattcaatgtgactttctttgagcttaccctacttaagatggctgatttaaaatccttgtcaagtttaatgtctggcttcttcaggaacagttatattatattgactgctttttcttccatgtatgggccatacttccttatttcttgcatcccttggggtacaagaaatgggactcaggcaagttaaaatgccacaaagcttactgtttttatcaggatgctactgtttttcttaaaaaaaaaaaaaaaaaaaatgcttcccaagctgcttcaagcttttgattaccatccagagttctgaaaaagttgattctgacagtctttgccagtttatagttgtacttttagaggtgaaagctttaggtgtttcttactctattattttcactgatgtcactcctctaaattttaaagatctggtttactttatacttgcaaccctactcttccaatcagccacatttcaagtactcaatacctacatatggccaatagccaacatgttggacagtgtaggtttataagaaaatttctaagcagagttatttaaaggaatataaatgaaaagtaaggtctttaattgcttttttatacttttccatgaaacggttttcatgggcagggtagggaccctatgaaaccacaggttgcaaataataatagctaccactacttaagcacttta

SEQ ID NO: 28740 - DNA, 1849 bp, Bovine  19866880382445
  misc_feature (1)..(1): n is a, c, g, or t
ntgaagctccccaatgaagtgagacttgcaaaacaaaacaaaaaaaaaaattgctaagagaaggcaaagaaggggctttttaaaattctattcaaaggcagaagatcaagaaagggaaagcccacttacagcttctgttgtaaggttagagctgagagagaaagcagacttcctaaatattgttttcttcattctctacaaaggaaacttgagaagcaggttgacatagtagaaaaaactctgtgtatttgtgaggtcaggcaaacttggatataattttctgtttcaatactcagttatattaacctgggtctccttgtccccatctgtaaaatggagaaaagtatttctttctcataggattgttctgagtaatggaagtaatgcattcaaaacactgagccaggctcctagtagtgactcaagtaaataggaacttactaatattactcaaaagagtagtatacatagtgacaggaaacagtactcttcccaaacagaaggaatcataagaaagtacctaacagtgccaatttagaatccatcatctaatatgaagtgcttgtactgcagatttgggggatggaagggtgaggggtacaaataagacctgagaatttttcccatctttgaggaattatggaaaacagaatattgctagaatgacatgggcaaatgtctgctttaagggtgacacgtggaaatctaaaacctggaatttggggggctgtttcttcccgttagtgtaatattcatttgcccagggaagggggaattaaaaaaaaaaaaaaaagctgaaacaaaggagtagattgaattttccaaagaagagcacaatgtgaaggcacagtcttcaaagctaaggtgatgaagaaagaacagatttcttgaatttcctcaaaacttccagaggtaaaacttaagaagaaaaaacttgtatccttaagcaagatgtagtgggttgaatgctgctgctgctgctgctaagtcactttaatcgtgtccgactctgtacgaccccatagacggcagcccacctggctcctctgtccctgggattcttcaggcaagaatactggagtgggttgccatttccttccctaatatctttagaatggtacaattaatgtcttggtgaatgcctctccacttggatactgaggctcttagtttttctctggtttatcaacctctgttcccagaaaaggaccgagacccactcattcatacagattgaaaaactttagtaagatactgcttccaaagtcatttaccttaagtcaaaggagtaaagacctaactgtggattttaggcatcagttagtcaacatttatcactgagcagatatatgtggaacacttaccatgtgttgagttgtattccaagcaatggagatgtacagtgaacacaatagatacaaactccttccatcatgggactggattctagggtggagagtgatgttagacaagaagaaactgggaaatagatgcctataaagggtatgtagtaagtgctttgtagaaaaataaaggacgtggggtggacagggagtggtgggatgggagctctgctttggtttgcatggtcaggaaaggactttctagatgacatcagaagtgcacatttgtcaggggaaagaggataagaatgcaatttgagggcaaggaccctgaaatgactttattttaatcatcctgcctgggtctaatccagaaccgaccatgtgcttagacccctgaatttttttgaatgtacatttcatactggtttgagaaacactttataaaacaattgttacattgctgcaaaacccccgataagctgcagacatagaatcagtaaaag

SEQ ID NO: 28741 - DNA, 1611 bp, Bovine  19866880456050
  misc_feature (1)..(1): n is a, c, g, or t
ntccggaccctctgccactcctaggagggtagctggcacagcagaggggctctatcacctggggctgaagtgtgggtgcctgcctgactttggagcctgggaaaagcccaccatttgtggtccgtctggagcgggggttcattggaccactcctggcccacttctcccgccccatttccactacactcgacagtgatcttgaggcttttctacattagaatttttaatattttttcatctaaatgctcatctttagtaaatatataactagatggattgtgaagtgagagaattaaaaagtgctatcttatatctgaacgaataaatcatttatattagctcttctgtttctaggctggtcgggtgttggcaacaaataccagggcatcagtactctttgacatggtggattcattaatttattatttttttagtgctctgacaagttgtttactgtaagccaaatgtcaattagcattggcctgaaaaggagttgctgtgctacatgtgtttgtatttagctttcaagccatcctgattattttggcttttatttgcacaacatatttatcttcaaagactcaccaccaccacacacacacacacacacacacacacacacacacaaatcctacttaaaattttaacattttcttaaaaaccaaaccttgttggcaaccctatcattttagtattgaatttttttctcctgataaggcaaatgacactttagccttagttaatgtaaagcaggaaggtgttaatctcattttcaacatgtcagctctcccaggtagggtattaatacgcaagatcccctgctggcagactcaacagactctttctggctgtgaagtgaagtccaaacctggtaatttttgctttctattattgtatgtgctcaggtctatttcatccattgaaaaagatatatcagtagctaaatgcataaaaagaagcaaagagatgtttgcaaactattgactgaactctatattcagacactatgataggtttgttttaaaatagtcacacactacagatgctgggaaagactgagggcaggaggagaagggtgcaactgaggatgagatggttgaatggcatcactgactcaggggacatgaatttgagcaaactctgggagatagtgaaggatagggaagtctggtgtgctgcagtccatggggtcgcaaagagtcagagacaactttgcgactaaacaatggacatttaggtatgtttgaagataaacagcaactaggtaaggtaaggtaagtcacttcagtcgtgtctgactctgtgcgaccccatagacggcagcccaccaggctcgccggtccctgggattctccaggcaagaacaccggagtgggttgccatttccttctccaatgcatgaaagtgaaaggtcaaagtgaagtcgctcagtcgtgtccgactcttagcgaccccatggactgcagcccaccaggctcctctgtccatgggattttccaggcaagagtcctggagtggggtgccattgccttctccggcgactaggtaaggcatacttaaaagacttatatcttacttaagtaaggcatacctaaaagctctaaggtttta

SEQ ID NO: 28742 - DNA, 2266 bp, Bovine  19866880592879
  misc_feature (1)..(1): n is a, c, g, or t
natttcagagtgaaatgcattttgtcttcatttccttttacttgtgtgcctcaggaacgagatgttagggctgtctttaaatcccagaagagagcaggaaaaaggggtgagatggtaagctagcagtcaaggttttgtttctgtcactagtataggtaactcttctgttaatctgtgtgttctcttaataatttacatccatattttgtagttccccttttgaaatctactttttagtgccttacctcctttttgataaaatatgagaacttctggcctctttttcgctgtgaaatatataacctcatttgtagttagtttgatacaaacacttgaataacagtgagggtaacctgttttttgtgtcacttgtctgatttttataggaaatataatggtcacattgaaagtaagccactaaccattccaaaggatattgatctccatctagaaacaaagtcagttacagaagtggatactttaggtaagggaaatctgggtaaagtgttctgtaaatctcagttttatattatgctagtgaaagtacttgaatttatcttttgttgttagattcttttgttttcctaatcattaagtccattatacagactgaaatctttttcagagctaagaagctcaaaatgacttcatctgaattgaatttgtttttctatccacctaacttatagtaagccttatttttccccatttttcagaagaggccgtcttatgcaagtttgttacacagtttttgtaaatgctgaggttaccgtttttactatctcaaattctaagttgccatctgtatcagttttcgtgttttataatgttgcttgtagaaaggcatctgtatgtttgtattaaactacctatatttaaagcaattcaaccttatgttacacttagtagaaaggaaaatggttttaggatgatgaattggattagaaatagaaaactttacttattcaagattttatttggatatctctgaataagtcactcaatttcccccctgtatattagtgtttaaaattatgtaataactataatgattttaaatttaaagtgaaatttatatgaaattattcaaatcctataagagaaaagcatctaaggtgatattgtttagaacactagttttcagacctggctgtatatcagaaccacttaagcagctctttaaagataaagattctcttatacctacccttgatgattcagtaaatctacaatggtttctgggactctgggaatttgtgttgttttaagtattccacatggttctgattttttgactaggtttaagaactacagttttatatgataagaaattaaaatgacatttaaacataattttggtaatgctgtatatctttatgtaatttggtccttcttggattaaatcacaccaccacagaaaaatcttaatagagtcacttcacatctcataaagaattactttgtgaaacaaggtgccttcattacatttgaaagttgatgcttcatttacaggattgtatgtatgtgtgtatatatatgtatggaaagggtttcctacaaagtgtcagtgatgaacaatatacgttagttgtctagtgttattcagactattgagactggttacctcatccccctttttttctttttaactgtttttcatgcaatatttaaaacatgtaaaagcacttgaactttttgattagttatcccatttgttttgttaatctgataggtgtgggtacttggacaagaatacttatacacgtttcctgatttctaaaacagaattttgctgttcttactaataactgatgtgtaatggataattatcagctaatcaaccttaataatagtttaaattgactacttatcagacattgttacaagtgctttatttgtattatgttgccctcacagttctatgaggtatgtaactattactgacttttttttcaacttgttagatagaggagttaaataactctgaatgtggtagagacatttagcgagaattaggctacttaatgaacttaaaaaattgaagttaggggtaatgtgccttcagcttattcagtattttgttttacaattttgagcaataattgcaaatcgtacttgttaaataactgatcatgtaacatcaagattattctagttaatcagtaatagagatgttatttatgtttatatttatataatcatttgtgaatgcatgctctgtgtctctgtttaggtaaaagtagagggttttctacctgccttttag

SEQ ID NO: 28743 - DNA, 1316 bp, Bovine  19866880594835
  misc_feature (1)..(1): n is a, c, g, or t
ntgtttttaattgagacctttaagaaggctgtctgcatagctcttctgtaattgcaatttcaatgttaactgaagacacatttggaagaaccacagaagctgttcttttctaaattgcagagagcttcagaaaagcaccccatgggtgtataactgagtctgaagagatttgggctcaatgagttaggcatgggtggaagagtgcagggcagcagaacttggatttttcctctcactgctgctgtccttagatttttttaatttttattttatttatttattgaccatatctcaaggcatatgagagctgagttccccaaccagggatcaaacctgaaccccctgcactggaagtacagggtctcaaccactggacttccaggaaagtctctgctgctgtgcttttatgaagagatagttatggtcacttaaagtaaccataaccataattcttggtctcacgatgtttgctgagaacatttatttactacaaatgctaacatggagctctccatgtactatataccccttcagatcaccttgtgaacaactcacttaatcttcataacaaccctctgattcatggacctttgttaccatccccagtttacaggtgggtgaactgaggcactgaacaagttagaagctggcctcccagctaggacacagctgagctgggattgcagcccgaggcagactggctccagtgtccgtgcttttcatcaccaggccatcctgcttctccagcaagccgctttagtcttttttattccaatgaaaaatggaattgaaaggagggagaagatgagtggcagcggaagggactccacagcagcctgtcacccattcaaggccaccagcatgcatacctggtgtcccttcaggaccaaaggtgagactgggactgactgcagcaaactcattaattcaacaagcgacaaaccagaatccaacaatcttaattaactgacttgtggttacattcttcccgattattgagtattttgtaaagaatgcctaacggctaatcagttaaggactaccagtgacttcgaattacacattattttgaataaatcagcattggtttaacaaacctttattagttattaatggctatatctttgttaatataaaaaaaatatgattgataccagttgactgtaaaatggctgtaatttgaagcaactgccaagttctcccatggcttttttttttaaggtcctggaagaacaaacgattaagcagtcaggtctttgtgttaccatcttaactcctcaccggactacccagtcagtgtgagaattagaaatgag

SEQ ID NO: 28744 - DNA, 1356 bp, Bovine  19866880598158
  misc_feature (1)..(1): n is a, c, g, or t
nctacgcttggctgggcttgtttcatatgtagtaacagagttcaaaaagagtgtgtgaatggcagtgtgcaaggcttcttgagccataggctcagaactcacagcctcactgctcctggactctagtagctaaggcgagacgtacagcaaactcaggttcaagaggtagaacataacctctgcttctagatgggaggagcctcactgtcagattatcaaaggcaagaatacagggaggagtgatgaactgcagccacttttgcaatctctcgcagaatctatgcagatacatttgcacatctcttaaatatttcttcatgtaaatattaaagccatcctgccccctactggtcacaatcttgtatgttaattttttttttttttttttaattctccctaccccagcatgccttaaaaaaaaaaaaaatctgattcagaaaagctgatgtgagaccagaaattggcttttttgaggggttctcaagattaggaaaagaatttccatttgttagtcacattttctcctctttgcatactccattatttctaccccctttgttaggcgacagttctttaaatttataaactcattgcagagaaccaatgaaatgatcattgcacatctacatgggataaaaggaaaccttcagaaaattgggatcctagaactgaattgtgtgctgagaattgaaagatttgatcattatatcctccttgactggatgctttcttctttactaataggcttaactccttatacccaagcacttatgcagatgattctatgtcatacgtgatatttatttttggtattcctcgtagtctgttttcctcttagtcgctcctttcccgtcaaagtttcccacaatatttcctgccttgttttctcttcacggtcttcacaccactcctgatgacagcgttcattagagagcagtcagttttgctttcatagttattctaagcactgagcagtgatggtggatgtatcagggctgacatgttccatcaatccagggtacttgaaaaggaatggttaaattgatgccctaaagtttgatttttgcttcaatactttttgttggttttagcaaactgctcggtacagatgtctcaaagtctccagacagcctctgggaaattcggcacatcttgaataaaaatgtgttggaggaaagaaaatgatacccagaatccaaacaggtgcatcaggcgatgcatttaatgaagttgctaagttgtgattgtgcaaaatggggcttcagtagaagagaagagagaaaaaaaatcccaaaccaggaaagatggtaactacatatgtgatttgcagcaattgcaatatatgtatatttctgt

SEQ ID NO: 28745 - DNA, 1565 bp, Bovine  19866880673788
  misc_feature (1)..(1): n is a, c, g, or t
nataggaccataaagagatgagattaagtttaagcgatgaaagtttttaattatttggggcaaataattgacctagttcatcataaaatgaaactgtttggaagtaccgttgaatctgtgccgaggccaatagtattttttttttctttttgcatcagtgatgcatgtcaccttcctgcaaggcaaccagtttgcagatctggccagagggaaaattactggacaacaaaatgaaaaggaggcgtaagtcagcccagatctctgaaccctaggaaaggcaacttccctcccgctcatgaaagaggacgattgtgctcagtaccacttatctggtgccaacaatctggtaagctctctattcagccctgcaccaaggctacagcaaggtgacctggagtttggggccgaggtcagggaaaggtcactgcctgaaaaatgaaactagtcaaatggaaagaatcccaggaatgggtgaggttagtcacccacaaaagtatcccaatccaagaaatggcataagaagctatttcttatgactctgaggttctgactctttttaaataatcttgctgcccctagcaaactggtgctaggatgctctgaagcatagtcataggaatctgcattttgtcactaaaattcctacagacttcttccattccttctactcttcaggttttccagttccctcctcctttcccttatttccaccaccacctgcaacttcaaaactaaagatcagacaccatcatcctgttgtttgaaactttctctgaaagctggtcctttcccttccccagcctcttcctggtgcctccctgcaaaggcagaatgttaatacacagatttgtacgtgacaatgttaggtggtcctagtatgccatgactgtccattttgaataagccttttaaagttaaaggaaccttagtgcttggaatatttgtttgccctttcatagcttttcttatctcacgtgatgcttatgagtcctgatataaagtacctgttaggctcaggattacttattttcagccttccaaagggaaaaaaaaaatgacatttcttctcctggatggcaagatgaaaacattttatttatatcactttatatttgtgaaaagactagatgactagatgtactttgaaaaggacttttagtttaaatagatagctggaattgatatgtacgactgatatgtttacattcatatgatttctttttctaagaaaccccaaaatcataaagttagagagtattcaattacttctcttcagtgtgttaaatgatgaagagggagagtgtaagttctttttgttttatatttgttgtcaagaattcatgtaataaagtcaaatttgtacaaaaaaatttcacgaaattatttttaagagaatcagttttcatagataaatttcaataggtcatacaattcttttaatatgagctccttacttttattagtgcattataaattatttaccttggaaaaatacattaaaaacagaattagaatgtctttggtttatatagctcacagcactaagttaaaatagtataatacat

SEQ ID NO: 28746 - DNA, 1319 bp, Bovine  19866880706043
  misc_feature (1)..(1): n is a, c, g, or t
ntgcaaagtcagacacgactgagcgacttcactttcactttctctagggaatcttcccaacccagggattgaacccatgtctcctctggctcctgtattgcaggcagattgtttatggctgagccaccaggaagcctattcctataaacagttcagctggtaaagatttcctgtaaatagtttgatacaaaagacagtttcacatagtagatgaattgctgccctaagggtccagcaagtagtttactaattttagcttcttcactagggcagatcactctaaggtctctccatgctttcattttccctctttataatgggtcagtgaatgaatatggtagaaattagctacaaagagttccaggattccttagataagaataatatactttcccagataatgatgtttgtactgaaacagaagcatccatgtcaactttacctagggagctttcctggtggcttagatggtaaagaatctgtctacaatgcaggagacctaggctcgatttctgggtcaggaagatcccctagagaagagaatggcaatccactccagcattcttgcctggagaatcccatggacagaggagcctggcgggctacagtctatggggtcacaaagagttggacacaactgagcaactaacactttcacttttatcttctagggcattaacaactataaggttaggactctaacttggtgaaatattaagcataatgggcttgtgtccacccagttgtggctcaaaaactaagtttttctgtcttatctggatctttagaattgcttaaacaaagtgtgtgagtactcaggaaatgctgacttaaaatatttcatgagtgactcattcatcatcacaggttcctgcgaggtaggtaagagattgtcaccctcacctgcctgttcttatttgataaatgctaattgatattatctgactttcaaatgaattataagaaggtgggtttgttacatcccttcttattaatttcggttgaatagttctgactttcacccaaccctgatgaatagcttgtatctgattgccttgtgtttgcttcacacctcaatactgttgggaataatataaagaaaagctgccttccccaaaacaggaagagcaaagaaaaacctaagggagtctgcataaaaaaagatgaaagaagaatgaatataatggtaatacaaaggcccataggtcctttgatatcctgatagccactagaaatacaagtcttcactaaagagaaggctgagttattatgtattttccattaaaatatagattaatgaacaatttggagttagtata

SEQ ID NO: 28747 - DNA, 703 bp, Bovine  19866880771523
  misc_feature (1)..(1): n is a, c, g, or t
ntttgcacaaatttatacaactagtatacatgaagccaagatcctaaatctgcctaacaaggactcttaatcattgccctgaagtttttagtgaattggtcacatgaataaacccatttacaaaagtaaattgttaaaatataaacctctattcaatgtttcgcatgaatacattacatgcccaatattttggtttagttgctatgtccagctctttgcaaccccatggactgttgcccaccaggctcctctgtccatgtgatttcctaggcaagaatactggcgtgggttaccatttccttctccagggtatcttcctcacccaggaatcaaacccaggactcctgcactgcaggtggattctttttaacatccataggcatctttttttctctgactctgcaatatttaaggaatttatggcatttagaattgacgtgtaaaagaagtttgcattaaagatgaaaataaaatgagattcagttaaccaagttggacagctaatggaaagtgtgatggaaggaccttatggtgctttatacatagtaaacacccatattagttgaaagaaaagagattgaattaatgaacctttcaatcaacaagcaaacatacactgaaaatcaacctgtatactagctactttagaataattactaaaaacatatagcaactccataaaatattggaattagacatacgt

SEQ ID NO: 28748 - DNA, 2139 bp, Bovine  19866880787784
  misc_feature (1)..(1): n is a, c, g, or t
nccactcttatcccacttgtttttccactcctcatacacctacactcattcagacaccagtatcccagtagttttttacaccaccattttataattctggcaaagccaaacaacagaaggctggtttgcagcattgccaaaaggacacccatgtgtgagcgcttcttttgtggtgtgcaagtctccagaacagaagctgttagcaatacactatctctgggcggaacactcagaacccctgcgtgtaaaggagctacacctgggaagattatgagtgcatttggaggctgtgcataggactaaaagctctgccgaatcgttccactgcagctgtagtcagtaacaaattgaagcactttataaaatttgtcgctcttcaataattttgaatcgctttaaagtgctcatgctccaaaaccataaagtctttcttaaccattgcaaacttataaaaggcacatcatcaaaatgacagtaatcaactccttcaattttaggtgtgaaactgttctgtgtttttttctccttgtttttgttgttcaccaagttggggggaaaaaaagaggtcataaggacacgatgtaaaaaaattctcagtttttcaagagcatcaagtaatcaaaattctaagatattctcagattaagaaagacttgatttttaggtaagattcccctaaagggagagagagagtgtgtgggtgtgtgtgtttcgtctgtccaggaacctaaatgaacagaaagaggccattcacaggtacaaagaagaccgttgatgcaagttttggggcatgatcctgcaataacatgctctgtgttagagaaagtaagaggtaagatagctaaggaaatgggttatgtactttacagggtatgagtttctttttgaggtaaaattaattccctatggcttaaaccactaactgaagagcattaaaagtgtcatgtcaacacaattttctagtttacttttgtctttatattctggaatggatcccattcagattacatccttcaagaattacatcagccccagttcaaagttgttcacctccaaaccatataaatccacacattactttctaagtgagggcattcaccagactagtgtaatactgtcttccatgtcctgggacggctggaaattatcttagttccctgaccagggattgaactggtaccctctgtgatcagaccgtggaatcttgagcactggactgccagggaagtccccatcactaattttctaaatcacaccaagtgttcatatggaacttactctcgagtctaatatgattttttttcaaacataacatgtgttaaaccttatttttccttcctctgcttatgcagttggtggaactagaatttttttcccatctaaacaagagctcaaattcataagggcaagacacaagcaagcttttactcttttgaatcccaatgtgcaatggactaaatatgtcccccaatttatgcagaaatcctaaccaccaatgtgataggaagtgggaactttgggaggtggtaattaggtcctgagagtggaaccctcatgaacgggattaatgcccttataaaaaagatccccatgagctctctcgtcccttttcccgcaagccagtgataggacacagctctagatggctgtttgaaattctgtgggagggccctcatcagaacccgaccacgtaggtatctgatctcaagctaccaacctccagaaccataagaaataaatcagttgtttatacattgccacccactctgtggcattctgtatagcagcccaaacgaactaagacacagcaggaaagatggctagctgaagggcctagcttctttctactgcaggttggctaccgtttacaccagtggtgaggaagggggatgaacctgttccagcctgtggagcctgagaaaaacatgacccttccgtgtccagtcagagatggagtacggcctttagcacctcagtaggtatgacagacttgggccacccaggaaagaactttctctacggataagtctgttaagtgtagctctggctcttaaccagatttgacttgcccaaacccaagtactctaccactgctctgaagactatatagctaacaagccaattgctattgctaagtca

SEQ ID NO: 28749 - DNA, 2008 bp, Bovine  19866880861403
  misc_feature (1)..(1): n is a, c, g, or t
ntggtaaccagcactcacaaaacagtaatagaattttcagatgggaaaatacatatcataaacatatggtcttccttgacaatagagaaattatctacagaagaaaatcagaaactcaaaatttggcatacatataagcacataattgaaagtgatattcagcttttaaagaaaatatatggtatgtaaaacaactgttactataattatctggtagttttgttcaaaccctttaaaaacatttaagcactgatatgcaagctttactttaaaaataaaaattttaatttgggagcatatatatactcatctattaatgttcatattacagtattctaaatgtgtgtctctcaggacccaatagttttctttaattttctaagtcgcttcagtcatgtccgattctttgcaaccctaatagactgtagcccgccaggctcctctatccatgggattctccaggaaagaatactggagttgggttgccatgccttcctccaggggatcctcccaacccagggatcaaatcacctctcttaagtctcctgcattggtaggcgggttctttaccactagcgccacctgggaagccctttcttttatttaaacttagctaaattacaaattgaatttaaaaatagggtaactcagtgaagaatattttaagtattagtctatatgttaagatttgatacattttacctgttgtgcatataaacagagaagccttgttattcagtaaacttgtgtcccaagggactatgattatgaagtctaaattttcaagttaacatgcaaagctgcaagaaactgtaatcttataaaggaatgacaggcagatatttaaaatatgactgcagggcagtgtgattattttaattaatataaccaaacatttatcaaaatcaagattttcaaagtgatcatcttgtaaggtataaaatattcatttcagtgatggtcgcattgctcaatccagtattggatgtcctcttttgataattgtcttcagaggctactgcctaatctttggaacattttttttataatgagaaatctttatccaataaaggaaaattgactttgagaaactacatggagttaagtatagtgaacatcaacagttctgttttggatttaaaaataaagtgcgactataaagtaagaatatttttctagcagttaatagactcactttgaaggcaattccaaaagaagagcttggtaaatggttagggagacggtagagcattggctgcaggaaagcttatgtgtagaccctcagtgcagctgctataaagaagaccctccaaaggtgtccttgcttcatggtggtcaaactctgtaagaagagacccaaggagagtgttgctgactcacttttccatgtaatctcttgatgggacttgggactttaacatttagactgaaactaaagaaatttgacattacatctcacgttttctctttaggaaggagtttggctttctcagaattgccttaacagatgtttccaatttccctatgctgaatgagaaattaccgcatgtattgatacttcgtgaatatgtgctgagcagaaactgaaaggccttgtcagatcaaaagaacctttagcctctctatatctttagcttctgtatagtatcttggatattctgataaatgaaagagagtgctacttatagtttatgttcacccagatgaattttaaggaaactatatccaaattcatccaaatatcttcaagtgaaagcctcaagaacaaagtcaagcaatcttaaaatttaagagttctgtgttaaaaatattgtaagatctcctgacttgggaaattaatttttcttaaatctttcaaaaatagaatttagagaaaacacaagattctgaaagactttatgtgtagaaagcacattaggtacttctcaacttcagaaatgacagctgaaacattgggtcaaaatttgtcccactgaatctataagaaataaacataatcatgagttag

SEQ ID NO: 28750 - DNA, 2351 bp, Bovine  19866880864608
  misc_feature (1)..(1): n is a, c, g, or t
naggcgaggcgtaggcacgcccgccctcggccccggggccgggcctccatccacgcgccccgacccggtgggacctggggaaggggggacggcattcttgcttcctctagaggacattgctttgcgggctatctcttgttttcatttacttttaaaaaaaaattttctactttccccgttccgttttttctttcccccaacacatcctctttgccctttctctgcactgcggacgcccaaggtggacacgtctgtcagcagttagccagatttgcctcgagtgaccagagcccaccccctcgatccgccagccctcgaacccccagagccttgggttctacaactcgattccaggagtggggtccttccgctctgggcaggacagttgagggatttttttctcccaccacggattcaaagtcagagagcaaccacagttatgggcgctaccacagcgaggagccccaggaaaggctgggccaagcaccccacaaaccctctcgtttggtctcagaaagactttttaggaacctgagtcccttctttccatcggagccttacacttcgcttctgttaagaatttcctaaaggaaggcaagagatggggtagggaccatggagggaaaaaagagcgaacaggagacactgggattatatatttcatataaagaaacgatacatatgtaattttagattttcttctgaattagagtgctgaggctatagaaaacctatttttaacatccccttctcataacggccttgattgcttaaattgcttctaatcgggtggcacacgttagtggagacgaaggacgcatgacaagcagccctcattctttcacagatttagataatgtctctggatgagttcagatcagcgtaaaagtggggaaactcaaacacagttttcctaagggatttgtgcaatagggtagaaatgtcctgaccatcttatgatcatgcaaatagacggcatcttacagaatacatagcataagaagccagtgccaacgttttcctctaggtttggcgtggcacaaagagtaaacatacttaagaaaaaaaaaaaaaaaaaacagcaactcacttagccctctcctcttctttagcacctctttaaaaacatatgtatacctgagtttctccctccctccgccttcccattgcccaaagcttgggcggccctgagcgctcctggcgcttcgtgccagccccgacagcagccagcaaaggtcattaccgcgcgggcaggcgcgtttcagcttctcgggagagccagcgactgggagatacttggggagttcttggaccactcggacgtacatccccaacttgagtctgcagagggcctgggtccgaggtgaaggctgttctgtctaaggtgatctctggcgatactggtgggtagggcgcccaaaggagaatagacgtctgaaggtggtcacctgggcaaatctgacatggagacatgcatctcattatctcaccaaactgtggtttcactttttgccattgcccccaaacaaacaaaatgcataaagttatttgaggccagaggaaacgtgcctagaggaagtgtccctttcgctgtcaacttaaaaggcatccgattttcctcgcaattctttgcttctatggaaaggaaaccctagagtggcacagggaagcctccttagggaaccttaaattgcgtcacacagcaggattctgggtgaagtcagaagactctagagtgaggttgcttgtgggtcgttcaagggcaagtctacccaggtcatctgcctggagggtgggcgggagcagagtccctgccccagggggttgcctcctcctttcccgctgagctcacgcacaactttccttttccctttatgcatcaaaatgagaacccttccgttctggattatgctttaaaggcccactgctatacaactttatattggtcttcagagtgagtttattagtcctgcgagcaaagattagggcgctaagacattctcaacggtggcattccgatttggttcctgcaataggcatgtgcctaaaccctggccttggttgggtcatcaaatactgtccaaactccctggctgtctttagaaggttctcggttatgcaagtttcccctctactaactagttcctggatgggttggaggtacagcgtagagaaaacattcgggattggaggcactggcactcctaaagggtcaggaaaatccctcctgtttaggagatggcttttggaggcagtttaaaacctgagaggcaacatgaaagcttctcctttagaaaaaaaggtagatctggtggttcaaactccgtctttggcaggcaaaggagcaattt

SEQ ID NO: 28751 - DNA, 1840 bp, Bovine  19866880884818
  misc_feature (1)..(1): n is a, c, g, or t
natgaccttaattgaaaacaagcaatttagagaggtgatcaggtcattagggtgagccttaatccagtatgactggtatccttatacaaaggaataatttgaagatagcacacagaatgccatgtaagatgagtccgagatcagcggaagtccaggaatgccaatgattccaggaaaccacgggcatctagaagagaggcatggaacagatttgtccctcacaatcctcacagggactcagttctgcccacagcttgatgttgggcttctagctccggaactgtgaaatagtacatttctgttaaggcccttggtttgtagcactttgttatgtcagccctagaaaactaatgcaaaccccaaatatttctattttttagacatatgcctaaatatttctttttttgacctttctaattctaaagtactaattatttccctggtaaacttggagtattgcatttgtatcatattaagacaggaatttctcaaatatgttagcatttgtgatctctcaactaaatatgaggaactatttaaagagaaactacaaaattcaagtcagttctctgggcccttatcactaatttttttcaccttctgttatctctttgatttgcccaattaattatcattgcacactatttggctgtatcatcatgtatttgtgaagaaacattttgaatcaaactgtatcctgacattccatgatttatactcaatgcatttcttgaaagtagaattaaagcaaatactcactgaattttcccacactggccaccagtcctcagaaaaacaacttacatatcttatgaaattaagtccgttacatttcactaaacccattttctttccccccagaaagaaggcattttaatgccatacccatgaggtctcagaatctttctttactttctcctttctgcctagtgccctcacaactacgacaataggaagctaaaactggcctcgtattacatttaaaagtcaaacgcattttccaaatatttctctaatccatacacatctcttctttgtcaccaagatgtcttcctatttgttgcctgcctctccttgatggattagtttgcctccagggtttaccccagtgatagcctcggagattcctatgtagccaggccccaggctcgaagtcccatgctgccggggacaaagcccacctgctccctgcgtgtcctcagccttagcagagtgcctcttaccaagcagttagccctagcgtgtaacagcagtgtataaccctgtgtgccacatgtgtctatgcatttaatggatgaatgaagaaaaacacttgagttgaatgattttctttaaaaattcaaattttataatcatttagcacagacaattatcattttttggcatttgttatcccttttgctggaaggttaggaagttcaatgtattcaactttatagacacaaccgaaatctgtaataccagccagatctgcttttgagacttcattcctatcacctaatactgacctcattattgacactcagtgttcaaataaaatatcagcagcctgaactttcttagtgaatttaaacttgaacacgccaggagctgcaaggtcaaggattctccttctgttactgcaggcagcctgacagcctgacttactattaagtaacctgagacatgagaaagaggtctgggggttttttagtggcaattctactagtttgtgccttgggtgttttcacatattggtgagggctgaccaagcagatagcattcacctagataagtgatcacagggggggggttctaacatatacatgcacaggattccctgtaagtgcgtgcttgcgtg

SEQ ID NO: 28752 - DNA, 896 bp, Bovine  19866880955927
  misc_feature (1)..(1): n is a, c, g, or t
ngggtctcgttcatttaataaaaaacatttaacctgagtatctacccttctgcaaaaaattcttattttccctcttggattcttctcttttccttttttattgggcccagtaataagttcaattctggattttggagccctatgatcaggactatagtcatcttttcgtgcatataacccaaagggtttaatttatttttttaaccctcatacttacatcaagaagaactgatagctatttcagatgtgctagtgtttagcatttatgaaaggaaagtcactcaatgttaagttaattgtagaaatacggtatagaatgtgccacaattaagatatatgactatcacttatccttttatttaacaaatacttgctgattattgctcccaccccctaaataagtcacaaatctttaaaaacagttttagataatccttgtagtcaacacaaggaccaaattaacacgacctagcagaaaggattttttccttatgtaccaacaaatctgaggatggataatccaggatatggagaggtgaagagatcaaggagtctctttatctttttctttttctcttcctttttccctccttgaattccttccttcctgttagaacacttaacaggagatctaccctcataactagagaaaatctgctgtacaactgagtctgtctcttaaaagaaattctgggaagctccagctaccaatttcaccttctccttggtcaaaatctgttacatggttactctaggagcaaggaaatctgtgctgtggtttggattgtaaaaactggaagaaaaagaaaaatatcatcatagagacagaaagaggtctttttagaacattaagacttttacttttccagcctccatcgtaaagaaaagcaaggcag

SEQ ID NO: 28753 - DNA, 1302 bp, Bovine  19866880998197
  misc_feature (1)..(1): n is a, c, g, or t
ncacaaagggttcatctgaattttctggagcttcaagaacttttttcttctggcccacataactgaaagtcaatcattcatttcttttctagttgatttagccactggggaaatatgtgttgttttacctcagtgatttcatatgcaaaatgggaataattataattttcccttggcttactggaaggttaaggagattaaatttttttattaaaaaaatacatgtacttcatgagtgaaatatgctttgagtagcaattattgtttggactattatcatcagtaaggatttaaatatcttctttgtcaaaaaggatcctaaaagtaggaattcaagctaataaattaaaacagacttgaggggatatgaacttgaatgtctgtcagtgacaatttgatgcagtgagtaatccaatttccttcaggaaatatgtaactgtggcaggggtgagaaggaggtatgaggatggaagactaacaaacggagtatatagatattcattaattccttcaggaaacagtgggaggaaaaggaggggttggaagacatatttaccgagaagagagagaggaactgtaaaaggataaaataagaagaaagccctgagcattcagaatcactctgagaaattggcaaaactcacaacgtacagacttggatgttcaggaaatgtcaactgactgacagacacaaaggagattcaaggagaaatcaagaggttgggggagaaataaaaaataaccactcaaattattccataattagagctaaagttttcttaggagggaaaaaattggtggaagaaggagaaagctgggagaaaccacttaattgtccctgattctatattcctaagtaaagctaaagaagggagataaggggttcccaggggctggtgtgctgtccagggtgatggactgtaaagcttgggctcttctgtctggaaaggaaaaggcaggcaggcccatgatggaagtcattaattccatatatcctctgttgagaaagtacaagcttagcctttgagctccacagtactaactgaagggaattcattccccttgaggcctggaagaagagggaaggacacatttagcaagcataataatccaacagatggcaataactaataggtacacagagttaaagggataagttgaattcagatgtaaaattttttgtgcctcatacacttttatttcttacagtgagatgaattatttattaaaattggtataaactattgggttattttaatttaagcttcttattatcaaataaaatataaatccagaaaaatt

SEQ ID NO: 28754 - DNA, 1294 bp, Bovine  19866881196870
  misc_feature (1)..(1): n is a, c, g, or t
nttccttttaaaacttaatctcttcctttttcgtgaatgttaataagaaaatttctggtcatattatagtgtttttactgctactaggtaatttccaaaattatagaatgtcaaaatagcaaaggtgtcatatagatgaaccctaacacttgagatattttgatatctagtcatctctgattttttctatgatatgtgatcaaattatcaaatagaacaaacattaataaccacttgagtttaaattttaattctggacttataaaaagttataagtttgtcatattttgacaaattccaagagagaaaacctcaaatgcaaaataaccttgctggaccaaataagtaattctaaccatcaaaggggaggataaaaaggttgcaaacatggtacttagattcactgaaataactctaaattttaaaataattccacagaataataaaaatatccttttagccagcaaaaacaaggctgaaaaaggaaaatgtatactttttttggaagtttctattctgcacattaattaagatattctgacaaaaatacaacatatcaatggggcaaactgttggtagtaaatagtgtctagatattaataagcaagtatgttgataattccctagagcagttaacagtttttaaaaataattttacatatgaaaaataatttgaaggactccaaagacaaaattctaatgtaaatactagatgtagaattaatattgttaattattcagtcttccacagccaaaccacattacttctatgatgaaaaaaaatttaggagaattgacagtgctttacccactaccatttagactcttcacaggcaatggattaaactggggtaaagttgtggaatagcagaaatgtgtcccctcaagcacacaaattcccatcaagtttatgtatcatcttttaaaaagcttttgctatttaacaagatttagtgtcttacttttaatctcatattgcagtcgccgaaaaaaaagaaaaggaagggagggaggaaggaaagaagatctggcactttccaccatgttgcacttttctcatgggttcacaatatgggacatcacttccaccagtaagtaaacaagattctcaaagagcacttgggagacatactaacttacagtattgttagcggcagagggttttaaataagcaaatggtttgtggttttaatacaacatatcctagcaaaagaaaagaaagttagactaatggctgcttctatgtattcattcagcaattttagaggaatttaaagttgcataactctttttc

SEQ ID NO: 28755 - DNA, 726 bp, Bovine  19866881207056
  misc_feature (1)..(1): n is a, c, g, or t
ntgttttcaagttcatctgcactaaacttagtaaacgctcagttcttggagatgtagatcttctggcggccaaggaacttgaacgtggccccacagagggcctcaatcacaggctccttgttctgcagctcagtggggatggacattatgacttggccaatgtggaccctggccagtgtgccccagggctttccaagggcaccacgcatacctgtctggagcttagactggggatagcatgccagtcatcaaagtccactggaaagagttgtatccaaggtcccttagggcaacctgtacaggcaacaggctgcatacactaccgaggaggctgctgtttgcagccactgcacactgggcccccacggggaaaagagcacagtcggcttaattggctgcaaaagtttttttttttcaagtgaggaaactatatacaatgttgtatgtgaactataccacaataaagttgggggtggggcagggaatgaggaaactcttctagactaaaagaatctaaagaggcataatcaccaaataccacatataaaattgctccttatttaagatgaaaaaggcaggtataaaagatatccttaagctaactgaggcagtgataatatggaccagctgctaaattctacagtggaatcactgttaactttttcagggatgataatggtattgcagctacacagaaaaaaatgtttctattcttaggagatacat

SEQ ID NO: 28756 - DNA, 1352 bp, Bovine  19866881306291
  misc_feature (1)..(1): n is a, c, g, or t
ngcaagaatactggagtgggttgccatttctttctccaggggaacttcccaacccagggattgatcctacgtctcctatagctcctactttggcaggcagattctttaccactgagccacctgtaaccttgtacagacagagtaactacctcagttcaaaaactttacactctcgtttgtagagtgctgctagggttacacaagcatgttatccaacatgagcaattaaagctgactcacacagaaagtggcaacggaaatgagtggggaggttcattgtagttttttacttctactgttaacataaaacaccatactgacaattgagatatcagtatttttcaatagcccattttacttggcaggcaccccaaagagttccatccatctgcctgggactcggaggtgatacttttcataagattaaagttggtgctagtcacttcagatacttctgagtgagtgagaggtaaatcgcccgcaccaataacaacctcaaaaagtccccgtggcacctgtcactgtgagattgcgttttcagttcgcgcaagcttctgctgcttccttattccttcacctgcttagtttctacttcactgtgcttggaaaacaacgaacacatgtgcggcccacaggtgccaagacgaattacccacagtgtctgcaaaaccagaccctgggctgggatcttgaaattcaggagctcggtgttttggagcgcaaaggcctgggaaccacatctgggttccatgactaagtgtgtgatgttgagcgactcagttgtcttcactgattttcagtgttcctttttctaaaggaaagggtaagaaggggtcttgacagctcttttttagtttaacatctgatgattctgtattgatatctagcattaaaaatattgtttaataatctaagactttaaaggagaacccagtctggcagaaagttttaacaagagtagacagcacaaactctcatcaagtcattcactgtattaaggaattaatcatagacctacaattagacagatattatgtctctgatttgctggttaactcattgactctgctatatattgaccttcagaaagctaaagaatgatagatatcgacctagccattaagtaattgatctgcaaacatacctgcattaatattttattgattgcatttcattttaattgtagtgtggttaaaattccaatgagataactatcttcctttaatgtgaaaaaccccagagaacagtagctctgaaacatttatcataaaaataaacataggctattacccaacaattatgtttaaagatgtcctgtgaggactagactaatataggccttcatgtaaaac

SEQ ID NO: 28757 - DNA, 1291 bp, Bovine  19866881312042
  misc_feature (1)..(1): n is a, c, g, or t
ngggccttatgcttatgataatttattgatacattcactctactagaaaaatagaagcagaatgacaataaaggagtttgtgtgtgtgtgtgtgtgtgcgtgcgtgtgcatgcatgcacaagatgggggaagggcgtggagtctggcagtgagtagacggtacagaaatgaaacaatgcccacgtacagttttatttcatggcaacaacatagtgggccttgggtcagatgtgtgaaactatttctcaaagaagctgcatacataattgaggccctcgaagggttcccagttgaagttgccaggctacattcatttcaaaagcagagccatttgttatcaaatttaaattaactctctgcacactgaacttgaattttagagccctgcttacttacagttcttgaaatagtagagaaaggagaaaacctgcatctggagaatggaaataagatagtccccacaaggaactgcagtgattcctgcctaggcctgcagtgtagcagtaatttagattaaagtgagaaagatctatttggagtgactagaaacaaacctgaatcttcccctgtgatttttgtagatccagacttaatgcaaaatcattttatttgtacatctatatttcaactacattttatcttcatcaagcattctagctccatcccctctcccagttaattactctttgctgtgaaatttagagtaagacaatttataaacttgtacaatagttgtactatattaatatgtcagtatcagtatttttgctgtcttggaatacagatttccccccctaatctgcattgctttatcctctattttaaaccaggtttatgaaactcactagatcattttttggtaactgccaattgttgatccatccattcactcaaaatggaatatgtaaaatgtcttgtgttaggacctttctacaactacacagaggagaaactttcctccaaaagagtggtgtgcatgttttttcataggatgcatgcagacataactgcacacagttctgtgtctggcagaagtatttaaaattgaagctatcttgattatcagaattttttcatcacatgtaagttggaaaagttaattgaaggacagacttttattcttaagtttgatccacagagctaaatagtccattctgagtaatctatgtatttttcttctcttttgaaaaacaaattcaaaggttttaatcaccattcctttatccttataagatattgatttgctataatcaggtgaacctgttttcattcttgtaagaaattttaacat

SEQ ID NO: 28758 - DNA, 801 bp, Bovine  19866881376677
  misc_feature (1)..(1): n is a, c, g, or t
ntcatatgacctataaatggcagatgcaaaagttaacccttgttgattaactgctattgatattataaaatgagaacttccagaataagttggctctaatatatataaatatgtacatcagaaggccatgcatcagttcttcacagagcatcagatcagagaattggaggaatatatctgttcttaggtcagaataggaaaaggtgaacaaagtggaataaattataccaaaaaataacaatggtgagtattatcaaagagaccaattaaaagaaatggagagggcttccttactggtccagcggttaagaatttgcctgcgaatgcagggcacatgggtccaatccctggttcagaaagattccacgtgctgtggagcaaataatcccatgcacaactactgagcccatgttccggcaactactgaagcttgtgtgcctggagcctgtgctccacagcaagagaagccgctgcagggagaagcccatgcatggcaatgaaaagcgcctccagctcactgcagctagagaaagcccacgcgcagcaacagagacccagcacggccaaaaaaaaggagaaatggagaacagcaaataatacacaatcaggcaataaggcaatacataaaataaaatttgaaataaataataaaattgataaaaagaattttaaaagcaataaatatgacattgttcttaaatgtttctcctttgtttcctctgtcctaccaagccatctagaagtaggatgaccacatatgttgtcaaattgggatattttgaaaataaaggaggccctatt

SEQ ID NO: 28759 - DNA, 1932 bp, Bovine  19866881378846
  misc_feature (1)..(1): n is a, c, g, or t
ncttatattgggcttcccttgtgacttagctggtaaagaatctacctgcaatgcaggagacctgggttcgatgcctgggttgggaagatcccctggagaaggctacccactccagtatgctggcctggagaattccatggactgtatagtccatggggtcacaaagagctggacatgattgagagactttttcacttttcactttcagcatcttatatttactcaagattgcttaacaagaaacaatgacaaatttaagtgtcttaaaataataaaaaattatttctcactcaagcaagagtccaagatagatatttctgcttaggcggttcttttcgcagcagcaatgtaagaattcaggctcctttgattttataggtttgccctcctctgagtcctcgaactccttaccctttagtcaaaagaaggacaaagcaaatggaaaaatcatggtgggaaggttttacggtcagtcctggaagtgatgtgtatcacttctgcccacataccattagcccaaattcagtcactcagctacaccaaaatgcaagatacaaccagtcaggaactgtcacatctcatgtttgtatcatacagcttttagaggactgtcctatacttcactacatagtatggcttcgtggaagggaataaaagcacagtggttaaatgtacgaactccagagttaaaaccacttgggtttgtttcctggcttcgctatttatagtgctactgtcacctaggataagttaattcatctctatctcatctgtaaaatggtgataataacaaagtctaacccatacgatgatggttaggaagattaaatgagtttaataaacataaagtatttaaatagtgcctggcatgtgcctggcaggtagtaaattcccagtaaagattagtcgttattatcagattagaactatcactttagggctggaggaatttaatggtaaagtggatattaaataacgtgaaatgcagaaaggtggtagcaaaggccagagaagaaaaagccatcaatttgtccattaagctatttgaataactgcagaaatttctgctgttttacagttgttcagcaccagctaaacaggaggtgatccccaactcacagcaattttcagttaatatgcttagaactgtaaaacaaataacctccaagcaaatcagatagcattgtagtcaagttaaatcctagaaggttcagatgggggttttattccaaaggtctcatactgaggtaagtaaaccatgccttagagaaacagtgcttatcaatttgagattcattttctatccttccttctctcagaacaaaatcttttcgtaggtcacaactggaggacctgagtcagttcattcgcctgtgactgtacttagtttagttcagttcagttgctcagatgtgtccgactctttgcaatcccatggactgcagcacgcctatacataacatgcacattacttaacatgtacttattatgacttaacatgtgcttatcatgactgtacttaacatgtacattaatgtcagcaggtatatcacctatgggtgtttctttattttggaaggctgtcttccttctgcagcttctatgctccctccccaccccatttaaaaatctttccaatttgtcactcttgtggtttattggtaaacgttcaaatatcttttttataaaacattctattttaaaattacaccttttgctatgacataattgtagattcacgtacagttggaagtaatgatacagacatccagtacaccatttcagtttagttcagttcagtcgctcagtcatgtccgactctttgcgaccccatgaatcacagcacgccaggcctccctgtccatcaccaactcctggagttcacccagactcacgtccatcgagtcagtgatgccatccagccatctcatc

SEQ ID NO: 28760 - DNA, 1851 bp, Bovine  19866881410387
  misc_feature (1)..(1): n is a, c, g, or t
naaatagtgaattaaaatcatgaatttttagcagacccatgtagcagtatgttagaaacaaattctttgcttaactgtttaaattcttcttaaagagacagtgaaacagaaatagctatcctggtttttttaatttaataatgctagtaaagaggactttgtagaaaggaagactatttcttattaggctagttgagaggttagtatcaaacaatctaagattatacattttgaggggggaagaataaatacttactgattttgcatacattaggtcaacttatgtaagatttgaatagaaaaagatcatggcaaaaccatgggtgtatgaaagctattattaatgtatataatgtgtataaggtctataccaagaaactctgtcactatggctgggtctaggctctttagatgttcagaaatcattatgaactgagatgtacagaaagggatagactttctatgatctctcagtttgtctccagcaaatgttatttgacgtatttgatgacaggctgcagtatattatggccaataacatacaatacttgtagtggtgctagtatttattccatcttaatgagactgcctttttaccacatgcagacttggtctgactgtctatttcctcagatggctttgccaccttaagtggaaagatcagttagtcagaatgtagagccataatgaaaactaaagtaaaatgttgaaagggataaataaaaagcaacaacaattctcttgaataattttaccccttttagaggataagaatacttttttataattttattttattcatttcttccatgtaattttagtttatataaaacatctttgagaaacttctatgcagcatataaatatctacatctttacttcatttacatcatagaaagattttctatgcatcaaataagctggaccacatttcccctcccttgcctagaccgtgtattgtgagtgaatcacgtaagtagtttatgtagttcagggatctttttttaatatatataaactattggtttgctcatgtccactactagcaaaaaaggttttacgggcaaaattgtaattccctttgaccttctctgattgtgcttggcacatgacagtattgttgtccggtatctcatttacaaataatataatcaagtgcatcatgggtcttctaaaacgctgatgatgtatctgtactgtgagctgctctaataatggataagcttcgttattctacgctccaaacacactcatcacaggaagattctgcagtatgtcttgtgtatgtgtacttgcattttgcatctgaacatgtatataagaatttatgagctttgattgacagttgggcccaaattaggcctttaattatactgactcttttttaaaaaaatcagggacctaccaggatagggaaaagtaattgtgatgctgaggatgcccacgcatcctcagaatgaagaaaagaaataggatttgggaaacccctctttaaccactctgttaagttgaaatgtatttagtttctactccacgcccctcaaaaaaggatgaaatgtgagactgcagaacactctctagacaaggaatacaagaactgcttctaatgttttggggcttgggggattttttttgcttgcttgctttcttccttcctttctccctccttctttcccatctttccttccttttcccttctgtcctctggtttgtatttgttttgagagtccgatatctgaattggaggttaaaaaacatccactgaagggaccactgcatctgtaccacagtctaaaacattaatacattttgagctgagtctgtgacaaatcagcattattcacatttcaa

SEQ ID NO: 28761 - DNA, 1574 bp, Bovine  19866881614914
  misc_feature (1)..(1): n is a, c, g, or t
ntttgtttttttttttaatttcagaaaagaaggcttttcaaaaaataaccattacttctataagaaataaattgagaaaacaaaataaatggaatcataccaaaaaaaaataacattaatctcctaagtgataaaagaacactaaaaattttgaaaaaattagatttcagtgattttaacaaactgttcaatcaaccgtccatcactgtaacaaatggactatcatgatgcggatgctgaaagtctgggaggtcgtgcacgtgccaggacaggagatatggaactctctactctgatccatcttgctgcaaacctaaaagtgctctaaaaacatgaggttttaagaaaaatcaaatcaaatgtattcatagagaaacagtgtaagtaatgtcaaaataactggaaaagacatttgtaactcatatcataaagggataatttattgttgcttagactctttcgcaactccctggactgtagtgcaccaggatcctctgtccatgggatttcccaggccagaatatcagagtgggttgccatttcctccccaggggactttcccgacccagagatcaaactagtgtgtcctgcagtggcaggcggattctttaccactgagctacttgggaagcccaaaggtattatttacttgttaggtattatatagagttcttacaagtcaattactaaaggaacaaatgccttctttcgtatgtacacagagttctttaaaaaagggagcaaaatggctcttaaacaggactgtttttaaaatgcctttgaaacctgcctcaattctggtttcaatgtggatattttaatgccttaaattctaccaattgggttaaggttcagaccatttttatattctcctaacatcaaaggttacatttttgtctttttttctttcatatttcctatcacttgcttttactatcttattttctatatagtttgtgatagaagttctgcaatctccatacagtgaatgccattacaaagaacgctttcaggcagaacaaggccaagaaacatattagcaagtgtgtcagaaggttagtctatttgagattacagacgtaaaagcaaaagataatttttttagtcggaatcagggaaagttttgtggacaaagtgaacctccatctagccttgaaagaaatctgatagtatcagagaatcttcaaggtcatctagtacaatctctcacaaacatatgtaacaatttattagagtgtaagctccttaatggagaaggcaatggcaatccactccagtactcttgcctggagaatcccagggacggcagagcctggtgggctgccatctgtggggtcgcacagagtcagacacgactgaagcaacttagcagcagcagcagcaagctccttaatagcagaaaccgtatcttagtcatatctaataaatgttacaggtattaaatggcatttcagaaagactgatctgcaagatatgtgtgtgtgtgtgtgtgtgtgtgtgtgtgtgtatatgatggactgtgatgaactggggaaaaaagtcatcttatcaaattctctcctcttattccaaat

SEQ ID NO: 28762 - DNA, 1847 bp, Bovine  19866881627833
  misc_feature (1)..(1): n is a, c, g, or t
nctgggatccacataagaaaatagaaatcatacaggcttttagattagactaacccaaacttcagcttataagttggcataggacaaattgcctttctgaacttcaacttcctcagtgatgaaatgtagttgatattaactcttatattacagtgtgccgtgcttagtcactcagtcatgtccatctctttgcaactccatggacttgtagcctgccaggcttctctgtccatggggattctccaggcaagaatactggagtgggttactgtgccctctaggagatcttcccaacccagagattgaacccaggtctacagcattgaaggcagattctttattgactgagccaccagggaggctcatattacagtgtgatggtgaggatataattagatgacacactgaaatgtttaacattgtatcagatattagcataatttcattaatatgaaaaaatttttcattaatatgtaaaattagggttagggttaggattagggttagggtgccagagcaatatgaactcattgaaactcacatattttggctcgtttttaagaccatagaaaacatataccattcctagaatgcaaagatatgatgttacgtgacatcatttaacagtagcagagacattttctgagttattctaaaaaagaagctccaaatttgacccaaaccacacagaaattctctgataggcaaataattaatgattaaaaaattcaccgtgactttacgtggccacaaggcaaaagatgatcaaataatgacaacagaaaaatggtattgggtgaataatttcactacagaagattttttcaaggcgtttggctttctagagaaaaagtgacctattagataccagtcaatgattgtcgtatttcaagtcagtcaaaaatgtatttatagtgccagaaattatgcttagaaaatattaaacatttcatagtgagtcactcatgttttccttggtatatatttacattagtaaattgattacatggaatacacacatatttgataaaagtgtttcacagaatgaatgattcagtgaaacattcctattaatttgacacttcacatttaacccgtgttttttattctagaccaaaagaaagagggtaataaaatattcattaactgcatggaagcccatttattgaagatagtctctggagggtaaatttcaaaacatttgctagagagtgctgtgcaaaatatgcagttgtcctgacatagcaactagtgtgaagaacagcaaatgcaatagtcattattagtaaaggagaagatcatccattgtgaatcacagtgcagctaccttttatatttagactaagaaaagtatgagtcactttagccattgcttaaaatttggcgggattttatagagaggttaaaaaaagcacaaagtatgtgcacagtctcatcaagaattatggtaattccttaaaagtcttgataagactcctctcaacattctttaaattcttagacagttataatatttgggaacatacaatcttggtaagcacctacaggtattgtagggttgaagggaaaaaggaaggaggaaaattatgtataaatagacacattcatggctaaatagatggatagctagataatttaaaatatcagaagcaaaaaaatgttaaaaattctaatcagtctataaaacaaagcattattgtgctctgaatctcttagaaccaattggtaagtagatgtcttaggatacagtcaacattttgtggtttgcccaattgcctatttgttgaagaatagaacaattacccagatttttcaaactctgtgtatgttgctggcctccattatta

SEQ ID NO: 28763 - DNA, 817 bp, Bovine  19866880360725
  misc_feature (1)..(1): n is a, c, g, or t
nccctcaatacttgacctaccagagtacccaaaccgcctggccttctaaacccagcctcagccatgtattcaacatcatacccactcttaaacatgtcaggcccatctgacgttgctagtctccttaccacttgcacttccagccacccttgggcacggtgagcagtggggggtccaggcagtacgtgtggtagctaatgtcacagtcatcacagagcaggaggcgggaggggtctgaggcctggccacacacctcgcacacgatgcactccacacaacgccagcccttcagcagcatcaccttggtgatctggtgcaggagatggcaattcctcagggggtgatgcagagggcagggcagacctctccaggggtgctgggacttatacaggtggggctggaggacccccccatacccaggccagaccttcatttgagcacagggaagatacacggagcaccctcacccctaaaatagtggctcttaaacttaggcttccagggatctccgctgatcaaagaacagcctcacccagccactgcctggttaagatctttcactacccaggttgtatttcccccagcttttcttgaacatactgctccaagtcagtgaatgttagcagtggacaagttctaaatgttaatgaaaaccccaaaatgactgatcatgcttgagtcaaaaactgctttctctttgtgaacatgtgtttggtgctgattttatattttatatccagaccatgttttctactagaaaagttctcacaatttatacaatgtactcaattatactaggaagtcagacctatcacaa

SEQ ID NO: 28764 - DNA, 1311 bp, Bovine  19866880418845
  misc_feature (1)..(1): n is a, c, g, or t
ngcaatggcaccccactccagtactcttgcctggaaaatcccatggatggaggagcctggagggctgcagtccatggggtcgcgaagagtcagacacgactgaagcgacttagcagcagcagcaaaatcactgcagatggtgattgcagccatgaaattaaaagacgcttactccttggaaggaaagttatgaccaacctagatagcatattcaaaagcagagacgttactttgccaacaaaggtccatctagtcaaggctatggtttttccagtggtcatgtatggatgggagagttggactgtgaagaaagctgagcgctgaagaattgatgcttttgaactgtggtgttggagaagactcttgagagtcccttggactgcaaggagatccaaccagtccattctaaaggagaccagtcctgggtgttcattggaaggactgatgctgaagctgaaactccagtactttggccacctcatgcgaagagttgacttattggaaaagactctgatgctgggaggaattgggggcaggaggagaaggggacgacagagaatgagatggctggatggcatcaccaactcaatggatgttagtttgagtgaactccaggagttggtgatggacagggaggcctggagtgctgagattcatggggtcacaaagagtcggacacaactgagcggctgaactgaactgatgggctggattgtatcccactctaaaattcatatgttgaggtcctaacctccagtagctcagaaggtgatttttcttagagatagggtctctaaggagggttaaagcggaggtcattagggtgggccctcatcccctgggattcttataaaagggggagacttggacatatctaaattgtgggaacacgtgcaaagttctcttgcagagtttggcattacaagagaaggaagtatggggacttccctggaggttcagcagttaagattctgtgctttcactgttgggggcgcagagtcgatctctggctgggaagttggggaactaagatcccgcatgtctcatagcacagccaaaaaaaaagaggacaataataacaagagaaggaagtatgggcaaacacagaaatctgtttccttttataaggaccgaagtacacataggagactttctttggtaacattcacttctggtccttctgggcgtctttaatggccagtggaacacgacatggtggcggggaaccctgcttccattcacaatgcttcaggaaacaggttgctcatatgaactcaatgatgaacacctgaaatgactcatttatgtaat

SEQ ID NO: 28765 - DNA, 1507 bp, Bovine  19866880437575
  misc_feature (1)..(1): n is a, c, g, or t
naccctgtcccgatggggatgaagacaggtgtgtaagacaagagtgaggttgatagcagatccactgttacctacagtcccctggacactccggtagtgggtagagtcccaaaaggaggggccacgagagtaaatttagggatggagagagaagcagatgccccggtagctgtcatcttcattagaaccatctcccaggaaagagcaccttaaggtcttattgtgtcacatttaatgccccctttctgcccctctggaaggacagaagagacagagaataaaagaggctatgagaaatactgagcaactgggagagggcacaaagcgagaagacagtgtctgggaacttccgatacagaagaatccaacatataaccaagccccaaatggtgctggactcaggagtgggagctgtgaaagtacactgcctcccccaatagtgggccacaggggctccaagaaagttgttcgccaaatccctgcgggaggtagatgctgagcagggctggactgcaccattcacagggtggtgagagactaaaggcagaccaagacagtcttaagatgagacccccttctctttttcttgttaaggaacacgaacaagtgacctaagtgggaagccagttggtttgggtggtcttcctctctctcccaggcacagtgtttcctaccacagatctcacccaaccctgtcagacttttggttttctaactcccctgaagcccaggaagaaaagggatgagcaaatatcagattcaccctcctgggtgtgagactctgggagaggacaaggactgagacccagaagctgtccaagagcacccctctatctcacattcctcatccccgccaccggccccaatctctgggaggaggcagagaggggaggaaagggtagggaggcaatcaaaattcaaaggaataacttttctctggagttcaaatgggtggatctttgaggaagtttcctcaagagaagggctgctcctcgggtctctaacctcaaatcttagtgcccctttgaaggagactgactggaagagtggtaaatgtggctccaacccacacactggccacccggaccaccctcatccttttgctaaggagagtatctggccttagactagtgactctgaggagacttgctccccacgccaaccccggtgtggccaggctccctccttcagtcccagccacaaccgtccccctatctccactctctggcttctttccccctccctttaggttctcctaaagcagcccctccctacgccagttcccacgatgccttggcaatgcctggcacagtccttggcaaggaagtgaggaagggaacccccatcctggccagactaggatgaaatctgcccgcgcaacaggtgtagtagggtggccgggccccaatccgcccgggttgggcaaccaccgaggccctttgctgcgagagagtcccagcactaaaggggccgagcgtctggcgtgagggggttgggaggcggggga

SEQ ID NO: 28766 - DNA, 958 bp, Bovine  19866880482522
  misc_feature (1)..(1): n is a, c, g, or t
ntaatagctatgatgcaatgactccttagaaaaggatgaattctcaaatcacatacttgcttagatgtaacactaggataattcagtattttcttacatgataacaccccataaaagccaggagacttaggttcactaccttgtaacctcagtaactaaagacatatttaaatgtctatactgaactatttcaattaaccagcaagccttcttcagaaaaaagagattctttttgatgggaacaaatgcaaatttaagtctgaactgaggaactcacttaacaattagaatttaatttagatttagagatcatttaatttggtgctttgacacaacttgactggtgcttctttccttgctgtcacttcaagccatggggccaattctgttctcagtaaatgtttgacagctttttacttaacagtctcagcacttttattaagcatgcaagactaacaaaactttggcaatgcataagtgtaacacagtgacgagagagagcttttacaattaagtcttctaatactgccttcacagtgtggaaattgtgctacatccaccaaaagagggccccgtctactcaaatattttagtacttcaccccaggaacaaactcctttgcatttggattcagattgctcttgacctggaaaataagtaaaaaagcaaattcattagcagatatctccagatactcagaagcattcaacccagatccacatgcaaaaccatcttccaaaaaaagacaaaggcaagaattcagatggtaaggtcaaactgaattaaaacacatctatagcagtgaaagaaggaaccagatgtaagctatgtatattatatcaaattttatcaatttcctaaacagaaggtaggacttgaaattaaatttgcttaagtgtaaccggaaactcactaactgcacatccaccaaaggaatgtctcagaacacagaattcta

SEQ ID NO: 28767 - DNA, 1197 bp, Bovine  19866880498942
  misc_feature (1)..(1): n is a, c, g, or t
ngatccctgagtagacgtgggccctccctccaccccctctacaggtggttagactcacacccctgcgccacctggtggcaagcagcggagatgcacgcctgaaacctcgccgatgacagtacccgcggggctcgggctgtgcaggcctaagcgcgctgcgctccctggcgcccccttctgttcattcaagtgtttcttctcttttctgcgctccaactgtgtggcccgcgtggaatctgcgcggtgaactcggcatcttgccctgggcgacaggagctgagagacctgcagctgagcgtggagagccagcaagtgcagcacgtcgaggtggaggcgaccgtgaagcccgagctgacagcggcgctgagggacatccgagcccagtacgagagcatcgcggcgaagaatctgcaggaggcagaagagtggtacaaatccaaggtgcgggggtacggtgggggggcgcgggggtgggagggtttgggagggcctggaagggtggggcgctggggggaagggccccatctggcccgctcacgcccgagttgccaccctcgccgcagtacgcggacctgtccgacgccgccaaccggaaccacgaggccctgcgccaggccaagcaggagatgaatgagtcccgacgccagatccagagcctgacgtgcgaggtggacgggcttcgcggcacggtgaggaccaggctgcgcgccccggccccgggggtggaggacgaaggctgggctccccctattgaccccccctcttcacccacctccccagaacgaggcgctgctcagacagctgcgggagctggaggagcagtttgccctggaggccggcgggtaccaggcgggcgccgcgcggacttgaggaggagctacggcagctcaaagaggagatggcgcgacacctgcgagagtaccaggagcttcttaacgtcaagatggccctggacatcgagatcgccacctaccggaagctgctggagggcgaggagagccggtgaggggagggtggggcgtggtcgggatgggtgggggtggagcagaggcgggtggaaggccaaggtcccccccaaccccacgccgagtagctgactacaggttttgtccccaggatttccgtgccagtccattcctttgcatccttgagtataaagacgactggtgagtcttccgcgtttgagttccaacctgt

SEQ ID NO: 28768 - DNA, 1978 bp, Bovine  19866880513106
  misc_feature (1)..(1): n is a, c, g, or t
ntgctcctggagttggagactctggtgagatcctgggtccccagtgcccaccaccaagcctggcacagaaaggtcaagaactggtactgatcaggaccccccccccccccgcctgaccactgcctggacacctcagggaagctgcaggtgggtgcggtgccctcacacaggggagcatccaggcccagagagtaattgagctgctgcaggtggcaggcggtaatgtcagcaggggttaaattcagcatccgggctgcgcaagttcgtaagggggtgtggttacaggtgaactgcaaaaacaggaggagaggaggtatatattagggtaactgaggaggggaggggttaccagggccatgcccaagtaccttatatgccaggggcccaagttctcactgagggataacaagaggcaaagggagcaagccaggaggacaggggttaacctcactcctgctttggggaggaaatgtgtctcgttcctctttgtagccccagcacccagaacagtgcttggcacagaggaggagcaggagaattctccctggacctttaccatgctggcaacggcggaggtgaacacaagcaggacagaaaagatgccaactgcggtgctatgtgccctcgagcggacgatactgcgagatacacgttgcagggcctcagggaacagctgtcaggaggcaggagacagagacagaccacgtcacccaacggttaaggccacctagggccagcccagtggcagaggcctcaccttctcctccctccccactcccagtctggcctccccgaccagccctggaaggtcccccacgtacagaaccacaggagtacacggcacaagtcagcacggtgaccagtaacagcaggaagatactggcgtggatcccaagcatcagagctgagctgggcgggagagggccagggaagatgttactctgggagatctgggggtcctttcccactccctgggcaggcagggggcaggccccaggactgtgtgcttgcaaaggtgttttagaagggcctgggaagtggtagagggaagagaagcccagcaaggaggggcagagctctcaccgtgggaagacaacaagctggatgaagcagatgaagcagaagaccagcagggcacaggccacgtaggctccaaagcgggggtccaccttgcgtgagtactgagggagaggagactgagctgggcactgccactgccctcggaaggccgcgtgttgccagttggcccagctgaggtgaatccccacagtgccctgtggtcaccccccccgctccccagaaacttctcctgttccctcacttgtgctcagaccaccctgccgggacctcctcctcctgcccttgcatcccccaaaccttcttttcaagatcctctctctggaaggtgagcaggaaccggcgcacatggtccttgcgcagctgatcaatgctgcgggcatcaatggcccggcccaggaactcgtctacctcatcctcagggttcagggcatcctgagcaccccggctgagggcagaggacatggcttcaccaggcgcctgaccacggccacgtgacaggtgatgagaagggaggggtacgggcagcactcagaggagaagtgtgagcggggcaggtgccacccagtcccacgcgacatgtctgaagtccagggaagaggggtatctcagctccccaccttcctcaccccaggctgcaagtgccttcccccacccgccctcctcaacaacttgacttacttgtctttgctggaatcatcgatgccctggagaaagggacagagtgtgaatgaggtgacgggcaggccaccttcacctctacagtcccttccttccccaccatcaacactgtgctgagggctttccccagagactctggggagcctgggacccctgggatgaaaccagccttcccattcccaattccagaaactgcagagacaacagcctcaacaaggga

SEQ ID NO: 28769 - DNA, 861 bp, Bovine  19866880598607
  misc_feature (1)..(1): n is a, c, g, or t
ncgggggcttctttagcccggaacccggtgagccagacagcccctggtacaggctcggggggcaccacgccctccacccccaccacccccaccacggagggtgagggcgacgggctctcctataatcagcggagtcttcagcgctgggagaaggacgaggagttgggccagctctccaccatctcacctgtgctgtacgccaatattaacttccccagtctcaagcaggattacccaggtacctgtgggacagagcaagggagacagcctgcgacacgaccagtgcaggggtcacctgccagttcttctctcacacgtcgtctctgtcctccagattggtcaagccgctgcaaacaaatcatgaagctgtggagaaaagttccagctgctgataaagccccctacctggtgagacagaaggagcctggagtggcgtgggaaatgagtcataggcagcgtgtcttcgggaaagtcaccttcattccttctacttcccactttcatggcagctgggccagtaggggttggcttctgtgtggggagtgtgagggcatggtgagggagtgggactgggcttgagactgagtcccagcctcaggctgtgtcctctgttcctcagcaaaaggccaaagataaccgggcagctcaccgcatcaacaaggtgcagaaggtgagtgggctcagggtgcgcaggggcatccaagtctggttgtggggcagcctccctgagggtgggggtcagagggcctgcctacagcagcctaactgttctgtgcctggtctcctcctgtagcaggctgagagccagatcaacaagcagaccaaggtgggcgacaggcccgcaagactgaccgaccggcc

SEQ ID NO: 28770 - DNA, 1322 bp, Bovine  19866880603844
  misc_feature (1)..(1): n is a, c, g, or t
nggtcctgcatgccaaaaataaataaaattaattaattaaaagagagagagaccccagaatccaccaatagcatatatccttcccttataaagtttctggctgctatgacctgagtctcacaagctccaatttggttgtatttgctacttccctgcaggtatacaagttgccccttcctggatactaaaaagcaaggacttgtgggcatgtggattatcaccaatttcatcaatatcctgcactattactatatgtcagccttggttccagagctatgagctggaagaatacaaaatagaaacttgaaaggaggtgtatatacaggacttctttaaaccacttgtctgcatttcttctaatgccaacttgtttaatgctgtcttttcattaattcagaacaagatccacaggctgccagttgttgacccagaatcaagcaacatcttgtacaccctcacccacaagtgcattctcatgttcctcaaagtgtttatcactgagctcttaagccagaattcatgtctaagtctaatagaagattagcttctatgccagcattgccatgttctgcactatgaccccactgacacggctctgggcatctctgtacaggatctgccagtgaatgaggaaggtcaggtggtgaacatctattccacatttgatgttatctgtgctaagtcacttcagtcacgtccaactctttgggatcctctggactgtagccggtcaggcttctctgtccatgggacttcccaggcaagaacactagagtgggttaccatttccttcttcagtgatgttatccatcaggcagcataaaagatctaccacaacctagatgtgcctgtagtcaaagccctgaaaaatcgatcacagtactttaaatgtagcttcaagtgcgacctgcatgaggctctggagacctttctcagcaggctagtggaagcagggagtcaccgactcgtggtggtggatgagaatgatgtgatcaagggaactgtatcaccatctgtcatcctgtagaccctggtgctcacaggcagagagaagctgccctaagctggggggatgaggtcaggtggcaccaggggatgtgcactgcctgcccaaagctctgggaaccccagaagaaacctgaaggctcttccttgctcaggagccccccaccctcctacccggaagctgagaaggcatggggaaaggaaggagaatgaatttttaggtgtccttatcctcacaatactcagaaaaacttttagcctagctcctgtcctcttattcatatccccctttctgggcaaaccatgagctctgtgcc

SEQ ID NO: 28771 - DNA, 1688 bp, Bovine  19866880611658
  misc_feature (1)..(1): n is a, c, g, or t
ntgttttactgcttttaaaaaagcatcatcttcagtttgctccgaggtgcataaatcaggtatggccacaaaggataacagacaataaaaagtctctcagagtaaagagccagggactacagaggacagacgccctgtaaggctggctggggagaacgatggcgaagcctgggtccctcatatcattttggagatgccctacagccctggactgcttacctctggacgtttcatttcatgagagaaaaagaacctcacatttatttaggccattccgtggcatgcagttaaactcaattcctaactgttatgcacagaatcctgtaacctactgagaaattagccaaatttatgttagaaaaaaaagaatttttgaagagctacatccagtgttacagagagctggaatgtctttagtagtttttctcagtctgatttgccacaaatgtggatgggctgctcatacccgtcaggttaagcaatacggcatatttttgcaatagattaggaacatgcatacgaaagtttctcaacacaaaggcccaacaaatacaaacgattcattggtctggatcccaagataaaatctattagtcatctgtatcaaattcactttctctcagcttcagcattctaggattctaagataaaattacaaatatcaagatggagaaatgtgtcaagtacagatttctacacatagcatataattcagagagcctaagtatatgatcttgaacaagtcacatttttccaaggaactagtgttttcatttatgaaatgaaaaaaattaaaaagtcagaaaacctaaatctcccataaggttgatgctaagatcagatatgaatgagtgtgtaaaaccctaaactgtgaagtactatgaatatataattaataaaactataacacataaaaaagaaaaaagaaacttgatattattggtaaaagagtaattacattagtgtcattgagaactaggatttttagtatgggagcaaggagatactgatataaaattgacaaatttgagcaaaactctgtagctcttaatttgatactaaaagattggcaatgaattgataattggttaaggctgggtgctgggggggtggtaattatatcagcctctctatttgaaatatgttaaaatttttctataaaagatgtattttaaaaagcaccttcttctcaacagtaaggacttttttcctctctgaaacttcaccttcaaaaagagaatacatcggtacaagaatggaccgaaactgtcactagaaatttcaggatacaccactcaatttaagtgatatctcatctctgaaaaacaatggatagcacctctgctatgtatccaacactttgttgctgctgctgctgctgctaagtcacttcagtcgtgtccgactctgtgcgaccccatagacggcagcccaccaggctcccccgtccctgggattctccaggcaagaacactggagtgggttaaaatggatcaaaactgaactcaattcagtgcttcaaagctgcctcctctggcccaagaccacagacacaaatgatttaactgtgagtcatctcaacctatatccattctcaacagtttgagagcaggttaaaagaaacaaccttcctaattacaaatctggcattcaatgcacgaaggtaaaaactgctgaaaagccctaaa

SEQ ID NO: 28772 - DNA, 3753 bp, Bovine  19866880638203
  misc_feature (1)..(1): n is a, c, g, or t
nttggagggttggcagctttttcttaagagcccacctgcctcaaaaacgctgggcctgagatcaacaggacagaatcaggtatctcaggatggggaagttcagatacttacccagggcagggcaggctcttcagggcaaggttgaggggagaggccactcaaccctcgggcctgggtcagaagtgagatgccatgacttcctgtacccatccatcatcctcttcctcccccagtcctggcctaggcctgtgacctcccctgccctctcttacctgctgaactctggaggctgatgggagcggtgtgaactgggttctggggcgggtggcaagacgccgcaacactgaatatgagatctggggagagacaggggtggctgagcagggacagatcgagacccagcagggatcccagccagactgttctgcccttgcccagcccccagtagctacagatacaaactggagctgaggggccaggggatggtacacgctgagcccgtccaaagggtgatggccgggtgatggcaggtggcactgcttggccaggggagggcatcaggcaggagtcacagccgtcctgtggagaagaaccaggtggaagagtgatccctcccacttggcactgctctgtcttgttctcacttcagcagccagtgtgattctttaagagctaatcaaatcatatccctcccttggtcattcccctctccttggctttccactcattccaagtcatagccaaggtcttatgcttgtttataaatccttacccagcccgattctgtcattgctctaacttcttacttcctctccttattctgctttagccttgcttttttgctaattcttaagcacaccaggtagaccccctgtgtacatctgaagttctcatgtcctggaacgttcttccctcagatatctgcggggctcactccctcaactctttctgctcttcacgtagccacacctcagtgatactcccttgacccctgcaactgcaataccacccactccctccagttctccttcccttatagtaccttgggggcttccctcgtagctgagacagtaaaaaatctgcctgcaatgcaggagacccaggttcgatccctgggttgggaagatcccctggaggagggcatggctacctactccagtattcttgcctggaaaatccaatggacagagtaccctggtgggttgtagtccatggaattgcaaacagttggacatgactggagcaactaacaatttagtaccttttttttttaacagataacttataaccatctgacatactatatattttacatgagtatttattttctatctccccttctagaatgtgaacttatttcgtattgtatatccagaacctagaacagtgcttggcacacagtagctggtcaataaacccctgtgtgtggaggaaatgaacgagctgtcagatctgtctcactctcagcactgacctgacagtgacctaaatacgtatcagactgtgacctctggagacctccaaggggccagtgccactctggagagggcttgggtccatctgggacaaacaaggacccaatgaacatgctgagatccaagcagggactgtttggctctacccacaatcctcagtgctgctggggactccctcgtgtacatcctctgccccttccccaatcccaggagggtcccatctcaccctggtgtgggttttatctcgggtttcttttaatggtatccgctgggccaggccgagggggccacctcctccttcatctgactgagtgacaacttcatgttccccttcagggagagaggaagctaggaggagacaggaaatttgctgtagtgtctgaaacacacatcaaagtctggcacatggttttgcaacctccggaaagggtatgccagtttgacagccaccactgcaccatcaagcctggggacccatccagtacccctttgaactcagaagtcactcattaatctgaataccctgagtgggctaggggtgtggtgatggctctaagccgctgacgtaggacagtgagtcgaaggtaaatcttgcaggaagtggcagagagaggatacaaatgaggaccacctcctctgacacaagtgtaaccgggcaaacctgtggcctgtgaagaagatctcttcctctctgtctcctcctgatctggccttcccgccacagccctcctgagctttctctcggtttgctccctacaagcaggctcccagctgacgttctctccccatggccagacacactcaccaggctgcacagacgtctccggaagggatcctgaggcctggctcactgaagtcctgaggacaacaaggacagtggcaagcagtcactgagtaccagatatgagctgggcactgtgcaaagtgctttacaaacatcatctaattctcacaacaacttcaaatgatgatacaaacattgtcctcatttgacagattaaagaaactgaagcttggcaggtaaggcaagcttgaacaacttgtaagtgctgagagtcaggaatcaaacccaaaccccatttgttcccacagtctgtgctctagccactacacaagggatggcacctctcatttctttccccttccgcccctcacaacctgaagaaactgatgccatattgaggccggactatgaaggcctgaacttcactgcaagggttcaccctgggaattcacagattttcccctccgccccgcctccaggctggtgggaagtcctaaagctaccagagggcccagccctgagggaccctgtatcagatactgaatcattcttttccaaatgaccccctccttacttgctgctgccactggtctctcttcttagttcctggaaacagggaagagcagaggggtgagaggaagatcctgaaggtggaatctgagccacacaggagcaaaagaaaaaggagagtcagaagcaggctccaaaccttcaggtttcaccaccaaccccatcggcctccatacaagccttctgcttaccaggagctaccttccatcccaaggcccagctgtgtccttaggagttcccaggaacacttagtatcagccccttaagaacactcaccagagcctccaacctctggggacacaaggtccgacctctaggccctggtccctccagccttgagaagcaggaagccctgacagggtccagtcgatgggtaggggttctgggggccaaatatgcagacgcccgggcatcctaggaccccaaaagagactctcagtacaggctcaggattccctcctcagcctaccccagcctgatctcctcctatcccggctcattacctgacccctccggatggtgcctccctgggtccctcgaaccagtactctctgagccagactgggctggcgccccaggcgacagctcttcaccccctcacctgacaggatggtggccagggctgcagggtcagccacaaactctatggtccctggagcctctgcaagggaaaaagagaaggaaaggcgaggagggataggaaggaggggaggctgaggggctggggagcctagcattgtcaccttgaggtgcatgagccaaagagactcatatagctgaactcagctcaacaaacattcataggactttaatctgcataagacactattctagacactgccacccagagaagaatacgacaaagcccccatcctcaggaaggtaacatcaaactatagaggggtaacagattcaagtcaaagt

SEQ ID NO: 28773 - DNA, 1965 bp, Bovine  19866880766482
  misc_feature (1)..(1): n is a, c, g, or t
natccctccacccttcacttcactgcggaagagcagggaagaggaaaaggtagggaagaggtacgcccctccccctcgccacgtgccggaggaccccagagctggagttactccctgaccgcttgccacgtgtccaagccaaagctgacgtgtttcagcggggcgccgcccccggggccccgccgctgccccccaggcccctcaccgagtagtgtatgtgaagcgtgtctccaaaggtagcaggctcagcacacggctcggggggctccacctatgatcgcactacacgagtcagggaggttcctgcccctcgacgcggcacccccaattcggtgcttgcactccctcctccccgctcccaggatcctttagaccccgaccttccccgcaaccgggcccgacctccatccacagcgcctgcccgggattctcccctcctcaccagagtctccacttggagggtccggacgggactttcggtttcggacccagcctccgcctgacacaccgcccccctgacagcagcagcagcagcagcagcagtcggagcgggagaagtgaggggcgcagagtcataactgggtgcgggcaaggctctgggcacgcaagacaagccgctggatgacaggggctgggaccgcagttccttcggcgcccaggccagactggatgggacggggcgggtcgcgacgcgccagctcctcctcccgcagcccttcctccacctagtccccacctcctgcagggaggaggccacgggagctctcccggccctctgagatcccgagggtgagactccgacctgtcggttagccgttcgttgggtcccacagcgaggggctgagtcacatcgtagcatacattttcgattacctattgtgttccagacacttgtctgtaatcctcaaaaccaccttgaaaggtagacataattgtttctatttcacagatgaggaactgagtgttcgggttaagtaactttaacttactcaagttaaactagctagtttagcttaactaactaggttaaactaatttaactagctaggtggtgacagaggcaggattcaaccctaggactacctgagtctagtccagtcccctcgctccctgctctttcctcttaagtctcctcacacctatcttggcaggatctgactggctcaccccagcccagcagttgtcaaagatggcagccctctcccacatccagcctttcagcttgcattcctggaggtcatatacccaaaaggaggcagggtgctgtcccataaccccacccttagggacgttagatgaaaagagcactgggctgtttacggtaaggagggggtgcatccctggtcttttcctgtctgtcaaaagggcagctacatacaccccttttgtttgtgcaaggacttcagtttttaggagtttttctattatttcaggtgaccctaccaatccccttctgcatgattcaagtcctcacctgcccacttaggctttaggtatatggattctgcccatcagtgagctcacagtcatcattgtttggggtcacctcttaggccttgtcctccttaacatctctccggtccatgatgcccatgagctctgactgccctcccaattttagacacaacttgtgtactgcaggcctccacctggatgtctgatcagtacctcaaacccacacacacactaccatactcattgctctttctcctccatcccacctgtaacaatctggattttgcacccagcgtcctgtgttctatttgttctgctatcagccttctctatgattcttctctcacttgccccacatccaaccagtctcctctggattctccctctacagcctctccagctctctttccattcccatggctaccaccctaattaatccttcattctttctttctttgggattgctgtgctggggtgtgctctctggttgcagtgagcagtggctactct

SEQ ID NO: 28774 - DNA, 1334 bp, Bovine  19866880771634
  misc_feature (1)..(1): n is a, c, g, or t
nccccaccccgcccccccaggtgaccacgggacctgtaccaggttctagcggccaagggctaccagctggaatgtcgaggggtggtcaaggtgaagggcaagggggagatgaccaccctacttcctcaatgggggccccaggagttagcagggcccagctacagatcaactgaaaggaccaaggtgggcatttgtgtggactctggggcttgctgggggaagctgtggcagggggcactgagcctccagaccctgctgatcacaaagggaacaccccagcaggctgtgttcaactacgtcctcaggctggtgaacgaggggataccaagaggattatgcaagtaactttttaaaactagggtagggttgttttccctcctttcttccagcttttgggagcaggggagggggcagcagcaaaggtggggggatccttcctacctgagagattaaaatggcagcttgtcacacctcccctttccctgtccgtctgggcagccggctcagggctgggcccttcctttccctttttcctgggaatcttttgtacaaagactggggcaggcttgaagagtgcctgttccacgcttgcctttgctgtgcctgcatccccagcatgggtcctgggccctccccacccggtcaggtctccctcagggacacagggccaaggagggagaggctcgggagacccagctctgtccatatttcaggggaacgtttccatttgccaaatcctagtcccacgatctgtccccaaaggggaacaaagggacttctgacagctcagattagccccagttcctgcacagctccagggagaggggcatctggtctcattggtactgtgaaaacacccaggagggagcaggaatgtgcatgagggcattagaagactggaaggtggatgttcgcctgcaggtgccaaagagagcaggccagccagggatggggggtggtgccagactccgaaggtcaggatcaggccgctctgcccccgcgcactcttgctgtctgctgcaagggacacagagcgtctctaccccttctgttgccaaatagaacagggccagggcctggaggaagacgaccctgatcctagacccgtcctcccagacctggcactggggagggccttgtgtgtctgtgtactgtgtgtgcacggtggtctgtgtgtgtgtctgttttccaggtctgtgtgtccttgcgctcctgctcctcgactctccaccctgggttgcctctttcctgtgggcttctgtcttctgggaattaaggcaggatgtctgatttcaagggatggagacagatgcccagtttgcacaggagtggga

SEQ ID NO: 28775 - DNA, 1480 bp, Bovine  19866880771957
  misc_feature (1)..(1): n is a, c, g, or t
ntaggtcttgggagtagagaaagccaactcccatggttcatacagctcacagttgagaaacaattaattagaatgccagtgtctacaactacccatgattaacccagcctctctcgggttcccatcttagtctcagaaatactattctttacgtaagaatttaaaacgtctgagtattgaatccaagtaatctttatagacagatttacaatataaccaatatctcaaactgctcatttttctcttataaaatcagaactgaccaaccaactatttaaatgtctactgaatacctactaggtgtcaaggcactatgccagggctctgcagacacagtagtgcctatcgagtgaggaagacaggttactcaactacacatacaattataagcgtgctaggaaggcacaaacaggggatgtgacaggaaagccagaaaggctgaggagatcaggaatgagatgtgagctggaatggcgcgggtagggggttgggggggagacggggagaaaggagggaaaagaatgttctgggcaggtgggaaagcatgtgcaacaaccccgacaggagggaacaggtatgcctgtggaaaggagagctagcacagccgaagcactgggaccaagggggaccaatgtgcaaaggatggcagtagggccagaccgtatggagccctacaggccgttaaggattagagactattctgaaagcaatgggaagtctgaagcagggtctgtagtgtgaggaacagatatgaacaggtgaggacggcaaggtggtggccaagtggaaaactggaattagttaagaggctactacagaattcaaagcaagagatcacagtagcttgatcatgatggtagtggtggagacaaagagaaaaggtcagatcggagactgtgcagaaggtcaaatggacagggtctgctgatagatttaattgtgggaaaaggagaaacttcctaaggtttccactttagacactgggtggatgacagtaccatttacagagcaagagaacttggaaaagggccaggtttgggaagaaggggtcatgagttcaatatattaaatatcgccatgaattatggagatttgctactttagtccccgagggtaagaagaaaggcagaaaagagaaggaagttttaccttgatatcagctctgagctcgaccaactgctcttctgacatccgaacagccacatcagtcattttctttagaagttcggctttcttttgacggctaagcaaaatttccactgtagagggaaagggagcatgactcttatggtctgctaaataggacaaagaaggactggaaatataggccttgcagtgtgtacttgcacagccaaaggcttagctgcccacccacccagaaagtgaaaataccaaaggtctagtttccaccttcttgaggaactctgaaggcagtttatatggtaaacaccttttagactcataaagactcataaatcat

SEQ ID NO: 28776 - DNA, 1428 bp, Bovine  19866880799004
  misc_feature (1)..(1): n is a, c, g, or t
ntgctaactgtttcccatcataccccaaaagggagctgaaatgaatcagggcccagagtttgagggctttgtgactttgcccctcaagttgtaaagggtttaaccctgaacttagccatgttcatcatcttctagtagacttagggactccagtagagggccctaatgcctcacacagcccccactctcagatgtccccagccctgtgcctcaggtgcttctagttggaccagggtcccctcatccataggttggaatctgcttacccatctagttctggactttggcattgagtaaggtgaagggtaaaggtctgagtagtgtaatgaacttgaccctccttatagctcatggccctgcatcacctctgatttaggtgtccggttccccattgtcaggaggccagacctcatccagagataatgttttgaggaaaaagacaagccttgtccttccatccaattcccaccactactcttttcctctcctgctgttactcaggcaaagaaagggatactgctcccctttcttggtgaggtctgagtgagccaggcaggccttccccgctctcaccacttaactaagctttaatgacagaggtcttcccaactcgatgttatggaaaaggcacaggatataggcatgtaataagtttgagagccctaaataccagtgtgaaattatcctttgtgttcagctacctccctgctgcctcccctggcaatcttccttttcagcccctctcttgctattaaaataatccatcatggttaaggaccagtgcatctgcccttatgaacccttaaactacttcaatcacacattgctttatcaaccccataagctttgaacactacccacataaccctcaaaaccaggtgatgctttcctcctcctgggctcctcagaagtcctgcttagtgaccaaggttgctgataagttaggagcacttgcccaagtgcattatttctatactaacaaatagataacttctagagctacagccctacataagataatggtaatggagaggactttagctggatggcaggccattgggggtctttggacctctgacaacttggggagaggatggtctagtgcctctgtccctcagtagtcagtccaggatgccaggaaagagggggagctctcttgcggcagttgcttgaaacttctagcttttggggggatggaggaggacatggggagatgaaagggagacttaacctggaaggtgaatgtttagcatccagctcttaagacaaaagcaaccttatcttcccagaacacgaatagctccgtattcatggcttggcccaggttaatctgggcaagggagcttctgaagtgagcctagagaaagctagtggaaagccttggatcgggccaggtgggatggagtcagtgacatgcaggataagtgt

SEQ ID NO: 28777 - DNA, 3134 bp, Bovine  19866880857946
  misc_feature (1)..(1): n is a, c, g, or t
ncgttacatctgtagtacttattttcttaaaagtggaatttgataccttttgaatacctttatccaattctccctctctccactctcctactttggtaaccacaaagctgatctcttttcttatgagttcatttgtttttgaattataattgacctatgttagttcctgttacacaacataatgttttgttgtttttgtacatttcaaaatgatcacatttaatttagttatgatatatcaccatacagagatattacatagctattgactatattctccatgccctcacaatggtatgtgaccaccaggaagaccatagtgtagagaatatagtctgatgcctctgaactatggtgctggagaagactcctgagagccccttggacagcaaggagatcaaaccagtggtcatgtatggatgtgagaattggactataaagaaagctgagcaccaaagaattgatgcttttgaactgtggtgttggagaagacttcttgagagtcccttggactgcaaggagatccaaccagtcctcctaaaaaaaatcgtcctgaatattcgttggaaggactgatgctgaagttccaatactttggccacctgatgcaaagagccgactcactggaaaagaccctgatgctgggaaagattgagagctggaggagaaggggacgacagaggatgagatggttgaatggcatcaccgactcaatggacatgagtttctgcaaactctgggagatggtgaaggacagggctcttacaccacatacaaaaaccaactcaaaatggattaaagacctaaacataagatctaaaactcctggaagaaaacacagaggaaaagcttcatgatcttgacgttggcagtgatttcttgaatatgacaccaaaagcagccaaaaaaagcaaaaattgacaaactggaccatgtgaaaattaaaaaccttctgtacagcaaaaataatcattggagtgaaaatattagcaaatcatatatctgataagcgttaaataatcaaaatatataaagaatgcctacaacttaacacagaaaaataaatgaccccaagttaaaaatggacaaacaacttgattagacgtttctcaaaagaagataagccaacagtcaacaaacatatgaaaagatgcttgacatcactcatagctagagaaacacaaatcaaaatcatagtgagataccacctcatatcgattaggatggctgcgaacaaaaacaacaacagcaacaaaacaaaacacacacagacacaaaaccagaaagtaagtgttgttgaagatgtagaaaaatgaagatgttgaaacgcttgtgcactcttggttggaatataaaatggtgtggccactgtggaaaatactatgaaggtttctcaaaatttaaaaatagaactactatatcatccagcaatcccacctctgggtatatatccaaaagaaattaaagcaggacatcaaagaagtatttgcacatccatgttcactgtagcattatttataatagacaagagatggaaacaacccaaatgcctatcaacagatgactgggtaaacaagatgtggcatatatacacaatggaatattatttggcttttaaaaagaaggaaatcttaatacatgccacaaaataaatgaaccctgaggatattatgcgaaatgaagtgtcagtcataaaaaagaaaaatattgtatgattccacttacataggctatctaaagtactgaaatccacacaaacagaaaggagaatggtagttagccagagactagagggagagggaaatagaatattgtgattttataggtacaggctcaccctggagagattgcagggttcagttccagatcactgcaacaaagtgaacatcacagtaaagcaagtcacagaaattttttggtttcccagtgcatatacagttatgtttacagtgtagtctatttagtgtgcaatagcattatgtctgtaatgtctagatgtcattatgtctagacttccctgtagctcaaatggtaaagaatctgcctgtgaggcaggagaccaggcttcaatccctgggttgggaagttcctctggagaagggaatggcaatccactccagtattcttgcctggagaatcccatggacagagaagcctggcaggctacagtctgtggggtcgcaaagagtcagacatgactgagtgactaacacacagcattatgtctaaaaaaatgtatgttctttagtttaaaaatacattattgctaaaagaatgctaaccatcatctgacaatgcagggttgccacaaaccttcagtatgttaaaaaaaaaagtaatatctgtgaaatacaataaagtgaaacacaataaagaagagtctgcctataatttcaacgcttgtgtctcagggaatagggaagcctgaggagagggaagagaggtagcggaatggtcagttggtgggtcagtcagaatcaattaaattttcctcacatttgggcatggtttgtggcactctaaaacaatgacagtagtaacatcaaaaatcgctgattacagatcaccataacaaatatagcaacaataaaaacattcaaaatactgggagaattaccaaaatgtgacacagacgcacaaagtgagcaatgctggtagaaaaatggcactgatagatttgcctaacgtctatcagtgggacactagtttgataaattatggtttattcacacaatgagatactacgcaaatatttttgaggaaagagaacatccttttatatactgatataagatatactgttaagtaaatgatggggagaagaataatttatactatcatatatacataaatattgtgtatctgaaaagataaacaagaaagtagccaacagtgatgatccactgaagaatggaaattgaaaaaataggaaacaaggttaagaaagacttttcaatcatcctttttatatgtttcaatcaaccttttatgtatttcttgcactgaaacatataagcatattatctcttcaaaacaattgtaatacttttttaaaaagactaattcccagcaaattaaaccaaagctgaaaactctcagtttaacctaaacaacgtttatttcaacttagaaat

SEQ ID NO: 28778 - DNA, 1262 bp, Bovine  19866880867503
  misc_feature (1)..(1): n is a, c, g, or t
ngaggaacctgtctatctgctccacacaatctctgaagcatctagttcagtgcctggcacatggcagatgctaggaaatacccgctaaaatgaatgaatctagcaatagtcaagtttcccatccagcaacagctttttcaagaacctgtcagaagacagatccttgggcaggttctctccttccaaacagtactttcgtctcccctcacagcacccaggtcaaactctttccctctcctaactcctctgtttccttagtcagactgaagggactgaaagctaatcctgcctgaaaccttgctcccttccctttccaactctaaagtgcagagtccccacttccttactgtaattgtgctgtcatgtccccatcaagcaagcaacagcatcatttaccagtttccaggatatttaagggcagggtacggaaaacatccaaaatattctacttttcagtaagaaaggggagaaaacagaagcaggaaaggtaaacaacaggaaacagaacaatgaagtctagttattaaagagctggattaacagctctttttatggtaaaccacttcggccctaagagaagaaaaggagtaacagagctccaactctgcactcccccagcctctacacctgcaccagcagtaaaggacccctttgctctgcagcttcttcccacacctctactctgcatcttcttatactacaacttgcttggaaacatcaagactaatctcattatgatctctaaccctcctttgtatcattcactgcaagaattccagaattctggagccatcctaaatcctccactcacatccccatatggctaagtacatcccctttcatgaactaccccctttcctactaatccctcaattcctgaaatcttttcaccatatcctctggaacttatcaacaaaatctcctatattttgacctcttgtctgaatgatcccttcacctttttgctcaagaggaaatctaatagctgaggccactgctctctctacagtctgatctgtggctgttttctctcccacacccctgacactatgtacctggacggggagggggggggggtagtggggaggagtagaaggaggtactcaccgtgtaccttgtttctgtttccagattattcccttctattcctccctaaaaaagccctctctcagaccatacttccacctccccacccctctgttatattcatctagataaggtgggtcacttcttgagcctcaaagcttttagttcctacctca

SEQ ID NO: 28779 - DNA, 888 bp, Bovine  19866880941799
  misc_feature (1)..(1): n is a, c, g, or t
nccacctcatgcaaagagttgacttattggaaaagactctgatgctgggagggattgggggcaggaggagaaggggacggcagaggatgagatggctggatggcatcactgacttgatggacttgagtgtgagtgaactccgagagttgatgatggacagggaggcctggcgtgctgcgattcatggggtcgcaaagagtcggacacgactgagcgactgaactgaactgaaccccattttaagacaaggaaaatctgtactgctgtaaatgaggagaaagggcatttcaagaaccttctgtgcttagcattactagtgcccttcttgtatgacagctgtgactgttccaaggtaactctccatgtctagaccaggtgcaaaaatgagtgatgaaagtgggagtgggcaggaatagagaaacacaggtgcaaaatccctcactttccttgtaatactaaaattcatattcatctaggtatacttcctcaaaccacacctctgaatactaggcctcaactgtttgtctttcaagttccaacttcctaactggcccagtgaccagttgcttccttcagtctcttaaattcatcactctccctcttccttatgaaaaaaggtctcttgattcagacccccccagcaacctagtcttagcagtgagtagcaacactggtacagtgagggctctcggaggcctgcacctatccctggttaagaaatgaaaatgagagctgaaggagtaaggtccaaagcaagagatattcactcattttctggcttcctgactttgcccaaggagccccagtctccactgcgcccactacgccgcctcaatccttaaataacaggcatagccctggggcttctcacctgttcccactgtctca

SEQ ID NO: 28780 - DNA, 1233 bp, Bovine  19866880964255
  misc_feature (1)..(1): n is a, c, g, or t
ncctcccaaccacttgccaagtaagtaccaagccgggcaagagggggcagtgccaccctgggaagctccagctctcctcccccagagccgaacccctcccttctctctcctccctattaatcctcggaagtgaaggggccgtccctggcggcccctcaaggcctattgtggcccctcgccctcctcggctggcgtctaattaactcctcctgcccctggttttatgtgccccccttaccccaccttgtcggccccgcccctccgctcggcccgctccccgccacggacattccagcccggccgggctggtgtgccagggcaaccagggccggaccgaggcctaatccccccgccgcctggcccgactgggagagccccgctcacctccccgctctctgggggctgctcggctctgcggtggcggagacacacaatcgggacaaaggagcagccccccaggggggctaactcagccttcacgcccaggttgtgcggcatttggggagtttaatgaattgtccatcacgcctttcagggcccgcccgtcagcctggattaatcttcggagccctggtggggtaggagacactaagcctgtatttattactctcccattgtcactaattgaggtaattatctgtgactctggcctggccaacaatgcggcattcactcccgggacctcgacgggcctggctcccactctcagcaccagccctccctcctctcctctcccaaacccgccaagggctaactggagccccggagcatgatgggaaagtggacaatgtcccataatgcttcacctccaaaccggtgtggagttgcaactagggagaggtccctctaaagcaggtgagaaaagaaggcagcctgtctggggacaggtttggctggcagagcccccgagccacagaagggcatgcctctggggtctttggttttctggaccctcatctctgtgttggtgatgccagcgtctcccagggtccttctgtgaacccaccttcatgttcctgtagcctccagagttctagggtattaggaggccctatcccataccaggtataatttacggagggccctaaagtttcagggctggcagagtagtgtgggtgggggaggtggggaaaaagaataggcttgggctcaggggaagagcaaaaggagccatcacaggaaggagcaccgagggctcatgctactgggccatgcaatagccttagggagaaa

SEQ ID NO: 28781 - DNA, 856 bp, Bovine  19866881032280
  misc_feature (1)..(1): n is a, c, g, or t
nggagctttgggggcagtaggaaaaggggacaacagaggatgagatggatggaaggcatcaccaactcgatggacatgggtttgggtgaactctgggagttggtgatggacagggaggcctggcatgctgtgattcatggggttggaaagagtcggacacgactgagtgactgaactgaactgaaatcatagtttaatggaaacaagaaaacttcagtctttgtataagcttatttttcagagttagacaattgaggcagaggtggagcttttcagcaaggaaatatccgtatagtccttctgtccaacagaaagatttcttgactcagcctccaatataacaatggccagagggacttgatctcagctctaggccttggagagtgatggtggtctctggagagtccattaagcaggagttctgctctgatctgtatgaattctccagggccaacaattccttccctgtattacttttttcagtgagttgcattatctaagaggtacttgtccatgccaattatttctaaagattaaaatacagagttctaagatttcttagttgtaaatcttggaattccttcccttcttccctctctccttccttttcctctcttatattttaaataatatttgattatagaaagataataataaaggatataacatgaaaactgatattgaaggtattttaaattgagaagtgtattaaagatattttaatgataaaagaaagtacaagtttatcatgttatccaaaattaattgttttatttattgcaacagttagacctggacaggaacagtagacggttacaaatcaggaaaggagtgcgtgaagactgtatattgtcac

SEQ ID NO: 28782 - DNA, 1010 bp, Bovine  19866881035726
  misc_feature (1)..(1): n is a, c, g, or t
nctctcctgaagctgacacccttgccatatcagagtagaaaccctgggccactcccctctgctcccagaggcagaccttgccagggataattaaaccttggcctctgacagagtgtaatagggtacgggtccttgagaggagtgaggaagggttcagccactttcccctattctgcaccaagttaagaggcacccacattctccaactttactttattggaagaggcagcagcagctgtagccccagggcctaacccagatgggggtgatatggagactgtacaggatgagttttaagtgctaagaaagaaccaactggttcccccagttcacaggaagactgccaaagctagagcctgaagcctgaaaatggagatgagggaagaagagatggcagagaagtcatgacaggaccagcgcccaccccgtctcctctccccccacccagatgcgttctcccttccccaaagccagcgtttcccttctgttttctgctttccatgcctctgtgctacagccagtgaaacttccctagctcccggctgaagagagggccatgacctgtgacccgcgccgctctgctgccccggctttcacaggcatgtgcacggatgctggtggtcccttcccgagttgctctgctcctcccaccggcttgctcagctccccagccacgtagttacaccccggagcactaagagtccgcccattaaggccacctcccgtatccggagggtcggtccaccgccaggctctcaaaggatggggcggcgccttgggtggagcaagctgaaggtggtagggaggggagcagaggcgaagggcgagcgagggcgcccgggaacggagtccggctcagtctgggtagatgatgaagccagagaaggtgctgtacttgttggtgttaccgccgtgcaccttcccgccgtccagcttgatgaagacttcgtcgcccacatccaggtgcaggatcacgctgttgctggcgtagtcgtagttcggtcggcatc

SEQ ID NO: 28783 - DNA, 675 bp, Bovine  19866881054520
  misc_feature (1)..(1): n is a, c, g, or t
nggaaggtgatggcccaccactcttgcctgctcgtcccgtgcggccaatgcggtggatgtaatctggggaggggaagaaacatcagtgcaccaggccagatgccctggtgggcagtgtctgaagcctccacttctaaaggcatcctcttctctgccacccccacccagggcagtaaacgcagctcatgctgcctgaccctgcagggcccacggtgctctccccagcagcactgctgatggaggtcaccctctcacactcggacagtgtggcccagctccactcttcacacccagaagacaagggtgctgtcccaggtgctgagacaacacacccaggtgagatgaagggcaggggctcttctcatgggaacaagcaaccccaggctcgaggctaagagagctgacagcagcggccccctcggtggagacatttgagaagaagcaggcagggaatcaccctttacctggagtgaagctctttcccccgcactcaccctcaatgttcttggccatgtcatagttgacgaccatagatacatcttggatgtcgataccacgacccgccacatctgtagccaccaaaatatccttggccccagccttgaggttggacagtgcaaactctcgctgctcctggccttttccaccatgcagcgtacaagcgttgtactgttg

SEQ ID NO: 28784 - DNA, 692 bp, Bovine  19866881096978
  misc_feature (1)..(1): n is a, c, g, or t
ncccctcttttttacttgactttgtcttcactctccttcccccctctcaaacacaccaaaaggttgaccttcccattcctgaatcttccaggtctacagggcagagacttgacctgattctgggtctctggtcctctgttttggtcaatgtgtctttgagccactttcccttctcttgctcttctttaaacacaggttgtccctgggaaccctctatatttttgtctctgcacccctccttgtgtctccaggtttaggaatctcttccaatttttcccccctacatttaggggtctctctttgtttttctgaggcttcacctctgggcatacccaacgcaacagtgagacacatggggatgggaaagggagtagaacttccttcctgcccccatccagaggcgcctgcaacctaaggatgggtatgtaatgcagggcccggctatggccgggtcgcttctcattcagggcacaggcacctggtcgatgcccggcttgtccgcccctctccccacccccaagccgccctcctccaagctcccgccccctccgcccgcccggaaaaggcaaatttgacatttttaaatcccgagccttggagggatctgatgcggcccaggggccccgcccggggtcgatattcctgattgggaaacggccgctgagcccgagcgcgtgtaaatcacccggacg

SEQ ID NO: 28785 - DNA, 1090 bp, Bovine  19866881099611
  misc_feature (1)..(1): n is a, c, g, or t
nctgccctgagcctcaccttcttgatgcctttcaagccccatcttggcctttgcaattggatcaatgatatcttctgcagcaaatttgtccaggtctagagacagaagagccaagtgagcctggcattgaggtcaatgttgcaactctttgacttccaccaagccaagcagaacaatggcatggcatagtggaaagaccactggactagaagccaggtagcataggtgactcaattctgttattcacaggacacatagctgtttttacttgcatggtgttaggaaaaggtactcagtaaatatttactgaaccaatgcattaaagtcacttcacccctatgagcctcagtttactcttctatttgacatagatcatgattccttattctgcttatctcatggagctactgagaagatcatatatgaccagaatatgagtttactttatgacctagaaaacaatcttcaaaagtcatgttcttaggacaactaagtgcagcccaagaacccaagatatgggcagggtgccaaagcccaatgccagagttgctttggccacaacacacaccacctacaaaccactattctacctgttcaggacacagggcagaaaaagagaaacaagcagataccaaatcatcctaaaatcttatacactgcatatttctccactactcagaaagcttaactgactccctacttttaagaagattaaccaaacaccttctcctggttattctgaggtggtaaaacagttaaaaggatatgagggccaggcttcaaattccagctgttagttgtatgatattgagcaagttaatctttctgcctcagttttcttttctataatctaagataataatagtacctattacatgtacacactgctgtatttaaaatggataaccaacaaggacctactgtacagcacacagaactctgctcaatgttatgtggtggccaagatgggaggggactttgggtgagaatggatgcatgtatatgtacgcctgagtcccttagctgttcacctgatgctctcccaatacaaaattaaaagttaaaaaaaaaaataatggtacctatttaa

SEQ ID NO: 28786 - DNA, 1826 bp, Bovine  19866881109778
  misc_feature (1)..(1): n is a, c, g, or t
ncagttgttctcagcaggggccattgcccccccatttggcaatgtgtggagatatctttgtccgtcatagctctggtgggggtgctgctgacatctagtgggcagaggctgggaatgctgctaataaacattccacagcacacagatagcggtaatgctgatgctggtagtggcagtgctgtgtaactctgttttagagagtttggcaagttctaagaatggattaaaaaaagtaactttcttcaagaggttttatttggcttaaaaattataatgtacattagattttttacctgtaaaaacgtaaccttaaaatttggaggattaaaaattacccatacttgcataatcagtttatagaaaattgggtacaatcaatttatagaaaattgtactttctggttttaaaaatgagcccaaatttgaaatgacaattgtctattaatttagggaaaacaactgtgtagttaggatatcaggaaatgctaaaacttgaggaaaatgtattttgtagactgacttctgaaattttgctatctaatcatgatttcaatgttcgttcatcctacagcgcttctttgccaatttggaaatatagcccctttctgtttctacccataatagaagttgttagggctcctggagtgttcttggagtacttctttccatgggtcctgattaaagcaaagtatttcctgttagagtatgatagctaattacattgctagagcttctgttttccccagtaccctgcttcttttaaacaaatttatgtaataaacattttggaaacaaagttcaaaatgtgtttttaaaaaaataaaaacaactttctgcctatcggcttaacagcagaaacaacgttgtatcttttgactcttggaaggagtcttgcagagataggggcctctgcaagctatttgcttttgctgtgacatgtttcttctggataggtagggatttctaggatcattactgttgacacttagcactatgtttttaaatgtttcatatttgaccctcatggagagaatgagattagtgtctattctaaagtatagatcctgaaatgaaggttggggactagttttacactacttgtagagctagaattactctagtaaatgaaaatttgagaaataactttaaaaattgttacctgcatttgattctgtatcaaatgtaactaataatcttatgtagtccagaccttgaattttacatggcagacaacttttttatgcctcggacagatccattttatttcccttgaccatttttctacagatatttgtcaggacacgaatcaggttctcttcaaatgctgccaggggtctgaagaggtaccctgcaacaaaccagttcctgtaagcctttctgaggatccttgctgcccactgcatttccagttacctcctcagatgtataagcccgagcaggtactgtctgtgccagacgatctggaagccggccccatggatctgtacttgagtgctgccgagcttcagcccactgagagtttacctctggagttcagtgatgtaagttagagaagctctgctctggttggcccttgaggcaaggccttgtttattaatggtgagactaggttagtcatttgtggtttaaaaaagaaaaaaactgataaattttttgaaatgatatgtatggtcgtatttgtatgttaacacattcgtttagagacagtttaaatttacagaagtttttctgagggcatgataagggatattataaactaaaagaagttggaggaaagtctctgtgattggatttacgtagctgggaaatttggtgcccattcacaa

SEQ ID NO: 28787 - DNA, 640 bp, Bovine  19866881180837
  misc_feature (1)..(1): n is a, c, g, or t
naagctctatgagtttgttcacagttttcaggatgagaagcgtcagctggctctccaggtaaggtttcttccctctcattgctgtctaagatggctccagaagttagactaagtctcactggagctggtgtggaggtactgttttcatgtctgctgggtcagaccccagaagggtatcttggcttctttgggctaataaggagtgggaaaagatatatgtatattattttctttttactgaggtataatatgtatataaagtacactaattttgtgtagatacctatgtaaccaccactcagatgaaggtatggaatatttccacgattaagaaggttcctttgggacttcccttccagtccagtcattaagactctgagctccctttgcaggggtcatgggtttgacccctggtcagggaactaagatcctgtatgctgcacagtgcagccaaaaaaaaaacaaaacaaaaaagattccttcatgccccttcccaatctatactcctttcctgggaaagaatctgtattcagacatctattaccgtagattaattttgcccattcttgggcttcatataaatgggatcatccagggtgtactcttttgtgtctgagttctttcattcgacattatgttt

SEQ ID NO: 28788 - DNA, 721 bp, Bovine  19866881191825
  misc_feature (1)..(1): n is a, c, g, or t
naaactcagggtttcttatcagaagttgacattaagaatatttctcctgtgttgtgatacataataaaattgagcttgattatgtaaagcagctgttgtatagtagatgcctaataaataaaccagaaatcatctgtggagacatgaacttccagtaagaaggagaaatggcatctgtttcaaggatgatgtattttattttattttcttgtctagcactgaataaacgtctaccagaggccctgtgattttcttttgatgaccctgaaaatcataggttaatgaaagtaagaaaatcttgacttcttgtattagattatgtttcagagtagacaattgaggcctcagaaagaaaatggatttttaaaaataattcacacatcaggccaacaacagagccaaaactagaatctaggcctactgattctagtacagttcttttcctgctactctgcaatgctctgtttacagagcaagtttccttagtgtgaaaatatcccacatttacattcaaaggtatagcaatgacatacctgaacattcctgaaccataaaaagtggtgaccacaagaaaatgagatgagcaggtagagaagatcttgttccaacctgtggtggagttgatccccagggctgtcaagataatacgggtgtaagaacccaccaatagggcaagagaaccaaggcccaggaccaccatggtggtcaggatggaggcacg

SEQ ID NO: 28789 - DNA, 1144 bp, Bovine  19866881230812
  misc_feature (1)..(1): n is a, c, g, or t
naattagggtactttcacctccccagcctgcctgcggcctggcacataaaggtgattaataaatatccctacagataaaagttattaatctctctcagacggctttgccccctagacagcagtgccccctgcagcccagggcaagacctgcagccacacagactagaggctggctgcccaggaaagctgcatggccactaccaaggaagagatgactgtggctgtgggtttcaaccccgtggctcttcttccccggggggcctgtctctgagtcaacgtgccagcctcgggcgcgcggggccagccgtgccttgggctgcggtctggcaggggcggggggcggctgggaagcctggggcccctctctggcaaaaatagcccacagtggttagagctgggagggtgagtcaggcaggagcgcagtggcgcctaaccccttcgctgccactggaactccctagggtggtttgcctccgtccgtgcaacccacgatcagactctgcctggctgtcctcaggctgggctcagtttgggatccctcctctttccacgtgaagcaagtctgcgagtctggagcaggaatatgggccaccccggagtggcgacttgggatcttaggaagggcaggggacctctgctggcaaggatgtctgtgagccgaaggaagcacaggggcaggctgaagatctccggagctcccggaacctctgccacagccaaactctgaggccagagctgacccctcccaaggggcaggcgtagggctccgaggtgggcggaagccaagccacccagaagggagctactcccgccagctcagattgccctgcagtgcgctctccccaggctctcgcgcggagaccaagccagtcaagccaggcaagttcgatctgagttccgtcttcatctggtcaaaggcaccttccagtcactcagctatcggtgggggaaactgaggcaaagagacatgaccactggggaccagaggcttggctctctagtctgggtcgccacaccctccttgcagccttggcggtcccagagcaggtgagtggaactctggccgcctcccccttcggtggggccaagcctgaaacccaagcgtcgggggagagggtgtggagtacgccgggaggagggggag

SEQ ID NO: 28790 - DNA, 1473 bp, Bovine  19866881319784
  misc_feature (1)..(1): n is a, c, g, or t
ntatttcttaatttttatgttttcctgtgtctaatatgatgctacactgtgtatgttcagcaaatcctgatgaagaaaggaaggggagaaaaatctgaattctgggtaataaaaaggtcacagaaacctttaccatctgagccacctgggaagcccccaaagttcacctgaacctcaacacagtgcttctcaactccagtttcccaaaatgccaagaggtcttggcaggatgatcaacaaaatgctctgtaaattctcaaaacaagattacttttaattatacttcagttctaaagcaaacccacatctgtcacatagcactttctgaagaacagaatgttatgaaatcagacaagtaaagaggcaacacaacccctcaaaagtccaggaaccactgataatgctgattctggtagagtggtatggagagaagcagacagtctatagacagcagagcagcaaaggcagcgagaaatagatgcagagcatagaacacttggtagtttccattccagttgggcacatacactgctattgtcaacgatcttgtcaggcagggatcagtaactccaggtctgcctgacttccaagtcatgccctttccctaattctcactgcctattttgttaatgagaaggggtgttgtacttagagatgtcctgtggcccagttgaatatgcctcctggccatcttcatagagatggtgttctttgctgcttgagggaaggtaatggattttattttaggaagctaggagagcctcagaggaaaagaataatgaggaatgagagtgggggtgcgagtgggggaggtgagaggtgagccttcaacctgggaagtagtctataggatgtagtttaagggaaaccaattaattgttgtccccaaatatctcctgcccaacacattaaggtgctaggaatcagcaccattatggctttatggtttaaggccttattttcagcaggtcttttaaatacatgcattatatgaaaagagtagtaaaaacaaggagcccatcaacaacatagaaatttgtaagtttagtcatcacctggagtgacatgacaggagggcatcaggatctgacagaatgagacaagggcaggtttagaaagtaggaaaggtccacagcttggagtgtgtttctgaagtcactctgaaaggggaagagtggtggtaatgggcacttggtgaggacagagggaaatggctgtggaagaatataaaggtaaacttagttgtcgtttagtcgctaacatgggctgtagcctgccaggctccactgtcatgggatttcccaggccagaatactcgagtgggttgctatttgcttctccagagatcttccccacccaggggttgaacttgcttctcctgcttggcaggtgtattctttactactgaacaaaggtaaacttcgcctgtttccaaatgttggttttatcaagcactacctggaaccctaaata

SEQ ID NO: 28791 - DNA, 1535 bp, Bovine  19866881334218
  misc_feature (1)..(1): n is a, c, g, or t
ngcatcagccagggcaagtcctcagtaaagggagatctgggcagtgtatcatagagcccaccacactggctacaaaaaatggaatatgatgtatgtcttctgcaacttgctcttcaaaaagattaatgattattttcaaacatattccaaatagagggaagagtataattaacagctatatatccattgggcttccctggtggtcagtgataaaagaacttgcctgccagttcaagagaggcaggtttgatctctgggttgggaagatccctagagaaggaaatagcaacccactccagtattcttgcccagaaaatctcatagacagaggagccaaaagagttggatacagcttaacaactaaacaacacattatttagatacttcgattatcaagattttgcaacacttgcttcatctatccctttctcttttttgattcattactttgaagtagacttcatatcatttcatccttgcaacttcactatccatcgctaacaaatatgaaccttttcttacataacctcaatgccattttcataccaaataaactaataacaattccttggtccatattcagattttcctaattatcttttaaaattcatttttataataagcttgttttaattagaatctatataaggggaacacattattttggttacgtcacatttctttgaatctaaagcccttctttttccctatgcaattgtcttgttgaataattaaaagagtgtgagccattcttatttatttgcttcttaatggttcacttaacttgttcctctatcctccatatttcctgtaattttaagttagctctaaagcttgcttagatccaggttcaaggaccataggtaacaaagagtgaagaagtgccattttgttgcctgaaacagtccatatggaaaagataggctaaagcttaattctttccctttatattgccaattttcagaatatataagaatgtttttcactttctctgtaaaatctcttatgagatcatgatttgaaaaataatgataagtgcattcccgtcgactgctgtaaatgttcttgtgaatgcttatggtgtccagtttttttaccaagaagagtctctttgtgccagctccctatgtccttttgatataatccagttggttttttttgagaacttgcttgctttctagaataacaagatgcttcaggcttttactgtacattttattcctcagaccaggaattagccatttctccaaaaagctctgcttctttttagtgggaaattggctttttaaaacaaactttttgttgtggaatagttttaaagaaaaattgtggggataatacaaagaaaaatctcatatacaccatacagtttccctcattattagcattattagagtggtatatttgtcacaattaatgaaccaatactgctgcatttttaaaaaataattttacttattatttacttatttatagccatgctgggtcttcattgccgtgtgccttttctctggttgctgtgggtgggggctact

SEQ ID NO: 28792 - DNA, 1300 bp, Bovine  19866881360068
  misc_feature (1)..(1): n is a, c, g, or t
ncagagcaccatgtccagctctatgagggttttttccccgggagaaaatagtttcagctgaaccctggttggtgcatgggcagagaagactcctagagatgcacatatccacacatctgaaaaaggccacagaaccagagaggatttcttcctagtacataatttgagaaaagcaaatttgaggggaagaaagggatgtcttcattgtgctggcacttcaactccctctccctccactcccaccttgatctaagctccaggagagaataagtaggaattgtgttcctagaccaactcagaacttctactctgtttattcaggggccctaaaagatcaggtctgctctgggccaaaccagagtctctttcatgccctgcccacaatagtaggctttaattggggttccacatctataaagcttctagagctggaatcaaaacctttaaaagctatcaatccatggtccctacctaaagtaatttccagctcccagagtaggtctctcagggtctgtcccatgcccctcatgactagtcctccaatggacagttatggcaggacttgaccaggttatcctacacatgcatacattcccaccctaccccaagtaagctgctattgcccaggggaggagccactggtcaccttggctccacaatcagggtcagagaatcttgagatgctattgtgtttgaagtgggctaagaaggcaggatcagtctcataggtgctccagtccccaagagaagctgaccctacagggaatctgcatacagctatctaggcaaagagagaagacacagaccccaggagaaacatgggtctaggacaaaattgtagcttttaacaatagggaagtagagtagaatgagccacttggatttcagctccaagatttttactgcctagtgctctgccctgggtgggcgtaataagcaggaaggcaggagggctcaaaaggtcaggctggagttccatgcaggtccagcagaggctaggtgattctctagagcaggggactggagccacgtgtgagatgtactagaagccctcaggatgcccttgaccagcgctgatgtcctcagctaatgggactaaaggatgggacgacatccaggaggctgtttctctcttccaagatctcttccctccctggttctctaggaaagtgggtctctggctctccactgtctcaaggcccgggtatgactccaggatatgcccaacccttgccatgtgcaaccccccactaagaaacgtacaaggaaagctttctgaaagcagatcggagttcccacg

SEQ ID NO: 28793 - DNA, 1258 bp, Bovine  19866881539499
  misc_feature (1)..(1): n is a, c, g, or t
ncccccagagtcctgcctgggagggggcctgagaaaccgagctctccacccaggagcagcctgaggcatcagggcccagccctccagcagaacctggaccccttcaggcctgcccccaggggcagataggactcccagagccctccactagggtagatccaggggtatcagaagcctgctccctggaactcagaaatccagagtcaagtccacggccccgcaccagtcagtgggctccagcgaccaccagcctgaccttctcctcccagcgcccactttgtgccagcccccctatccgctcactccagtctctgaagccctcaccgggcccggcaggtaaggagttgcttgggtggggttgtgaacaaaggaggttatcatctcttgctgggagcagggcctgccctgcaccagatgatcccatgctttctttcccctgcctgccttgccccagcctagctctcccattggggtgggcgggtgggtggtatggcaccttcagccctgtactcctaattggcttggccctggtggggggtgggataggggcggtatgtggttgggagtcttggacttcagagtccaccctgaactctccatggcccctggccctcaggtgccagccatccggccgctcggaccatggccctgaggcagcgcctcaaagcatgtctgactgccatccacggcttccacgaggcctgcctggacgatgagtgtgccttctacaccagccgagcccctccctcaggcctcaccagggtctgcaccaaccccgtggccatgttgctggaatggcaggacgccctggtgagcctgccgtccacagccagctgtacctgcacagaggcctgtgggaagtgggggcagggggcggcctcggcttctttacagtgggaagagctgggtacagttcaagaatggctgggctgtgacaaagtcttttttctccttagtgttttattccagttggtgatgctgccccacaggattctccgtcatgaggcatctgcgtccactcacccctgtcctgtcttgctccttccttttaaccttatttattttccacaccgtggattggaactgacacccttttgtccttcaataaagtttctcaagtgtccaagtgtcttttcctgtggtcctgcctaggccagctactgctgtgttgttcttgtccacatggtggcagtgttctccaacttagaggtcagccctgggttctccccctcccccagactccctcacctaggaactg

SEQ ID NO: 28794 - DNA, 1745 bp, Bovine  19866880384799
  misc_feature (1)..(1): n is a, c, g, or t
nctgttctttacttgacagagcctacactctggccctgtttgctaaagaacagaccttctctttatttgctgtctatatgatgacatgaaatagtgttatgaacagaagacccaacccatgtaatggaaaattacagtgtccttttttgcccccaccctgatcatttattttttttaaaaaattagagactagcagattttttttctatttctgattgagaacttataggtcatggcccagccttgccatttcttattgaaactctgaatatagtctttgtgcttttactaacgtcatgaatctgattgtattaatatgtttctcaaggcacaacctataaaagcaattttctactctgccataaaatattcatgagaatacaggcttttttgttttgatgccgcattctttaagtagagaaagtctcattgttttcttcggggcactttgggtcaaaagcaccagcagcttctgttgggaactcgtggcatttcggcgagtttttgatacagaaatagtcacgggcatgtctgacgcaccctccagcggcggaatgaatgggggctgtgggtctgatcccacagctggggctccggccgcctgaggggcccgcctggcctcctgaggctgagctcaggcggtgagaagcgcctggcctgggcccgcggccacccccgggctggtgcgtgtgtctcccaaggcaccggaacggccagcgctgggcatggcctgtcgggcggaggtgacgtctggctttgcattctctttgcgtgggactttctttagcagaggatgaagtcttatgtgaaacctcaaaaagggaaatccagcaggcctcgcctccctttctcgcagtaaatggtgaggacagcccatgaccaccccccgcccccggcctgctcccctctgttctctgcagacctgatggtgttgcccgcgggtctccttgccatcccctccctgggcccaccggctctggtgtctggaatgactcggcgggggggaagggggggtcctcctgatgttccctgcagctccagactcaaagggaacccgagggaagggacagtggacacagggaaccacagtcctcccccaccccatccacgccggggcgcctgccacatcctcccttcccgccttcagcccccgcctcgtctctcacacccagcaccctgatgccggcccctctgcatctgaggcctggcctccctctgctgctggcacccccacctgggcctgcagggcccccgaggatctctggatgcaggtcccatgccccaagccagcggtccaggtgcctcctgtgtctccgcccccatgcctgccctcttaacactggccgtctgggtcctggctcgccggccccttcccactcagagctgcggcccctgtgtgggcccttccccggggcgtccctcaagccctctgccctctcctgtccctttgcacggcagatctgctgcaggctggactgggaacaaccccccagcacgcagcacagagcagcaggccctggcgtttttctgcagtgaggggatgcaggcataggaaacatttggcccatcgtatatttgaagttaataaaacggatccctcaaagttgttttatgttcagttttttaagatgttaactattggacatttctgatcatcttcctgacctcgcctgtgaaaaattagaaacggagagatggtatggtacagtgagggcttccctggcggctccgacagtaaagatccg

SEQ ID NO: 28795 - DNA, 2136 bp, Bovine  19866880389021
  misc_feature (1)..(1): n is a, c, g, or t
ntttccccataaagaggactggtgtgacaaccagctgcacgtggacagctggagtccattagtgggtcccacagaagaagagaacccatgttgcaagctgttcacagcccaggacaggaagggtcagacgctggagcagagacgggagttaggagctaagaggcttccctgtgtgagggcgagcaccttcagggagcttccttcaatcacttaataatgactcaagttcaggtgcagggaaagcacaggtcagccctgcccggattttggtgggaaccagctggtgggcacatttgatcttgtggagacttctgcagagttaattctgggtttcagaattttgttttgtaaaccgagtgagtctccattaacgatgccgggagttggggacgcacagggagggcaagtccgtggacacacctgggagtgggggacgtgtcgggaagacacggcagcacccccgaggaaggaaaggaagccttgtcctaaggtgggcctcacttttggggggcctgggactgacgtgagtgagccagccccgttctgccatcctcgggtgttgtcccgggctgccctctgcagaggggtccctgctccagcacccgagaagtcttttgagcccagggtgatctcactcgcctgtccagccagccaaactctgacctccagaatcctaggcttaaaaagcagagctgcagtccccggagggaaccggtctcttcttctgcgtctccgaggttcctgaacccacagagaatctgcctggccagcaacgttcacgctgcagctgaaaatcttcccaagatggggcccattgttatgaatgattgagtttcatattgtttcgccaactcccaaacaaacggacagacccgcttggaacttgtttctctttgttgatgtttaataaaacagcaatcatataccaagcgagataatgggacggttgaatgcagactggaattattttcttttatggagtcttaattagatttgttatgcagggctcccaagtaccaaatgtttgcttcaatttaatgagaccggttatgcagagttagagaattgtaattctcccattaactcaacagtgatacatattgcaaagtttagtatatatcaagttacaaaagactggtcttgacccggtgggggtccagtccttaattctcctcatttcttcacagtttcctcttggtgttctttgcatgacccttggggagaaaactttcacctttaaagtttctttattaaagttttttctatgtttttttttttactttttttgagaaatttaaaaattggtttttctttttttttactgtagttgctttacagggctgtgttaatcactgctgcgcagcgatgactcatgtgatacgacctcgtcgttgaagttctaacggtccacgtgagctgtgcctttggtggcaggccggtctgccactgggcatcatggagggtctcagctcaaagtccaggtcttccggtacctgtcacctcctgccccctgccccccagaatgtcacactttccttggaatgcccccccttgcaggtcacaccttcctgggacacccccagaagcgcagacagagcgtcagaacacctgtaggtcaaaaccagtggtgaggcggtttctgtaaatttatcacccagaatatctaaagtactaggtttatgaataatttgctttattatataagcccagtggctattcctacaaccacaccacctcagtggaccccggcgttccaagtaggaggagggcatggagtcagagctgggccccaggggagcgttttgaaagcaggtgagagtttggtggggagggagggggtgttccctgcatttccgggaggggctggggggctctcattccccacgggctccctagcagtggtcttgggggcacagaggccagcagcctcccccgtcgtcttccctcctgtctccgggtgcaggggcacagaacacccaggcgtgccggaactgcagccctgccctcctgaggaagtactgtctccatgggcacaggggcagcgacgccaccctggcaccactggcagcttggccaatggccaggtgggcggggacgcccagcaccatgcttggcctggggtccaaatgacccggc

SEQ ID NO: 28796 - DNA, 1140 bp, Bovine  19866880598828
  misc_feature (1)..(1): n is a, c, g, or t
ntcctccctgacccgtctcgcctcaccccccgccttgctgagcacccatgggagggcacagcccagcactgggactgaacggcctgcaccccagcccggctgccctgccagtgaccgctgacctcagccaggtctacctaagcggtccccaggcgtgaacaggatcggcgcaggatggggagcacagcccaggatggacagggagcacaccacaggatgggagaacagcacaggatgggagcacagcacaggacggggagcacggggcaggaaggggagcacggcacaggatgggagcacaggacggggaggacagcacaggacggggaggacagcacaggacagggagcatggcacaggacagggagcacagtacaggatggagagcacagcacaagatggagagcacagcacaggatggagctggggaggcccttgctccacccagcaggagcccacaagcccagcccctggagcaggaatcttcttacctcctatgaggatcacacacgctaagctgtgtaaactggtcgtgagcatgaagtgatactggatggcggcctggtgtcactttcattattaacaatttgaaaaagcagattaacgcaccaggcccggcttaactctcttggggctcccgtgaggctcaggtgaaataacagaacacacagaacatcctaaactctcggtgtgaattaactgcccaagtcctctaaacgccctgccccttccagaggctgttttaaaagaggagctgacccaggagcgtttcccccttgccaggctcctgtgctgaggcccccagagtcaagagccccagggctgctctccatgtctgtggacagcgggtaactgttttctaaactgttgaggattaggaaggacagtgagagcctctgccctcagaggaacaggattccacatgggatcctctaagttagcaaaaaacaaacaaacaaaccaaaaaagccctataaaaatgcaaatgacttcaagccaaagtcttcaaggtaagccccttccctctagcctagcaaagggcatttgggagcggttggctgggggcatgtagaggggtaggacctggcctgcaggccccggtcttagcaagacctgcctgtggggcaaacaaacccactg

SEQ ID NO: 28797 - DNA, 2632 bp, Bovine  19866880741243
  misc_feature (1)..(1): n is a, c, g, or t
ngggtaacctgatttatggtagagtgagcacagcccaggcgcagagtgtgggcaggtgaggagggcccggggctgcaggggtgtggccagattgaacccaggtgtcagcagtgactgtctgagcagccaggcaaggtgctgaggactctccagcctggctcgccggtccctgctgggactgcagctgagggccttgggggctgcagggaggctcttttagtaaatgcttgaggatgaaacgctgggctttctgctgttgttcctgtctcactgtccctgcattgtaatcgtgtgtgagttctcgtccactcgcaccgcttccaaagtcacgatggcagagcccccgcaggattcctccgccaggcgcctcctctgggactcacacgtgtcttcgtcggctgcctttatatgtgagaactcagaaacacgtccccccacccccaccccctttttttttttttgcaccgagctggcctgcttctatttttagtttcccggaagcacatttgtgcagttctcgaaagccaagttcccccactgctcgccaggtttttatttacagcctcttgctcaatttgcgcttgcaaatatttcccaaagacagtttctcttcttgggggatgcagaacaaattagaaacaggcaaaggattttctgaagagctttaaggagaagttccgagatagagagtggggagtggggtggggacccgacgcccggcttcatctggactcacagagtgccgagtgcagatggtctgctctgttgatgcactccagattcccggaaaagaacgccacaggcttcagggaggccagaagagtgcagccggccggtggatgtgtccctgcaccagagtcaccgctgccctcctggactgcccggagaggcagggagtcggggtgggggcggtttggggacccagagggctgaacctggagacccacgtgccatctaagtcactttattttctgtagactcaggttcggaatgctttcttcactgttgatagtgtgtttattactcaggagactgttaaagaaagcctgtctcttccgagcggctccccagaggctcagatggtagagtccgcccgcgcttcagtagcttcggcgggtcatctaatccgacccttgaaagacgcgcaccagatgagaatcagacttgggtggcgggtagtacagcggcggctccacgcccgtgcagtccggctgaagatacgattgtccggtttatcgtcggtttgcagcggtgcgtggaacggctcttgttcgctctgacgttttcccatgtcctaccctcgtcactcacggatgggatcgcagagtcggacacgactcagcgactgaacaacagcgatgttgatgtgagaaatctgtttcttttaaaatgactcattgtctgccatcttttatcagtttaatcccgtgcagttaccaaaaaaatggatgttaatagatgaaacaaaatgttgatcattgtacaaagctgtacatgagggtattcccagtaatcatctctggttttgttccacggggaaagggctttttgttttgcttgtaatgttccagcctgcctggttcttcaaaacctcctgtcatttccacagttttgctcccattaagcacaaactttgtccacatggcgtgcttgagcaattctatggattttctgtttcttgagtgagtatttcctttagtttctttaactctttattatcttgttcctcttttttttcttgaatgagatatggcttaattttttggttcctcttcgaactttctgagtccaatgcttgtttcgattcctttttaaaaacattgcctaagtgtgtaagactatgaattactctctgagctcagtgtaatccattcctgaaattttcagtgtatgatgagctcattagatctattttatgagttctcttcactttcctctcagatctggagctttggaaccaggcgtccggctgagctgctgcttctcttccggtctcactcgtctctttttccgtggcagcgtgcacagggcttggggcctgcacgctgggtcctgtgtatgtatgtggaaacattctgtttatgtgccttgctcgtcttaagcgttttgtgggagttcgcgagtcataaattctctgattgcacagcctttccagaggcccgcctgctgcagtgctcactgtgtggctcaggggcccgcttgctgcagcgctcactgtgtggctcagggccttccgtgtccacgttttgtgtccctcgcgtcaggtgcaccggagcaagttcaggtctgtggtcagttctgcgttcctgctcatcccttctgacttttctgcactgtccgtcttggctttctttagaggacacacacacagctccagggcacccttttctcacggtaagctgtgctccaacgggcttccctggtggctcagtagctaaaaaatgcctgcaattcaggagagctgggtttgacccctgggtcagggagattcccggagaagggaatggcaacccactctattattcttgcctggaaaattcaacgttcagaggagcctggtaggctatagtccatggggtcacaaacgatgactgatttacacacacacacacgtgaaatgggcctcgtcttg

SEQ ID NO: 28798 - DNA, 2184 bp, Bovine  19866880885728
  misc_feature (1)..(1): n is a, c, g, or t
ngtagtgaaggacagggaagcctggcatgctgcagtccatagagtcacaaagagttggatataacttaacagctgaacaacaaccaagcctgtaaagagggtatgataatttttatattttacagactaggaaactgagggtataaagaggttaagtaacttccccccatgttccacatctaggatattatagagcaagacttctaactcaagactctggctccagaagccttgctgtcaatgattttaactctactgtctttacaaattctctgtagctcaggtttcagctcaatgattactttctcaaggaaccattcattgaccaccctagcatgactaatacacatcccagacccactccagttcctgtttgttatttctattatgttttcctagacttaactcaacataaaatttttttttttgttgtctttgacatttagtttgtctcactatatgagaatgtacactctttgacgactggaaccgcatctgtcttcaattcactgtgttctccctagtacttgtaaaagagtcctgaccattatagaagctctttattttttttaatgaatgagttaccaaagcattcattctctagaaaaaggaatattaggctatattcactttgaaaatggtttaattattatattgaataagtagttattaaaatgtttcatttccttttttctattacctaagtagggtttcatatcaattcatctctgaaaaccatcatattaaaagggaaacctagaaaatattggggatgttatatctgtttctttaattatctatcatcagtcatctctctccctaacttacctatctatacacatatgcagacacatagcctactaaggagctgtttcaccaaaataggaaaaatcttggtcagtggacattaacataacttgagatgcttaaatggagattcaaagcttcctatccatttcttactaagccggtttgcattgtaggagcctctgattgagagtagtgccagctccattatattaatagaaagtaccatgtaatattgtccaaagatatgcataccattgatattccccaaaacttatcccaaaggagcctgaggcttttagccacattagaaaaaagaaaatgacagataattttaaaaaaagaaagaaagaaaaacacagacatttcagggattattagattagattaaacttgatctgaactaatagtatttattggaaacaaattctacatggttcaccagtcagaatggtgaatctgtaggtcaaatgataaatgaagttttagaccaaatccattatgtgcttagtccctcagttgtgtccaactctttgtgaccccatggactgtagttcgccatactcctctgtccatggggattctccaggcaagaatactggagtagattgccataccctcctccaggggatcttctcaaccctgggatcaaactcaggtgtcccacattgcaggcagaatctttaccatctgagccaccaggaaagccctaattttttttctaaacataaccaccccattagatggggcacatttaaaaaaataaaacattactgctgataggaatctgctgcccagcagggccagctctgtgctccatcacactctgagcacccaaagggcagacacatcagggggctggcaacctgctcttgggaaatcaaccagaaggtgtgtctgatgctctggcttccacgcccctggctctgtgagtggacttggtctctgcggccacagcctggcgtgggagggcttgggtgcaggagttctcggggacaggttacccgctctcccccggggagcccaggacggcccgacgcggcccgctcacctgtgacgaggggcgtctgcgtgggcggctgctccaggaggaccacatgctgcaagagggagcccggggctgcccccgcgtcccgctccagaggcgctgcgcccaggtagggggcgaggtgggtaccagggaagagggagatgcgctgctgcagggcggggagggccagtctctcggcctcctgctggccggccgccccctggacagacagacacagccaggtgcccgggtcaggggcctgggggggtggctgccctgcaccaccgcctcacagaccccgggggcgcccacttaccgtggaggggccggtggcgggcagccccagt

SEQ ID NO: 28799 - DNA, 1233 bp, Bovine  19866880374210
  misc_feature (1)..(1): n is a, c, g, or t
naaatcattgcaactgcctacatctcaagtactccactactggttaatggttttctctgaaatttctgaaccaccctaacaggtctaataacaataaaccatttttgctctctttaaattatccagcctatggaatatctgcacacaaaacttcagctttagactttgtctaaacctcttaagtcagcttaaaattattgtggttctcaatgcccagtgcagtgttacaaataaaatctattctgattctttagctccaaacgttaggtgaccatttcagtacagaattggacctcgtgagagatgaattttgaataatgcataacataacattaacacaatatgatctgtgttaaatagaccttggctatgacaagagtgaaagataatcggataatcacaaggggatgtgttttttttgcagtattctgtagttttccattcaaaaccaaaggtgaagaataaatttcaagttactcactcatggattctgtcaacttggccatcgttgaaatttcctctttgtgcttttcctggaggtgagaaaaaaagataattatatataaagcacatcttaaatatgaatcaacacagtgggtctgtaacaacagctctctgtcacacccctttctcttctgttagaatttggtcaccaaagatgaaatgagttttcaaatctcacattattgctctatgatcagccagtcactgacaagagctgtttaggaccctaaaaaatgctagggctcttggaagtgatcttggatatatgtaattggtgacgcacgaccagttttcaaaaacctctttgacactggagttttgacatccttatgccaatctttcgctctctattttctcctgttggagcttttttggtatttttggagctggtatttttgcagttatttggtttctttttttcctaaaagctaagtaaatctgcttacacatttttctttgtcttttttttaactcttggagttttaatttttttttttttgaagtaaatcagttttaatgggtttatgaccctattttggggtgaaaacattttgtttcaactgggatgtaggttataacccactgaatttgagaaccagaatgcccatacataaattatgaaaatgtagtacgcatgcgtgcatgctcagtttctttgtgaatccctggatggtagcccgccaggctcctctgtccatgggatttcccaggcaggactactggtgtggg

SEQ ID NO: 28800 - DNA, 1004 bp, Bovine  19866880404207
  misc_feature (1)..(1): n is a, c, g, or t
ntgttaagttttaagccagcttttttactctcctctttcactgtcatcaacaggctctttagtttttctttgctttctgccataagggtggtgtcatctgcatatctgaggttattgatatttctcccggcaatcttgattccagcttgtgcttcctccagcccagcaatttccatgatgttctctccatataagttaaataagcagggtgacaatatacagccttgatgtactcctttcccgatttggaaccaatctcctgttccatgtgtggttctaactcagaggaaatcaaaaagaatatgattattagccctcagtaggaggtgaaatttcccactcatcttaaggtaacttacttacttcccatgacccttactctatatgtctgagaatatggacccctcttcaatcagtctttccagtgggatcacttgatgaaaccattggctccttcaatgtccatctgtatgggcaccatgatggatattgtctgatgccactcaacctcccgaaagggaaggaggggtgctctcacagctccaggacattgctggaacacatttggcagcaagatattaagcaacagagattaggctcaggaatctaatattcaactgtgtgcttactgttgtccaaacattaggaaaccatacccggaattagtggcattagatatgtgctcaagggcacatactgaaatgtgatgctcttcacctgagagctttctccacttgaaacactcgtaggtttactggaaagacgtgttcccaggaagtcaggtccatttagtctgctgccagggaatgccagacttctttcttatccagcctctgtgtgtctgtgtgtgtgtgcacgcatgtgttcctgtgcacacacattgttggaagaaggcagccctgggtacagcctaattttatctggaagcgatgcttagctcttgttcttctggaccatacaaatctggaaacaatcaaaaccgggtataattagaaaataactag

SEQ ID NO: 28801 - DNA, 1221 bp, Bovine  19866880521142
  misc_feature (1)..(1): n is a, c, g, or t
ntgaaaagtgaaagtgaagtctctcagttgtgtccgactcttcacgaccccatggactgcagcccaccaggctcccctgtccatgggattttctgagagtactggagtggggtgccattgccttctcctcctgtaaccctactgaatttattatctccaaaacttttctcatggagtctttacggttttccatatataatgttgcatcatgagtatgtagcaaccattttacttctttatttccaatttggatgctttttatttctttttcatgcttaatagtttggatatctgtttttaaaagatcattcttgtgatttggggagtggtttggtaaaaggcaaggggggaagatgggagttgatttagcaggctgttgtgttagtctaggcaagagatggtagtgacctcagatagagtaatgaagagatgccagatgtgagttcttattttggaggtggagttagtgttactcactgattgtttgagtggaggaatggttaggcagctaaatgcatagtagtgggttcagttaaaacaggaaaagatggagaggaggggctttagggtaaagaatgtcttttggactgatcagaaataaccagttttaccctctggccctttccagaagaagtttgctgacccctggcataaacagtgctcccaaggaaggaaagtggccaataaaatatatgaccctgtttatgggtataacttgctaaaaattgcagctttcataataaaatgattttcactcttgaaacatatttgcaagtttgtgttagagagctgtctaaaacattaaaatttcaaacccctctctctaatgtaaatgctaatgtagcttttaattgaagattaaagcttggaaacatcctctgaataaatctttttacaatctgctcttccaggtgcgtcagcagtttcctgctccccttggttggtcaggcactgaagctcctacacaagtcactgttgaaactcatcccgttcaagaaaccacctttcatgtagcccctcaacagaatgcattgcatcaccaccacggaaacagttcccatcaccaccaccaccaccaccaccaccaccaccaccatggacagcaagccttgggcaaccggaccaggccaagggtctacaattctccaacaaatagctcctctacccaggattctatggaggttggccatagtcaccactccatgacatccctgtcttcct

SEQ ID NO: 28802 - DNA, 1717 bp, Bovine  19866880560203
  misc_feature (1)..(1): n is a, c, g, or t
nttgaaaaccatgcgctagtcctatgacttcttttagtagacgggttatcttttactttcatgcatgcaagatttcctcccttccatttatgacaagggacagtagtaataatttacttcaagcaaactcccacctccaaaaccaagtcaggccccaggccttgcctaagctgtgggtgatgtggtcaagcctataggctctggaatcagactgaactagctcaaccccagcgttgagcttcccaattgggcaaactacttaacctcccccagcaccaggttctgctacaattagcaccctcccttacacggtcccttctcagcatggttcctccctggcatggttcccaccaggaccaaacacagcgatgcactccatgtgcttagtagacagcctggcactcagtaagcctctaaggcaagcagctcttgctcccttaaccaaactcatccctccacagcaggtgtgaccaggaagaggtggctttgccctctgtgtctgccaggcgtctcagctaacggctggagatgtggggagaaggccatgactcggtgtgacagataagtcaccttcactgggcagcccctctgattgcatggacctccatgcacagcctacatgtatgaattccttcaaaaaagtgcatgaaataatccgctttgtttgaaaagccatgagaaactaacctctcaaaaaaaaaagaaagaaagtgaagtcgcccagtcgtgtccaactctgtgaccccatgggctgtagcctagcagggttttctgtccatgggattttccaggcaagaatactggagtgggttgccattcccttctccaggggatcttcccaacccagggatcgaacccaggtctcccgtattgcaggcagacactttaccatctgagccaccatgaaagaccaaaaagaagctgttccttaatgaagagggaacattctagaaataacacctaagccatgaagattttctaaccccaaatcccttccagcttctcaggatgaggctaccccatcctgataaatggaaagaaagacttttttccagttttaatggagtacccatggcattgtcagaccttccctagtaaggctcccagtgaccccgaaaggacaagcaaagtcccccaaaggacacctttacctgtgccctttacacctgtaaaggtgactcgtgtactgtgggcaccttcagagaaggggctcacgaccttgcctttgcaccaggcctcatacatcacgggacactgatcagtctactttgtggaactggccaaaccacctggaatccaggagaatttccacagggaaagcaataggaatgagctttagtcgagtgcctcagagtctgcaaatatgcttctttcctgtgttttgtcttacgaaacttgactgataaataccgcttgattaaggtggaaggatattctcaccttcaagaatatgaaaagggtgcaggaagggtaacaagagtaggactctggtgccagagtatgatgatgcagaaattacccaccctggcctgacacatattcctaatctgcaaactgcggcaataacgaaacctgttgtggagattaaacgagatgctgctgttcagtcgctcagtcacgtccagctctttttgacctcaaacactgcagcacgccaggcctccctgtccttcaccatctcccggagttgctcaaactcacgtccatcgagtcgggg

SEQ ID NO: 28803 - DNA, 1164 bp, Bovine  19866880599334
  misc_feature (1)..(1): n is a, c, g, or t
nctatatataaaataaagagccagggcctattgtacagcacagggagttatgtttgatatcttgtaataatctataatggaaaagaatctcacatatacatatatatatataactggaccactctgtggtatatctgaaactaacgcaacattgtaaatcaactacaccataaattttttttttaagttcctagatgaaggaaaaccaagaaaacatgttactggcagacctaccctgaaagaatggctatagaaattcatgaaacagaatgatgataagagaagaaatcacgtaagattaggaaggaagcaagaagagaaagcataagcatacagataaaaataatagaggtcccttctcttgcattttctaaattatgtttagaggtggaagcaaaattataacatattctaatgttgttctcaatatatgtagagaaaatatttaagacaattatatcataaacaggggaaggtaaaggaatgcaaagggaggtaagatttctgcacatcacttgaactggtgcagccaatctggaaaacagcttggcagtttctgaaaaactaaacatatattatacctaccatatgagccagcagtcacattcctgggcatctatcccagagaaattaaaatgtatattcacacaaaaacctgtacacaaagatgtataacagctttatttgtaagagtcaaaaattggaaacaaccaaaatgtctttcaataggtaaagggttaaacaaaccatagtatatcgatagtatcaaatactagtcagatataaagaccaaagtgtacaatttggatggatcttaagagcattatgctgaggggggtaaagatcatttcaaaggtaatgcactacataattccatttatataaaattctcaaaataacacaaatcatagaaatagagacaaaccagcagttgccaggggtcagtgatggtagagatgggctgtaactattaagaagcaggacaaagatgatctttgtggtgatggaacagttctgtaccttgactgcagtggtgttacatgaatttacacagctgataaaatggcacagaactgtactaaggtcaatttcctggttttggaattatactataagtacactgggggaaaccgcatgaagggtacatgcacctcctctgtacta

SEQ ID NO: 28804 - DNA, 1124 bp, Bovine  19866880792758
  misc_feature (1)..(1): n is a, c, g, or t
ngagaaggaaatggcagcccactccgtattcttgcctggagaatcccaggggtggcggagcctggtgggccgctgtctgtggggttgcacagagccggacactgctgaagcaacttagcagcagtagcagcagcagcaactcacgtcagaaatgctagctttacctgataagcacgaggttaagttttattagcagactcctgtttaagaaataaagagagaacattatgtttctttagtcctcccaaaataatagaaacaaaaaaattgatgtttaaaggtgtatgattcagatagatttcatttatggaacatccttcactccccattgacataataaatgagcttatactatttttttctttcttattgtctttgtagatatctgatataacccatagtaataacgttgtgtttaaaatcctttcttctcacattcattgcatgtttgttgttcactctcattgtatttagcgtaaggtgggcgcttttccgttcaaggggcataggatgctgggaaggacattctaagggtgcttgacttacggtctttgaacataactcccctcttcttcctcactcttgtgtgtttattttgaagttttgcttaagtagtagagaaaatgttgatagcatcactataattatgtatttctgctttattgaaagaaaacacaaaatattagctacttggttaacttataataattactatttttgtttttaataaactgacttcagtgattgcaggatctgggttatttgctaccagccatggtctagttaaaaaagcattcagtttaggtctaaaacaaaatcctgccaaccctccattttccccaaaaactgaacatacatatttgtatttgagcttcctttgacaatgtctttagtgctcagcacatttattcagtaagtgaatgatgaatcagtggaattgagtggattgatcttccatcagaagaatattctgatcatagcttcttagagggattttcatagtcacatttgaattctgacatcagttaccttttgcatccctttagtggccgctgcttaattggatcaaaactgttacttggaccatgtctctggggtatcttatgtcacgtgggagctgtgtt

SEQ ID NO: 28805 - DNA, 861 bp, Bovine  19866880894981
  misc_feature (1)..(1): n is a, c, g, or t
nttttctttcctcgtcttctttccggtgataaatggtatatttcctgccatatcagttaaacaaaggatgtcaccatcatccaacatgagccagtgactcctgaacaaacgcaaggctgaaaagtatctgccatctagtagccatcagcctgaggctactccctagggtgagccctgaggaaactcaggatgtgaaaacacaggatactggccccaggtatgtgaggtgcatatcaaagaaatgatttcagtgagtccagactcttgcatcttcccacatgtagaaaagctccaagttccttaacttgggatacctggttttctttaatcaaaaatcatttcttaatgttccaactacttgccctttgctgtcaaactcctatacatcctagttccttccctcacctccttggagcaacttctcagagctttctgaaacactgccttccaggctaaagtcctcattttgccccaaataaagcttaacttgcaactctcatattgtgcaaatttttttcaacacacagtaagtagtcttaaagatctgttgactgactggttcaaggcaccatgataatccagggggcagctattaaaggtcaatgtctggaaatacacagatggtcaagagatgttttaaacaaaagcaaatgttacagaactataattattctccccttggttgcacgaaggtttgccatgataagccggctattcagtttttttgtactgtggcttttctccagagtacaccattttaatttcttgatagcgtcttttatttaaaggataatagatgagactattaatttaatgtaagaactaaaacccttctggacggattatctggaattccaaaag

SEQ ID NO: 28806 - DNA, 796 bp, Bovine  19866880966513
  misc_feature (1)..(1): n is a, c, g, or t
nccaaacagcattgcagcagacagaccacaggggcagggaagcgtgagaccatttgcagtctatgggctgttaataagtcagcctcgggagatacacaacaccaaatggggcatcatagttgcccccaagggctgcctgaaaccatggcccatgccagcttctgtggcagcagagaatcagaaagagcttactgtttaaaaaaagcctgatggacttccctggaggtctagtggttaagtctccacgctgccactgcaggggacatgggttcaatccctggtccagaagctaagatcccacatgccacccagcgcagccaaaataaataaagtgaatataaagagcatggtgtggacattgagcatgcacagcgtcaagaaacctccgaagccactgtcccaaacccctccctccacccagcttccctgagagctgaccaggtgcagagtcacatcagcgagaacatttcctcccttttgaccaaaagcaacttccttgagaagcacatctcagccacagagacttccaaacccatccaaatgcagacttgaaaacctaggagcagactggccctccatccccagtcggaaccatgcagggcttcatcagctgtactgtgcagtcatttgcagctggtggcagggcttccctggtggctcagatgatacagaatctgcctgcaatgcaagagacctgggtttgatccctgggttaggaagatcctctggagaatactgggactactccagtattattgcctgggaaatcccaggacagaggagccggcaggctaca

SEQ ID NO: 28807 - DNA, 581 bp, Bovine  19866881023694
  misc_feature (1)..(1): n is a, c, g, or t
nacatttggtcctggaaaaatgtgaaaatcggccttcatcacattagctttctgtcctgtccttaaagaaggggtctctccacctgggatggtaatgactcacagataggggcagaagtgttccaaccctattattcttaattaaagtcactacagatggatccatgaccttaagaaaaacatttctgacctttccatgagtaggatcaaactcatcactttattaatattcctcatagttcttctgccagctctttctaactccattttaaatgtgtttgctgtgtttttttttttttttgtagcccagttcccttctgctttcaaaaataatcagtattggattcccctgggcatcaggcaccaccttttctgttttattcccagcatgactgtgttcattaaaattcactgcaaactcccaaagaaatgcattcatgtatttggggattccaaggtagagcagcagatccatcctcttgaaatgttggataaaaattcagtattctccgacatgaaaacatcagcatcctttacaacatccccattagaggacggataagtgcaccctgggggtctac

SEQ ID NO: 28808 - DNA, 1799 bp, Bovine  19866881161438
  misc_feature (1)..(1): n is a, c, g, or t
nctcgatccctgggttggaaagatcccctggggaaggaaatggcaacccactccagtattctttcctaggaaattcccttggacagagcagcctggtggatttacagtccatggggtcacaaagagctggacgtgatttagtgattagataactaaagagaacgtactatatagcacagggaattttatttaattctctgtggtgattaaaatggggaaggaagtccaaaagggaacggatatatgtatatgcatgtgtatactgattcactttgctgtacgcagatacgaacacaacgctgaaaagtaactatactccaataagaattaatttaaaaagaaatacaaatgaccaataattactaaaaataaattttttaaaaacctctaaagcaacaaactttttttttaaataaagccagtgtgtttatttttaagaaagcatagcttctccctgctttctcttttggtttgcttaaaaaaaaaaaagactttcaactacagataaaaagctcccaggcagtatttgaagatttgcaggacttctgtagcaaagaaaaaagtctcagaaaagagccttctatccccagggcactgctttttcttgccttctttgagggcctttgcttggcgtgtttgtgtattttttttattttcaggataccactgaacatgggtatctcagaaataaggaacaagggactataaaagtcagccaagttcttctgatattattcctcctttactgtaatctctgttctttccatgacattcgaaaattctatttagcttgactttcaaccaactaagccagtgacaggtttatgagctttccaggcaggtctcatgtgggtctttgaggaattagacttgcttctcagggagactggtagcctgtacatctgagtgttgaacacatcttagaactggctagattgtcacttcgctacctgttgagaagcatcggttcttcaggacccttcaaagccctaagatacctcatctgctccatcctaacgctgtgtcgctcacacacactcacacgtgccagcctgtggcctgcagctgtataaccctccgtgctgacatggtggctacagacccaaggacagcccccagaaaggaaaccccctgctcccaactccaaaggaagaaatctagctcttcccttcaccatcacacacacggtaagaaaggaaccacagttagcggtgctgacgttaagacaaaaaatgcacaacgtggcagttgcaagttaagctgtattcagggaaaatgaggactatagcccgggaggcagcatttcaggtaactctgagaaattgccccaaagaggtaggggggatgttggtatatctgtgattttggtgaaggaggagtttatgcaatcaagcgtgtatttttgcagaaggtttctgctagtcacgagaagcagatgtcaccatgaaggaatttagtgcttttctagacatgaggagatgcacgaattgggcttacaaaatcggctcctgaaaatatttaactatctgaagacctgttctgccagtttttccagagcatggagcacctcctttctgctatgggtattaaaaatcagcagctgcagcaacagatgatttaacccttatagaggtagatggcaaatggccatggcaagtgccaatttgtagttgtgttgtagccacgcgttctgggaaacaaactccctcagaaggacgatgcagatagtggagtgcagtttattacaccggcgggcccaaggcagagtctcctcttagccaaggagcccgaccagtttt

SEQ ID NO: 28809 - DNA, 798 bp, Bovine  19866881266464
  misc_feature (1)..(1): n is a, c, g, or t
ncttctatggggtggccacttaaaccacttaaaaaaaaatctcgattattgccgttaaatgtggtcagtactacttctgtatttgttgcctccatttttatttctcctatctataattctataaagatctcgtgggaagtgaaatgttatattcataaaaacgctttgaattttttgcaggaaaattcacttttctccaaatcagtaagggagctgcactactgtataaatagtggatagcatggattctattttcccagatgacaggacttcaggagagatgatgggggaagcaatgcagatgatctatgatttgctggaaacaaagaattcaagaaacacagatcaggtgcggggctcatctagggcttcctagtcaccagccggtgtcctcttgggaaggtgcagggggaaacaaagtggcagaacccccttgcaaaacctttcccagaagcctctcatgcacttacagaagtaattcaagtgagaaaagtgaagattaaatggttgttggactaaaggccagaaaaaaaaaaaaaaaaaaaccaacaaaaaacctcaagcatcatgggatgggtaatgtatctcttaagcagtgttttccagaataggtttctgagatattcaagactagagacccggcttattgggggtgagtgttatgaggattgcaacagggcggtggggttagggttttgctgagtttcggttatcacacattaggatccaggtttatttgatgcatccttctatggcatgtagtgggcaagaccatgccctgtgatgtccatatcctag

SEQ ID NO: 28810 - DNA, 1604 bp, Bovine  19866881357027
  misc_feature (1)..(1): n is a, c, g, or t
natactgtgattatgtgatcttttggttagtgatggtgggtttttgttctggaggttgtaggattgtagttcttgcttcttctgtttgccctctgatggattcctccttacccattaacaaactttaaaaatacattaaataacccccactttgtaaagaaaagagcacacatttcaaagcctaacatggtatcagaacaacagacctgagcttgaagatgtactggaggtggtgcctgaagactgtgactgttccatagcaggactcgtggatacactattactcgtatttgtaccttcatcagctgttttcttgaaaaaactgtgctgcagggcatagtaaggttgaattcgagatttggggtcatagtcaagcatccttaaaatgaggtctttgaacttcaagtagtcagctactgtatggcccgactccccagcacgccgcccaccaggccctcctgtttctactccgagaatattatgcagtttacgggttcctggtggtttgtactcctaaagagaaaagagacaaaagaagggggggtttctctaaatttgatggaatgtgtaaaagcctacataacatcacatcaaataaggttccttatagggtaaggccgagacctttgttaaaaggagtgcttcatggtctgctcctctggattttcacatgtactactctaaaagcactgcagttaggagaaattcaaaataactctgagcacaaatgaccataaagatcatctagtgtagggatcagcaaactctgccctgtttcagagcctgttttatataaacagcccctactatgaatggttttacatttttaaagatggtaaaaacaaacagaaccaagaatatgcaacaaaatctttactctgtggtcctttacaaagaaagtgtaccaaccagtggctacgaacctcttttctgcccaatacacctgtgaactcaggtgcacttcctaggtaacagtggctcattaaagctttagccatcactcctaataaagaaccatgggtttaacaccgtaccttgcttatatccagtttaaaaaaaaaaaaacaaggaaattatttatgcttcactttagaaaatacgtttaataaactgcctttaacatgtgctgacattttagggaaactcattttaacaggtaatctttaaaatccctatgaacactgaatttcttcagaatagtattagcagattttacttctaggtgcaatgtagcaatttttaagagaccattactcttcaaaatcaagaacaagctaggtaggcaaaccgcaaaatcactgccttttaaaaacctatcagggaccttggtggtctagtggttaagaacccgcctcgtagtgcaggaaaggtgggttctgggcctggtcagggaactaagaccccacatgccacaaagcagcagagcccacgcaccacaactgctgtcctgacgctcaggagctcgcgcaaggcaatgcaagatcccccacgaggcagcaaagaccccacaggctgccactgagacctgaggcaaccaaactaattaattaaaaaagaaacctatcagcaagcagaggactaaagaaaccacagctaactaaatt

SEQ ID NO: 28811 - DNA, 1232 bp, Bovine  19866881407862
  misc_feature (1)..(1): n is a, c, g, or t
naatgtctgcactctctgtgacccttgacgagcctcttcttgagatacaggcagaagtgatggcttgcctccacttaggagctttcttcactgaggcctcccaaaacaccacctgactcagaaggtggtgggtcccacatgccgcggcctctcgtggggtgattgcaaaacaggcaactgagctacacactctatagccactcaggacatggaccagccctcatcccaagggtaagacaagaaagggggcagctaagttccaatagtttgggcacttcatgcaaagagctgattcattggagaagaccgtgatgctgggaaagattgaaggcgggaggagaaggggacgacagaggatgacatggttggatgatatcaccgactcaatggacatgagtttgagcaagctccgggagatggtgatggacagggaggcctggagtgctgcagtccatggtgttgtgaagagtcagacatggcttagcgactgaacagcaaaagccctttagaccttgaattcacagtctgatgtttggaggaaatagggttcccaggtactgcagatcctgaggggggagaggtctctgtgtatgaacacttgtggggcacagtcatgcctgatttggagacaggatttcttctggaaaaaggtggcttctacagacagatcttgccttcttctctgcagcccatggcaccagcaacccacagagaaggcatgcggtgtcttggctaagatgccttgagattctgtcactgtttgtgttacaaataagtagctaagtttcccagcaattattgccatcgatgctaagagagaggaaaaactcatgtgagcacagttttattttttttaataagagacaattgttttcttaagagaaaagaaaaacaagcaaaaaagactaaactcatacttccgcatgtactaagaagagaagacagaagacgaagaggaaaaggaagaaaggagaggaagatgaggggaaggagaaggagaaagaaaaagtacacctgacccctgggtcccctttcccaggatgggagggtcatgtctggaatctcaaaagctggggcttcagaaggcacccctgcatccttgtttcctggaatctactaaaagaaaatggcaaaccagccaagatattcgactgaggtttgttaagaaaacacaccctcggtttgggttgttttctgagaggagggtcggacagatgtggtttaagtacgaa

SEQ ID NO: 28812 - DNA, 766 bp, Bovine  19866882180975
  misc_feature (1)..(1): n is a, c, g, or t
natattgaaaacaagcaaaacgctgtgccaaagggctagttaagagagcatccccaggatattggactttagataagttaatacccacagttacaaaatgtaggtttaactatccatacccttgtgcggattctgaaacaccatgtacaggcatgcactacccccagtcggaatgatacgcatttgattgtaaccacagaaaagtggctcttctcaattttagtcctataatatttcatctttaaaatgggcaaatcttaggaaattctcttcatcttaaaattcaaaacacattgtgagccaaataccctcattgccacaggtatgctaacacagaccgtatctaaacatagcatttgagggagcctgaaatgatgtgaattccctgtctcctggatgggtctcgccatggatcaaatcaccctttcctgcctactaagatcgcagtaaattctttctgtccttcctttccattattctcttccccaggatcaaactttcagcccacacagagcactgctggctccatatttattattttttttgctttatttcaattttcttctttccaaaatacactgtgtgtgtgtttcctatttccactgcgtgggttcacccaactgctgccacagctactggtggcctgcttcttctccctcatacaaatacattttgctctttaataacccccgttaagcaattccaacagccaatctaccactttgcaaatatcattaagggagaaaatgccctagtcaggagtttt

SEQ ID NO: 28813 - DNA, 1050 bp, Bovine  19866880344807
  misc_feature (1)..(1): n is a, c, g, or t
nggggcaggaggagaaggggaaaacagaggatgagatggctggatggcatcactgactcgatggaggtgagtctgagtgaattccgggagttggtgatggacagggaggcctggcgtgctgcgattcatggggttgcaaggagtcggacacgactgagtgactgatctgatctgatctgatacatcttttttggttgcttttcaggggcggttatttgtttatttctggctgttctgggtctttgttgctgcccatgggctttctctaactgcagcgagtgggagctactctatggttgtggtgcacaggctctcattccggtgtggagcttctcttgttgtggagcataggctctagtgtgcaggctcagcaattgtgcccagtggcttagttgcctcaaggcatgtggaatcttccccggttctccggagtcgaacccgtgtcccctgcattggcaggtggattcttaactactgggccaccagggaagtcctccatagatatctatacgcattcatatatatgtgtgtctatatatatcagtacacatatcttagatgtatctcctaggaataaaggtgactgtttccatcactgggcacactctgtcaattggcataaaccaaaatgtcttagatcaaattcgtacccctccggcattatgtgaatgataaagggaagggatctcattttgtcattttcctttcaaatatcaagttgtattaaagaaaacatttttctcaatcacaggtgcagatgggaagagtgagtgacatcttgatgtcctctctttgataagtcttctcccttggcagcttccagtgtacttttaggaacaacctttcatttatcttttacagggtagatctgtgtcttggagccagcagagctacatttaaaagtatgcttcccgcttgagactctcagaggagcaacaaagcaaagaacagaacattgccctgaatgtttggagaactcagatggaggttaagccatcaaatgtagctgtcattatcacaagcccttgcatttaagtttccaaaacactt

SEQ ID NO: 28814 - DNA, 753 bp, Bovine  19866880402346
  misc_feature (1)..(1): n is a, c, g, or t
nctatggaagagcccgagatgccgacatatgagtgatgtcatattggacttccgccaagctcagtagccagctgaatgcatgtgcatgggagactccccaagcaagacaagcagaaaaactgcccatttgagcctcagaaaccttaaagtcagccatggatttatgggaaatcataaattactatctagataactaaaacaacatctatccactttcccctctgctagaccatgagctccttatgcgtaaggatcatatcaaatttacatttgtatcatcagctccagaagcgtcaattaactcatacattaatacactagtggagtatgtgagtggctaaggcagagttgtttgaacagaaagctactgaatgaattattttctatctctttatgaggatactggacatacagaatcaaagcccagggtacaaaaacattaatacaatcttacaacctaagcaagaggaccccatttttgaaagctccaggcgcagcatcttggttaaacatttcccttccaaaacaaccctggatccgtgtcaacttctaagacactggcaacctgggcagcctgaggaaaggaactgggaaacttggatttattgcaccaagttgaaactgcagagggaaacagacgggagataaaacattccttgatgttgacatttttctacccattcaagtagtgattgctgctcaccatctgtcttggctccagagagttgggtctttgagcattgaaagagcttc

SEQ ID NO: 28815 - DNA, 1779 bp, Bovine  19866880491217
  misc_feature (1)..(1): n is a, c, g, or t
ntgttggaaggaatgatgctaaagctgaaactccatactttggccacctgatgcgaagagttgactcattggaaaagactctgatgctgggagggattgggggcaggatgaaaaggggatgccagaggatgagatggctggatggcatcaccaacttgatggacgtgaatttgagtgaactccaggagttggtgatggacagggaggcctggcgtgctgcgattcatggggtctcaaagagttggaaacgactgagcaactgaactgaactgaactgaactgaatattactgatgaagatttttcttcttgttgctgttttgtgttttttcaatcttctcttcaaaaatatttatgttaggaatgtgttaaatattaatgtgcctctgataaatttgctagcttttgaaagatttcgctaccctaaatagacttttgtttcttcgacttaccttctctcagatcctctgcctgtatctgtagaaagttgaaaactagcgagaaatcatccatttaaagcaaatgcttttctagagatataatagttacagtgatagaccaggagcaatactcgtatcacatgtgtagaggaagaaaaaagatgcaaaccttacctgacagccacttttaaaaaatgtctttgaatgagttggtgcaaaataaaatccgaggtagatttaatcacaagaggacagttttcagagcttaacattttctttcataaaatgaccaattcatctcattcagaatcttaaaacatttgtcattttgctcagctccaatttacataaagcaaagcttctcaagttagaaagaccaggcatgctggaatgagacccagttgttttagaatcagagctctgttgatggaatatttcttaacctctctgacacttggttttcttgtctgtggaatagatgaatgtgagcgtgcatgcatgctcagtcatgtcccattctgcgaccccatggagcccaccaggtttctctgttcatagagttttccaggcaagaatattggaatgggctgcctttttctactccagagtaatccctatcttctggagagaagaggccttaaataaacagtgtattacaatgggtgttttaagaagtaagagtttcctttctacagtcatcatccagcagaagcctgttgagggcttctcagccaaatcaaaagtagtccaattcatttaaagccaatggggaagctactgaacaagctgacctttgtccagctgtcgtgagtgctctgtatcaaacaagaaatgagtcctataggattacaactctccgactgtgggctttggtttattttctgaggagctgttttattctcctcctgaccaggccaatagggatttaacattatcctagttttcttaaccaagtatatcttacctgatataaatgtccatattggtaaatttgcctgctaatacatgtaatgctaataatagactcagcaatgaaattaaatttgctttattaatttttcaatattaaatttcactaacagatgcattaaaaattaattgtcatttttattatgccaactctaatgaaaagacatacatcattagtgagatgcttacaatataaagtatgtaagaacatttatgagggaaaaatcaataaccttattaaacatgttcatgtttgttccttcagtgtcaattatttccagtagttattagcatattcacattatgacatgaaaccaatgaatagcattttttcatatagttacctggtcttgtctgtctaattttaatta

SEQ ID NO: 28816 - DNA, 2879 bp, Bovine  19866880498482
  misc_feature (1)..(1): n is a, c, g, or t
ntctctggaattaacatgcctatgatttgtatatcacagtaagcatattcacactttccttccccgcaagaccgtgagatacttgctataggtgtccctttctctcctcaatgcctggaacatttttgacattaaatagatgtttaaaccatatcctcagtagtaagatggatcaatcaattgcctgttccttaataaaacaagaaaggcacctttaaggaattgtatcagaaatacacattaaggtttgtttatgaggctcattctgtattgccccaatgtgtcgtaggacaaccactaccttctaatctattaagagcagagaattaattgctctgggaggggagaggagagcaggtgaagaggtgctgatgataaagagattatgtccacaagccccaaaacaaatttatctgtagagataaacaaaaagtctagctcacaaactggcaatatgaagcaagaaaaatgaaaagactaaatttttatttgtttgcacttttgcaaagagagagctattcaatcttgattctgggtgctccaaaaagagttattgagaaatagaaactggtcaaaggaacggagagactgctccaaagcagaacataaaggatgctgtgaccctatttgctgatgcagagctgaagtttaaataactgtgtaaacaaatggacatatccttcagttcaaaatgtaaaatgatttattcttcaatagaccttttgttgattgtctaaaaccctgagttggggactttcctgtgggttcaggagctaagattctgcactccccaatgggaatttgctgtatgactcagggaactcaaccagagctctgtgaaactcaaaggggtcggatggggtaggaggtgggagggaggctctagagggagtgggcatatgtatgcctatggctgatgtatgttgatgtatgacagaaaccaacacactattgtaaagcaattatccttcaattaaaaaaaaaaaaaaagattctgcaatcccaatgcagggatcttgggttagatagatccctgatcaagggactagatcctgcatgatgcaactaaggatcccacgtactgcaactaagacccagtgtggtcacaagaataaataaataagtattggggaaaaaaactgatttgaagaaaatatttcttagtttcaggcaaataaccaatcagggtggatcccaatggacactgaaaaccaaagttccaatatgttctatgtgtgaaaaatagacacaggtagatatttgagtagccataaggggcaaactatggtacactgcagtttctccattttctttctattctgtagtaaattttatctgttattagaatgctttcatatgcaaaactacactcatctgttacttcaatcaggctggcctaagccactgttaaatccgtaagtcctaagtcttgatgttcagtaactatatttgccttttagtacgtttcacttgcacttaccatggtcttgtacaagagaataatatttctaacttgattttggaaactcaatataccgtgcacagacagtaacgaagttatagaatagcctacttcctcagtttcagtacaaaaatctacagggagtcaatactgatcactactccttatatgttgcaaggattctcacccaggggtggggcgggagcagtagtgggggaatgaaggagttaggatttatcctttaacagttgcagtaaagtacttttttatttaaatctctttcttccttggcattctatcttaatgggatacagtttaaccatagtagaattaagttctggctttttgccacagtctgttttgtacagttttattttataggatattgtttattaaatttaaaagtattgggtgatatatatttcttttatttgtaagatgtttataaaagtaagtctacaaaataaaaaatagactatcaatgtatgttgggatatgtcactactgtcattgttatataattttaatacaatggaagatgtgtgttaacacattcagtccagaaccttttaagccaaaaagatgctgccaattcagaaacaaagataaatgctgatttgtattatgcatctttgaggccaaagctaatggggcttaaaagccatcagtgttgtatagagaagcaaggatttgcatttcttggggcatttgtgacaagactgcccaatattttgacctcctatggattaatcccgtcaaatttatcattgaaaatcttttttcctaacaatagaaaaattcacaaaccacagaattttaaaaactaagatctgtcttgtttcttcttctgaaaataaaacaattaaataaataaaaagaaatagaaggaaaaacaaaaccaaagttctaaaacaaagccacacagcattgctgttttctctctttcctgtgaagcagcttctatccattgaggttgctttgtgaaaagaaaagtatgagttaggggccaataaattgtgtgttttcccaactcagttcccccgcctttgcagtgggaatttcccctgatagctaaagacttctaacaggtcataattcttgcttttccacccacgtacacttttacataaaacaagaaattctgccactgcatgcacttcagagcagtcaaaatgtggtactgtggaagttattctgtagttttctaactttcctttctctcttctctgccaaatcataaagtactcatgttctgaattgttgatctatcacagcccctgaggcaatgtgggtggaaggggttggccttactttgcatattcacttggtgatcattagcgacataatgcagatgaaatctcatacgatttcttgccgaacaaatgcctttaagaaatgctttggggatatataacaa

SEQ ID NO: 28817 - DNA, 1191 bp, Bovine  19866880509464
  misc_feature (1)..(1): n is a, c, g, or t
nttaaatatgcacaaaatataatcagtatgtatccacctgacccagtcttaacatctaactctgtgtacactcggaccaattatttccatgaggaataagattctgtcaagtttccaatactgacatttgtaatcacacgctaactctggtttcctaaatactcaacatactaaagatttatgtcatatctccaatagtctcttagactcaggaatagttttctggcttaaatcataaaaacttttcaagtctgaaagaaagacaaacaaacaaaaagcatgttggtgatatttttaattctaatccttatttgccatgtactaacccttttatcatattcttaagtgaaaccaagttattattgaaatgggtggacattttacaagagttgtgttgagtaatatgcaaaaaaaatcctctataaatatttcttctgaatcatttgatcatttatacagtatacagtttttctaatgaccgctttgtaccattcaccaggcaacctctgagaatgccgaggtgtgtaagatacccactttttggagttactggagcctcttatttggagataaataagcaaatagttatatgccattgccagaataatagtatagatgcaaacaactgaacctgacatcatagaagaaaaattaaagaactggtgtgagggaagtcaggaaaacataagaaaagaggtgacatttgaggacgtaataggagtattttaggtgcctgtgtcagggagaacaggaagaagtaaatgcaaggttgggggagggaatcctaggggggttaatgatccacctgttgtccagttataagtgaaaaggagagcagagtgaagggacagagctcacagtatccctatccctgcatactggcacctatagacaattattcatcaggttaaaataatccttaaaattaaactgttactctctgtggttaagatgaccggccttttccaaactggaaaagattttctgcttttctctttcctgttattcattatacctcacctttcttgcagctcctccctcacaacagaagcccccaagtcccttctacagtacttgttatgcaggaggctgaatggtgaaaagctattcaaacagcataacacgaactaacaattccaagcgtatctattgactgaagagatttgcattatgaactaagtcagtgcaaaa

SEQ ID NO: 28818 - DNA, 1341 bp, Bovine  19866880521779
  misc_feature (1)..(1): n is a, c, g, or t
nacggcggagcctggtgggctgccgtctatggggtcgcacagagtcggacacgactgaagcgacttagcagcagcagcagcagcagcaagagttaggttgaacacttgacatgtatgatcctacatctaactgaaagtctacagtatttatattatcaagctcatcatggtttagaagaggaaactgactaccagatgaaatatcttgttcaagaccatactgggaataagtctagaaaccatagtcaaacccagagaatctaattccagaacatgaactgaagattatctaagattcagactgaaatagttcatgagtgtccaggacagaaatcactctttgttcttactctggggctcacaataataatctcacaaaggaaggcatgttttaaagaacaggaacggtgtcagtgtgtatggaagacaagacaagaattactgttttgtaaaacagaattcagaagatataaacctccttatatggtttctagcaaggagtaagccgattgaccttctggttctatctcctcttacccttaattagcaaatatttgtctgatgtgagcagaaactgaacagtcactggggtttaaacaagttataatccacatgaaaagaaaacagtaatttcttttgaggaagcaatgggatttcattatttgatttgattcttaaggtctcgacctaggcagtggatagccactgaattcacagtggatctcggctaaaaagaaaggccaaactcccgttccttgattagtacaggggtacttcagggagagccagtgtgaatcctgtgggtgtcacaggactgctgagaagggccactcttgtgccactgaaccctccatactcagctttctgtttgctttctatccttgatcgacctttcaaaagttagccatttttcacattcatatacatgtatatttaaataatcccagtcagcacttttcagaagtcttttgtggtggctggtttcatctcccatagaatgagccagcatttaatctcttgatgtttaataatattgattaatttccctgtaatatttcaatattcatcagtaatgaatttttataaggactgatctttgattctctctttgggcacctaggataaatcagtaatgaatttttataaggactgatctttgattctctctttgggcacctaggataaacctgagtcgacatctgtagatggagggtgatgtttgacatttaaggatgctgaaggtcaaacaaaggaggttaccgactgtgttgatatggtgggatgtactgccaataggtgacacagcacactaagaccacttgctatgctaagggctaaaaa

SEQ ID NO: 28819 - DNA, 1295 bp, Bovine  19866880534269
  misc_feature (1)..(1): n is a, c, g, or t
ntatagagtatgtacttgatactttcatcattgcttgttcatttatttatcaaaaaactcaaatgaagcaccaactattttccacctatctctacagaatagtaagacgatgtcattagtaagtttcaagagttattttgaatcgttggccagggtttcccttgaaaattaatattatattctaaaactattgtgacttctaataatcctttctaatgtaaaaattaattgcttttgagaaggacaaggtgtggaaaagcccttttcagctctaccttcagggatgatgctcagattctgatgtttttacctgtagaagaagatgaaggtcgaagtgttaattccactatcattaatattatgattctaattattatcattatacatttttatagtgtctttcatcttagagtctcacagtaactaactgctttgtctaggaactgattagctctgccttgagtctgatgaaaatttctagatgaaaaataaaggagattgtcataatggagttcacatatcagtcaatgaagtggaatgaaactaacgtggttggtttcaccttcttttaaatttgatataatcgaagctgaacagagactgactgagaagtcctgaaatcatctcccccagaatgtgaagactgacagtatctgatcctgccgttccagcgagtgcattcgattttgaaaggccagttagataagagaatattggcacaactttccagatatctactccccaattaacaatgtcattttgtgtttttctaagtgaggactgggaaacttgccttggcattaccggcctctgcttggagcttatagttttcatagatggtgactgctccaattctacagctttggaaggatgtggggagaggtgatagaaggcgatgatgggaagaataaaagaatatagagatgaacaccacagctggactattccttcaggccctactatgctcaagtttctaccttacgggaacctatattttagttaagcagacagacctctatctgttcatgctaatagcagtcaactacaggggtttcccttgggattttatttgactttgcactgactaattaatagatatctgaggaaacaaagaggaaaataaaggatcaaaaataaacaagttcatacttggcacagacttcagcaaccatgttgccacttcattttggtcattaacaaacaagttacagacacttggcaaatttttagcttctgcatgaatatccgtgtatgatgagggggatatacatgtgctaaacatttatatgtgtaaa

SEQ ID NO: 28820 - DNA, 1059 bp, Bovine  19866880563913
  misc_feature (1)..(1): n is a, c, g, or t
ntcaatattgcttaaggttataagatgaaagctctacaaatcacagtcacgtaacctgtcaggcaccttattaaatttcattcagttctataccaattcttaagggaccatcattgtcttccaactaacgcaaagattgaataaaaactgatcaaaagtttatgggcttgaatggtcatcctaaattggatctgctgttactggagagaaaactaggccaagaaatttagcctattaggcagtggggagccatcaaaggcttgtgaacagaggacggacatgattacctctggcagtgacacaccattgattccttgatcattgcttacattttttccctttattataaaggcataaaaagcattatagcaacccaaagcacacagacttgttggaaagttaaatcactgtggcagacagtccttccatttcttaggtttccttggagttacatagcttgttctggccgacggtctctgagtgacttagcccagtatgtgatgtctgggctgaggtgggaaagacctggaaagtctcctgcatcctttctcccactctgtgacagcactggagttatcggctgagatagtgagtcatgagatggaagctgcctttaccaatcatcgggagagttgccctgtagacttgcccaataagaaaggtataaattttgaattttgccattcatatttcagcatggcctggcttatcctactgcaacaataaacaagtgcaagataagatatacaagctcacaataatgcgaaaaaggcaaatgaaaacaataaaacaccatctcacctattactattttacctactattgttgaaaacacaatgaaacatcaggaaataccaaattttgatgatgttgtggacaaacacatcttttggcattgctggcagagatattaaaaatgataaagtcattttggacagaaatttggaacttagtaatgaaatgacgaatgacatgatctatggactaagaatctaccccattaaaaatgtcacaggggtctgtaaagggtatatggccagcattagcatcctggccctt

SEQ ID NO: 28821 - DNA, 8026 bp, Bovine  19866880599385
  misc_feature (1)..(1): n is a, c, g, or t
ntattcttcctgaatagtgtttccttgttagcctgcagaattattcagagaacccagtcacatctggctaggaatcaggggctacctgacccacttaatactgcaaaaccctcttcccacagacccttctgattcatcctgttccagaatgcaacccccacatgttctacattgtcctgtaatgcccgcccttcctgggctacccaatagaggagtcactggatctctgaatctttccccataaccacccagaaggtctggaccattcgtgattaaataaagataaaattcaaaggtgtaaatttgtactgcttgacatctaaaatattgtgagagattttgtacagatagaaaagaccaaaaaaaaaaaaaaaagatttcaatgcaacctaagtggcagcaccataccagaatatggtttcagtagacccctctctggcttggggacccagcaatcttctgctgtgccactctgttacctatgtctcttttgaagtaaaagtcctgatcattctaggtatagtgaaaaaggatcactgcacttttgtgacacagtgatgaaataaattcaaacccaatttaagccagagtgcttaaaacttgttacacaaccattgtcataagggaggccgctatccctaatgaacctgagttgaggctctctgaaggaagaaatgcataaatatgagtagtgtagagaggattccttctccatcacacacacacaaagtatatccagtgacaagcaaaaaggatgagagagaaagaaattagaaaacttgaatacagaaggaggaaagaatttaaactgatacaaaggaccacagtttagtccagttggaaatctagaatttgctagaagaatttctacccaggtaacatctttgtccttggcagacaggtgtcaattactgtgtcttcacacggccttttctttttttagtgttggtagtgagcaagagctctgtgatatcgcttcctcttcttataaggataccctcctgttggattacacctccatgcttatgatgtcatttaatcttaattagccattaaagtccatatctcgaaatatagtcacattgaggattagagtttcagcatacccattttgaaagaataggattcactggctcagggtctctgggtacctttattttgaggatggcccaatatatgggcgatggttgccactctataatcatttgtagtacagggccaagaagtgtagtttttgcactagtgccctatgggcaacttataggtgtcatgggtggtccagagatgctgggaggtgcgtaacagagattactagagcctcaacaatgaagaaatctctggagacactaatggaagtgtccattgatttagatctggacagattctagaggcttttgttgtaagatttgttaatataaatcggtatagtaaattctggttttttaattggattaacttgtaactttatagacagtaatagaaaacaagtttatatattgattgattgatgaaaatattgtgaccagaggctcataggaacctaacccatcatttcccctgggattaatgttttagtagtcactaattcattacttgtattgactttaagaatatatagaatatagagtgaaaagacacaaacacattgcagggactgatattccttggtcatcgtttgtaagtaccataggatcacagtgctgctcagcaactcttcctgtctctctgcccttttggaaaaaacatccctgcttaaggtcagatatcttgggtgagcaggtcagaaagctttggaaaggccaactctctgcagggcttaggctgggtacttgtgtttactcattgaagacatctccagtctcaaagcacatgattaacaagagaaatgcttgcttgcttgctcccagaatgaatgtctttgagaagacaccattgaggcctaagaatctgaaatgattttgctggtaagggccagaaagttctttctcagtgtccagccatttcctggccctaaaaataggtatacaagagcaaggttgatatggatgttacaacaaaatgttagtcccagctcagataacgtgactttgtgctggagaatgtagactggttacctcagctcagcaggacactgagggtggaagattacttttcccatggtaatcagctgcccctggatgaatccccaccaacatggaaagctgtgtccatgctgattccaagatcaggctctttaggggacggacttaatgctttttttctgtggactgccccctgtatgcttcctctattctccacttgcctgaatgcctgctccctgtagcccagcccctcattctggctgttgacatggacccagtccttggataaaagctggggaggaggaggaggcttcctcaccatatgcttctggcgggctcaccgtggggatagaaggggatggggtaaagaatgtgtacaggtatgactagatacgtcaacatctgtgccatagaaggcatgaccctggaaaggtgacagctggggtgttctctgttgtttgttctctgggaaataatgtgacatttactgatgaccagggacttctttgtttcagcaacaactatgcaaatgaaaacgattgtgaaggttttggtcggacagggtgctgacagcacattgtgtccatctgaatccgtatgttggaggtaagctgcttctacacacttgagggttttcctttttattgaagtatagcagtgttatattagtttcaggtatacaacatactgactcggttatacatatttagacatctttttatattcttttccactatggtttaccacacgatattgaatatagttccctgtgctgcaataggaccttgttgtttatccattctgtgtatcatagtttgcatctgctagtccccaaatcccaatccattcctttcctataacctccccctacctccaccttggtatcaagaagtctgttctctgtgatgtgtaatctgtttttgtttcatagatatgttcatttgtagccaggtgaaggtttataaatgaatctttttttatattgaattgttaaatatttgtttaatatatttggttatgttggtcttagttgtggcacgtgtgatcttcattggcacttgcaggaactttagttaaagcacaagggatcatctaattgtggtatgcaggacctttgttcagcatatgggtcttcagttgcagcacgggggatctttgatgcaccatgtgggatctatagttgtggcatggtgatctgttttgcagtatgtatgatctttagtttcagcatgcaagatcctctagttgtggtacgtgggatctttgtagtggtgtgtgggatattttgttgtagcatgtgagttccttagttgtttactcacagcatgcaggatccttcagttggggcatgtgggatcattgttgcagcttgtaggatcattttgttttgacatacaggatccattatttgtggtatgccgggtatttgctgcagtatgaggaatctttgtttcacggttgtgggatcttcagttgtttacataatggaatggggcatcttttagttatggtacgcaggatctttgttgtggcatgtgagatctttgttgaagtacgtaggatcttaattgtggcatgggagatctttaaattgtggcatgggggtcaatgtgagttctttttagttgaggcatgcaggatattttagttgcagcatatgagatcttttttgttgagactttcgtattaagtttaatagagctgaaacacagcaaacaaaccctaccatgtgtacttaccagtggcattacccaagctctacattttgcctcccgagattgcaatttcctgacttgcagagacctgcaattgggtactcccaggttcccaaactctagactttttgctctgatcctgcaatttctcatacttctctggcctcctaggccagaggcctctgttctttctatactcccttgagaagggccaacacctgaagtatacttcctggtgtgactgaaggagcactatccacagaaatgggtgtacaggccagagggcgctatgctgctcaagactgacttttctgctccatcttgcacactccgtggtgagggctcctgagcacacattcactacaccctggcttcttactctattgagtttgctaaaaactgagtcttgtctacctcacattccccaacccagttgacatgacttagtgactaaacaagaacaaaaacaaaaatgtcaggcttttttctctacatgttggggccaaaacgctggagccttagagtggcctcatctccaggggccaattgccctgaagatctgatacactgacctttgccttcttttccccttctatgatggcagccaagaatcctcacttcacctttgcctcccttagctaagggagggggcagtctgagagcccagtttctgtcctgatgaggcgccagagccctatcataaaatgcattgactgacccccttctaccccttccagaggcgagacactctggtttactggaagcccaagggtctggaagtgacccccagccaactatctcctgatctctcaaaggtgtccagatctttcataattcaacctgggcagtcaaatgactcctttcaccacacaaaaaaaattccttgggcataagctgttttaagcataaagcaggttttgcattcttacagacggtaggtgcagggcgagatgccctggtcccccaaccccctgacccctctccagcttccagggagctcaagctgaagctgagccagcaacgactgcaaggaccagaatgagcagagggctgggtagtgcccaaaccatgataggaagcaggatctggcatctttttgaatgaatcttgccacctgcaggatttgcgaacctcactacggcatcacggtggtcgtagccagttgtgcaccaggcttcctcctccctatttggcagccggatgtgcgttagacccattgctcttagaagccaaaggattggttcacagcatgcttcatggcgtcgagctgctgggctgcttctcttctcgccactctcaggcttggtgcccctgatcaattcccaccttccctttccaagatgttctcacctgagaggtgagtctttgtggaagaacaagctccccgtcccacctcgtggttagcctgctcacctcctgctctctgctctgtattccaccaggtttccagcggtgacacctcccccattacagacacacaaggtatatccagtgacaaagaagcaaaaaggatccaagagaaagaaatcagaaaatttgaatacagagggaggaaagaatttaagttgttacaaaggcccacagtttaatccagttggaaatctagaatttggtaaaagaatttatactctggtaagacctttttccttgactgacagctgtcttattactgtgtcctcacatggtatttactttgtttggtgtggggagagagtgagagctctgtggaatctcttactcttcttataaggatgccctccagttggattacagctgcatacttatgacctcatttaatcttagttacaccttaaaggcagtatctcgaaatatagtcacattgggggttagggtttcaacatacccattttgagagaataggattcactggctcagggtctctgagtacctctattttgaggatggcccagtatgtggctgacagttgccactctataatcatatgtaatacagggtcaagaagggtagtttcttgcctcagtggcctgtgagcaacttttaaatgtcatgggtggtcagagatgccactggggcataacagaggtactaattcctcaacaaggaaggaacctctggagatagtaatggaagtgtccattgatttagacttggacagattctagagtcttttgtcagaaagttttatcattttgttaatataaatggttttacaaattctgggtttctgattaaattgtatctttagatggaaacagctataaaacaagttaataaattgattgattgatgaaaatgttgtgaccggaggctcacaggaacctaaccctttatttcctttgggagcaatgttttagtaagtcactaattcattacttgtattgaccttatagaatatagtgtgaacagacgcaagtacattggagggctttgccatcgtctgaaagtactataggatcacagtgatgctcagggactgttcccattcgcatgccctttgggaggaattatccctgctgaaggtctcacgtatcttgggtgagcatgtcagaaagctttggaaaggccaactctctgcagggttcagactgggtacttgcctgtcctcatccaagacacctccagtctgaaagcatgtgattaacaagagaaacgcttgcttccagaatgaatgtctttgagatgacactcttgaggcctcagaatctgaaatgattttgttgctcgatggccagatggctctcagtgtcaagccatttgctagccctaaaaagagttgtataccagatcaaggttgatgtagtgacagtcccagcttaggtgggaaaatgtgactttgtgctggcgaatgtagactggttagctcagctcaggagggcactgaatgtggaagattgctttttccaaggcaatcagctgcccctgtttggatccccaccaaaatggagagctgtgtccacgctgactccaagatggggctctttaggggattgaactaatcttttttctgtgggctgcctgctgcctgcctcccctcctctccacttgccagaatgcctgccccttctactccagcccttcatcctgcttgatagcatggacccagtgtttgtaccccatcgcctggataaaagctggggaagaagaggaggcttcctcaccgcgttcttctggctcactcactgtaggaagagaagggagcaggggaaagaacgtgtacactcactactgtgtgtctacatgtgtgctggagaaggcacagcctcggaaaggtgacagccagggtcttctctgttgtttgtcgtctgcgaaataacgtgacatttactgatgaccagtgacttgtctgtttcagcaaaaactatatgagaatggttctgaaggtttcagacagggtgctgacatcacatcgtgtacatctgatgcttctacacacttgagggttttttaattgaagtatagatgatagagtgttgcgctcgttttaggtgcacagcatagtgactcagttttacatatttagacattctctcttttcttttccattatggtttaccacaggttagtgaatatagttccctgtgctatacagtaagaccttgtttatccgttctgtgtacaatagtttgcatctgctagtcccaaacacccaatccattcctctcctacaacctccccccaacccagcctcagtaaccagaagtttgctgtctgtgcctgtaatctgtttttgtttcaaagatatgttcatttgtagccaggtgaaggtttttaaatgaatctttgtatatttaatatttaaatatttgtttaatttatttggctatgttgggcttagttgtgacacgtgggatcttcattgccacacgcaggaactttagttagagcacaaggggtttttccgttgtggtaggtgggatctttgagttataccatgcgggtctttagttgtttagttgcagcatgtggaatatttggttgtggcatgtgggatctttatttggggcatctgggacctttaattgaggcatgcgaactcttagttgtgattctaaatcatctagatttggattttaggtgcctgaccagggatcaaacctaggcaccctatatagggagtacatactctttttttttttttttttaattttatttttaaactttacagtattgtattagttttgccaaacatcaaaatgaatccgccacaggtatacctgtgctccccatcctgaaccctcctccctcctc

SEQ ID NO: 28822 - DNA, 1734 bp, Bovine  19866880642901
  misc_feature (1)..(1): n is a, c, g, or t
natttagatgttataccctccctactttttgtcccccaaaacttctctggaaccaagaatatggatggatttctaatgtagaggatattagagaattatctcaagaaaaaaatcaagacaacataatagtattaatctacagtggttattctggcctatagatgataccttatcttaaattctaatgatccaccctctcatgctatcaatccatagttcagactgatataacgattaatcagcctacttcaaagcttaccagtcatttgaattctagccaactgtctaccttttcactccctcttttcttgatagatactggaggaacagttacacttcatgcctattctgatctatgagaccatagccagggggcatttttggtggcatggtttttctattctgtagtaagactccacaaagaaacagttggagtgtccaacgtcagaaactttgacatcggtttccatataaatactatacaccagccactgagcctacttttggctcctccaagaaggctggatgctgaaccatccataactgacaacagtgacaagaagatagagctatctgatgagaacctgatagaagctgtcacaagaaggagcttatctttgctgaacacatgcagtgtttctcctgcagaatatgtcttgagtgaaaagtaatcatttccacttgtttaattgatggagagtccatgtattcaaattttatctggacaaactcagaggaaggaatagacattgtctgtatgtttgtgtggcaatgggggttgcagagtaaatatctccaatatcaaacagactgaatttttgggagccaggcaaaagtacgttgaggaggcatttagagacttacaaaatatgcaaacacacaggcatatatatacatttacatttagtacagatttatataaaatagctaagaagtgggaagcaactcaaatgttcataacaggagaatggcatattcatacatgaatatacattgcatgaattattgattgactcatacactgatttaaattgtatgaatagcatattcacacagtttgatatattatggtttattaatgcaaaggaacactattttgcaattttaagaagtggcaaactattgatacatcagcaacacagatgaatctcaaaatttcattttgagaaaaaagtcagagacaaaggagtacaaactgtatgattctatttatactgaattccaagaacaggcaaaatgaatgcagtaaattattgaatagtgctcctacgtgggacacaaatagttgtacccctcattttacacataatgaaaaccgaagttgctgaagcagattggcaaggttacgagaataattaacaacaaaactgagatgtgaattcccagacataaactgtctcctcttggcccttatgtattcagtcactacatgtttatagagccttctctttattccaggtactgtgctaggcatgaaaatcaaataataaaaataaacttgccccatgccctaactgacaatgaagcatagaaggcaaaaaatatattttttccaaaaagatgtactgaattcatagtgtgtagaataaaacttaatattgtgtataggttgctcttctcaccccctttaaaccttgacttgaaacttacccaggaatctacctagcaacaacttcagtccttgggtcataattttttctaggaatacagaggcgacggtctatcctttaaatg

SEQ ID NO: 28823 - DNA, 1908 bp, Bovine  19866880656975
  misc_feature (1)..(1): n is a, c, g, or t
natgaactaacctattttaatcccaaagtggcctgctcaaaagtgtctgtataccacttttgttatagacagtaaataggtttgttagtaaatatgtattagatctctttttgttgtactttgtaaacaatatttacattgtctgtacataaacaatgtaactaaaaaatggactaaaaaaaagaaaacagttaaaaaagaattatgagtttgtggaggtgtgcacaatttgactaggcttcaggaagatctggagcccagaagggaaatgtctcagtgtcttgaacctaattctttaaaattttggctgtaataatagagtgaataagagagcagagcacggtgtatcctgctgactcttaaatgtctctccagaccatccctagctctcatcctctgctaacacactttttgtgccgacctttagatttccaatgggttacaccaatgacctcaaagggaaactgtggccacagcagttcacagcattactattgtagatgcaacctggtttcatagagagtaagattctaagcaaattaagtcccttcccaccccataagaatatcaaaggggttagactaattatggtgcattcagtgatgaaacataatgggcgcttcaaaatcatggatggagagtttgtaatgatataggaaaatgctgatgatataatttcagtagaaattgaagggcaagaaactatataacctgtgtgattccaattacattaaaaactaagacttccctgtggaaaatgaatagaagcttaatagtgataatatctcaactgtagattttgaattatttgtcatttcctctaaacatcttcccacaatttctgtgaggagcatttttaattttataaaaagtaaactgtaagagcaaaaaataaaaatataaaactatgaagttaattaggtataaattttgatacttgtgaggatggtgatagttgtgagggttaataaatttaaaaggattaacagggggattggccagttttaggtgctcagaaagtttccttttctgtttattttctctgttcagtgctgagcctttatatgaaaacagttcatctagatattaaatacaaaggccaaattgacattgaataaaatttaatttaagtcaatagaatcaaagcatatcggagagagaaaataaataagctttgtgggatgaagtaatctctgaggtgactttaaaactctaggttttgtctgattctatgatctactccagaatggtccaattaaacgtagcataattaagggaataaaattcacatctacatgcataatcgtgtacgtgtttacgtattctcaaggctaattgccatctctgaatgccatttaatgtgtcaatgctttttaaagaggacttacaactttatacgtgaacttttcctgttaggacaagaccaaatttttagttttcctggtctaaacttatagatgtaaatttgagagtgaggaaacagtcttcagtgtaaagtagaattgaaatcaagttgcattggaaatacttcctcttcatttttcctttttttctgcttttttttttaagttggaaattctttgctagttcattgttctctcagagtattaaaaaaaaaaatcatccttggcttttgtttaacaagtcttatgtttgtgctgaatcttcccccgcactgctcctccaaacaccattttgctttcttagctgttgagtttgatccagggaaagcctacctcagtgtcccaattacaagcatttaagatgaaaccaggctgcagattatacaaatgaaaggagcaaaaataacagtgttctatataaacaagggcagaaagacaatttgttctagtcaaagataagttaagctgtacccaaattaccacgtgtcaggcaatcagaagaaat

SEQ ID NO: 28824 - DNA, 1997 bp, Bovine  19866880657421
  misc_feature (1)..(1): n is a, c, g, or t
ntgactaatggtatatgacaaacacatttaaaatctgcataggccagtgccagtttaaagtgtaacatgaataataaataattttaaagaaatcttagcatgcaaaataagatgtaatctcttcagacataaataacacagagaatattacagttctagaaaggcatttgcaaactgaccaaaacaaagtcaaaagtgcaattcattcagaaagcaactgtagttgatgtttttgcacacaaactgattttcaaagcattgggcagataagtgataaaacagtggtcactggggtataaccaggaaaaatcccaggtctctaatcagttataaatggcagtcagtgagaattctagacagatataaatgcaataagacaggctttctgttttctaagaaacacaattctttgtgagaaaaataagaaaatgctttccttttttttaaaccaagctgagctataaacctaagcatagctggaaggtgggcactgaaggatttaaacataaaattctctttagtttatgggactttggtatttgggaagcaaggaaaatagcactggatttggaaacctcaattggagacatgattcccaattttaccacatctgtttcctcattgacttcatgtaaaataacatgactagtctcacaagacagttgtgatgggcaaataatgaagcctgtagaaaatttattacaagtggtaaaggattattcacacattggtgtgatctattatttgttttaaatctaggattcaaggagtgtgtgtccaaagaaaaaacaatggagtataagtgaagcagagtgttcttgtcttaaaaaaaaaaacaaagctttcataaagtacatagatcagaataatcttgttgaaattaagctcctggaagttttgagaagtatgaaagctatataaaacaggcaattttttaatcatgaaaactaaattttgttaattcgtttttgaaatattacatttagccttcaattaagtgccatttttcacaggtgtgccataatgaactatttttccttgattggattttaatagttgttatcaacaagagtttaaaattttttacaaaattgaaatttccatatattagtttggtgaatagttaatataaaacctccctcattctgaagcagtaggaactagggaacaccaccactaagattgtattttgtcatataaatgaaattaaatgcccctcataattgtgagagcacaaacaagtatactgaatgaaatatataagaagaacataatgtttttaaatatccttgacctcaatctgaccctcacaaaaggcctgagatgtagaatggactacattcatatttcccttcaaaagatgggaaaaatcaatctcgtcaagtaatgaaatgattttttaaatctcccagcaaattcataataacagtggaataaaataataaaaataaaaattcaggtccttccatgcttttctgaactatattttttgtacccatttcaagaatactcaagacagcattctactttgttatctgacaaaaggcacaggttggtaaaaacaacaatgttaaatagttttaaaaattacttttacctcttaaaatattcaaaatgactgaaactggacttataaagtcatttaaagcctactgtggccttaagctacaccttatatttcatgaatatgaatttattttgtaagaaaggtacaaacttaagagtagtttggtagattccagatttctaaattattgtattaggggaaagatactagtggggcttctctagtggcttggtggctagaaatctgcctgacaatacaggagacataggctaattctgggtcagaagttgattctggacgaccctctgaagaaggaaatggcaacccactccagtattcttgccaggaaattccatggacaaaggggcctggcaagctacagaccataaggtcacaaaagagacgaacacaacttagtaacaaaccaaca

SEQ ID NO: 28825 - DNA, 3603 bp, Bovine  19866880688436
  misc_feature (1)..(1): n is a, c, g, or t
nctgggatttctctggagggaatgatgctgaagctgaaactccgtactttggccacctcatgcgaagagttgactcattggaaaagactctgatgctgggagggattgggggcaggaggagaaggggacgccagaggatgagatggctggatggcatcactgactcgatggacgtgagtctgagtgaactccgggagttggtgatagacagggaggcctggagtgctatgattcatggggtcacgaagagtcggacacgactgagtggctgaactgaactgaagagacatgtatcattaccaactcatttgaagataagttgattttcaaaaaaaacaagaaacccatctaaatatacatagagcattgttaaattaggggcttcccttgtagcttagtcggtaaagagtctcctgcaatgcaggagatgtgggttcaatccctgggtcaggtagatcccctgaaggatggcatggcaacccagtccagtattcttgcctgaagaatcccatggacagaggagcctggcaggctacaatctatgcggtcacaagagtcagacacaacttagcaactaaacctccaccattgttaaattgagaggaaaactttatctgccttcaaataaaattttcctgtacaccattcaagttagcaattcaagaatagttaacatatattatggtatgcagagaatgctctactacatctagtagagaaatttgttgccaggattcagagacaaggatttccttagaccaagatttcagagcaaggtgccctaagactgagtctccaactcacgagtgaccattgactcaggcactgaactggataccaacagaaaggaaccatgcagtcatccaacaatagggccagacatccctagattcttgatcacataaccaaggtggtgactaattcgtggttcttgagaattcttctggctctaaatgcatatgccttctggtcattataacatagccctctgcccatttttcatggtctagtctcaatatgtaagccatatctctgcctcaggagaaactggatgagaattaggaagttcacctggaggagaaaagtttatagcagcagaagataaacaaaacaacaggaaaaaggtgagggaggttatctgcatatatacaatacatataatatttactagttgaccttgagacaataaattatatatataataaacaatataaataaatcatatgcatgcaattataaaatttaattgggaatgagatatttcattgcattctaaagctttcctgttgttatcccagcctccattcttcccccatcatcccaacaactgctaaagattaatctttgatagattattaattatcttaggacaaacatcatgacttctctgtttgtatatttcccatggaacatagagctctgtcatgtgtgatctctttaatgaatgtttttagagtgaaaattaaaggttctagaaaatgaaatcatatccacattattgtggaattttaaagttgaaacttccttacagactttttagtacaaattttcatactgtgtgatagtggagaattggaattcaactgatttgcacaagatcacagaaccaagcatcagtagaactaattctgttaacaaatattacaagtacctactatgcaataaggcctgggattataatgaaggtcttccattacctaatttagtactctttccaaaatacccaggaactagttttcaattattcttaatataatataatataagatccatgagagaagggattttgttctattcacttctatatcaccagcaaattgagcactacttggcctctgaatatttaatgaatatttgaagaataagttgatgaaccatcaattttcagactatgcaaatatcatttgatgatctatgagttatttaagaatcttatcagttcacatttggaaatgtcagtgattactgtacaaatcaaagattgtagaattctgatcaagtgtttttccctttctcataaaaaaaatagtcatatgtattagaggaaaggattcagttatatgtgctttgtgattgcattcaatataagcaagagtttatttcttccttttcaaaaaacgttcatgtttctgttggattttttgtgtttccttcccttgtttgggcacagagcaaacacagccagaatctataattggccatactatggctgagccctcacttgcccaatggaacatcagctttatgaaagcaggtttgcttttcatgttcacagtagtatgttgagttttctaaaatgagactctggtaagccattatcaacgagaaataataaaaggctagtggggaccaggtttgcgttacttctttttaaggtgttttacaaaggtattcttgggaatgctgtttttcaaaatcctgtcctgacaagttaagtactagcagttctttgttgaaagaaatatctttcatcttttttttttctatttaggaaagtttccttcctctgagatagcctcctttactctgtaatatgccaattgtatgacaggcagaattcacatattcactccccaccaccctcttttattctgaacataggaaaattgctagctatacatactgcttgagtctgaagaatgccacattcttcctgtttcagtaatattgatttatcattcacaaacatctcctgagtgtctaacatgtgcaaagggtacataggcacctacaaagaggaatcaacccttacaatcatggtatatgtagagcagaaataatttgtactgcctgccttctatattccaaacactgagtgaacccatgacattacataatttaatattttttaaaaaacaccaaattaggcactaaggtatgtatgcatgtgcacatgttcagtcgtgtccaaatctttgtgagcccagggactgtagcccgccaggcttctctgtccatgggatttttcagggaggaatactggagtgggttgccatttcctcctccaggggatcttccggatccagggatcaaaactgcgtttcctgcattgtagatgctttactgctgagccaccgagaaagccccatcgacactaaggtactaagatggttattcttaaaaagagataagtgagactcgataagattaaacagctttccagggaattctctggcagtccagtggttaggactccatacttcctctgcagggaacatgggttcagtccttggtctgggaataaagatctcacaagccaagcagcatggccaaaaaaaaataaaattagctttcaaggtcacacatagatagaagaccttatactctgatttcaaactgtgcttcttgcccctaatcatcatgctcttcctactctaaaaaatattttaaaactttacaaatcaaatttagaaaataaatcataaaattttaattaaatcatttaaataataaatttcatttataaatcacatttatgaattattaatatgatgggaattatttaattgatcctgatcgttaaaactccatggctttgggggcttataaagctacttataaaggttgactaggcaattcggacatactataaaaagagaacac

SEQ ID NO: 28826 - DNA, 1156 bp, Bovine  19866880689607
  misc_feature (1)..(1): n is a, c, g, or t
naaaagaaaaaaatatctcaaagtataaagtttggttgatttagttgatcactataaaaatcagataatatgagaaaggagtagactgctgaagcacattaagaattccatatctgaaattagcagatggcagccactgtaactttctcttcaacaactccatcggcagcagacgcaagtgttatgttagcatatttctgttaaggaataggacaggagcagggttatcgatttgctgtaattgttctatgattcagcagttgagtcacttaatgactcccacgcatataccaactcatataattgaaaagagtctagtgtgtggaccatctgttactataaatccatggtgccttgagatatccacagataataactgtgatgcccctgcttgagtaactgggctgtacctttactgaaggtgaagagtatagagagactgcttgaattatgtgctgaggattgtacatagttcatttcaactcatttatgacacattaacagtaaaaatgaatcctggtactgaccaataaatgtcattaacatttcttaattaagtggagacatggaggcatgggataggaatttttccccggttcaaactcactgcagcctcccttaagcataaaaaagatgtacaaatatgacataaaaaaacataaaggaaagttcaaatgaccaatattaaaaagcagagacattattttgccaacaaagtttcatctagtcaaagctatggtttttccagtagtcgtatatggatgtgagagttggactataaagaaagctgagcaccaaagtattgatgtttttaaactgtggtgttggagaagactcaagagtctcttggactgaaagtagattaaaccagttaatcctaatggaaatcagtcctgaatattcattggaaggactgaagatgaaactccaatactttggccacttaatacaaagaagtgactctttagaaaagaccctgatgttgggaaagactgaaggcaggagaagaaggggacgacagagcataagatggttggatggcattaccaactcaatggacatgagtttaagcaagctcaaggagttggtgatggacagggaagtctggcatgctgcagtcccatggggtctcaaagagtcagatattaccgggcaa

SEQ ID NO: 28827 - DNA, 2679 bp, Bovine  19866880692790
  misc_feature (1)..(1): n is a, c, g, or t
ntccatggggttgcaaagagtcagacaggatttaatgactgaacaacaacaacaaaaaagggcgtcttagacctacttttctggaagttctcctttgtatacctgttatgatttataggctttaaagagatgccctcattccctttgttatggactgaatgaacgttcatatgttgaagacctaactcccaaaaaaatgatattaaaaggtagggtctttgagagacaattagatttagataatgccatgagggtagggccctcatgttgggatttgtgtcctcataaaactaagaagtgacaccagagctcagccttctttgactgacaacaatcttcccagaatggagaagctctttaccgcatgacttaatcctaagtagacaaaggctaactgattgatcagcacacaactaactctggagcagcactttaaatgacactttccaaacagaacaaacacaagactgggtattttagatacctcatttaatctacttttcacgaccatctggtgaggcaagtgctccaggaatgctggattgattgatcaattgattttactattttcactactttaagacaaactgctttttaacaacatcagattcttagctgccttcatttatccatggcttacacaacagcataagccactttggtaagtttgaagccttacctgcttcagcttttaagagtcagaagaatggcaggtatgtcttgtaattagatttttacatcagaatggatttgatttttgacatcaaatgaacaaaccccatttgtctatccctgcattgcaggactagaaatccatcataattatttgccagctgttggttcaccccagtcatggtttcttattctgaaatgtttcctaacctctagaaagtcctcactacatttgtagtttgcaggtatctgaacggcttgcatttttaatgaattcctaatgtactcactcaagcaaacaaggaaaattataaccatggaacattacatttcagacattaatcataattgcttaataataccaaacaaggagattttattgcaaactgagacttatttaacttcagaatcagaataattgtcacatttgcacatattctaaatgataccacatatttccaaatgcctacattaaacagtttagtcataaagaaatattttgtcagctaatttaatttaattgcatggcataatcgtttcacctatttctctaaaaacaggtattttaataagagaactaaaaggaggttataaaaatctcactttctcaattgctaggaaaggtctctgcggaaagttgccagacaattacaaattcggggggtttctatagttcttcaatgtatttgttatataccattagtcaccagtgaagcccttcactaatagcaatacccttcaacaatagccccagagaatttaacactgattgatggcaggtcacctggaattggttggcagaatttccaattttctgttgggaaattgcttatttctccaagtctattcccatttttacaagtggacagcaagctgagattatacattattatgtgtctaaatataaaattgtgatggatggtgtcacacatttaaaaagagttaagcatttaatttaaaatttaaaaagtttaaagaagtttaaaatgtatttttaatctttctcagaaattcatgggctgattcatattgggggaaatactaagaaattacctaaggattgtcatttatatggggtattattttcctaaaattatccttttagacctcgaagcagtagaaccatgactttcttgtaaatactatctaaagatctcagtcttatcaaaagactgaaggaataaatagattctttctgtaacagtactaatgccaaatttggcagagtaaacagtaaagtaagcaaccaaaactcaaaagccacattaaaatcagaagacacagtttgctatttatattaaactatcatttatttaaaaacatatactaggtgtaaattttaaaagtgtatatttaggatgcaaaaatatcatatgtgtggtgtgtgtgcttagtcttatccaactcttaatatcgtatatcacaggagtattactatatacttttccacttagaaactctaccaaattcttgagttaagcattaagtccctggctaaacatattaaaggcaacaggtaacaatccaatgacaagtttgaaattttgtcaatatgggtcactctagagagacaaactagcaaaactctcagaatgtgcctgcagtgcaggagacctgggttcaatcaatccctgggttgggaagatcccctggaaaaggaaatggcaacccagtcaagtattcttgtctggagaattcgatggacagaggacctggtaggctacagtccataggatcgaaaagagttaaacccaactgtgtgactaactttcactttcactttcaacataattgggataatttggtggctcaaatggcaaaggatctgcctgccatgtgggagacctgggctcgatccctgggttgggaagatccactggagaagggaatggcaacccaccccagtattcttgcctggagaattccatggacagaggagcttggtaggttacatttcatgagatcacaaagagccagacacgtctgagtgacaaacactttcactca

SEQ ID NO: 28828 - DNA, 920 bp, Bovine  19866880695177
  misc_feature (1)..(1): n is a, c, g, or t
nctgtgttgggtaactttgagcaaatcacctaactgctttaatcgtgtcctttatttgcaagtaagataaaaaagaaaaagaatttctcttacaattttggtgtaaatacaatgtctgcattgaaccttcaaatgttaggttatttctgtatatcagtcatgatgccctctggtcctttgtgaaaagtacatgtgtttaagcaaaaagtaagtaaattgtgtcatcatttcacatatgcttgtcttatccctagagagcttgccagagctctctgggaatagaatttatgttctgtttcttttttctttttctacctcagggttctttgtacaccatggatactcaatatatcttgtttggtgatgattgacaaacaagaataaattcaattgctctgcttcacctttaagaaagatgcttgcctccgcttgaattctgcatccattaactgtctcctcccttctgggagttgtagtgaagctaaaatctaaatagctgtctattttgcaattgcttgccatatttgatttctggaagatataacagtatattttgggggagtggggagaaggtaaggtccttttattctggtacatttttctctcctaactaaccattaagtcataaggactgagttaggttccattgccttaaagatcccttttatgcttttggttcagcttaatggtttagtgaatgttaagtctcagcattctaccttgtactttcttttacctttgctaaaccttagtatttattggacctacccatctgaccactcacttcaccaaagaaaaggtggtttcaaagctgtatgttctctccactgaaattccatgtcctgaatgtgaaaaataatgagaattatataccccaggggatatataattgggaaaaataataccctggataagacaca

SEQ ID NO: 28829 - DNA, 847 bp, Bovine  19866880707512
  misc_feature (1)..(1): n is a, c, g, or t
nttaatgtgaaagtcagactcaaatgagtcccagtggtgttctcggatctctgctgagaagcacatttcaaatacagaagaaatggcaaccagctgagaccccgtgtatcttgtattgtaacaattaatggatatgaacagccctcacaggagagctcaggttacctttctatcaactttggaggtgagagtctgaaacagctcattgaggttaatatgcagtgggtttatgatttgattaatccccaccaattaaaacaatgatgtttctcttttttcacattgtatttttgtaattactctttggggtacatggatgtaacagtgaaatgtcaacaagggtgcaataattgcataggagtttaaagtcagggaagaaatacatttttctgaatgtaatttttaaaaaggagaaagagaatgtaatgcagtattcaatgggaaattagcagtaactcgttgcccttgattcaagaaatcatactggtgatgtgacatgttgacattgtctaaaacactaccctaccacttatttggttcaaattaattcagatcatgtgacagaataattaaaaaaaaatgagcaactattctaggtgtggtagtggtttggttactaagttgtatctgattcttgcgaccccatggactgtggctcctctgtccatgggatttcccaggcaagaatactggagtgggttgccatttccttctccagggaatcttccaaacccagggatcaaaccagcatctcctgcatggcaggaagattctttgccaattgagccaccaaggaactttggactaatatggtgattttttatagatagaagctgaaactccagta

SEQ ID NO: 28830 - DNA, 1950 bp, Bovine  19866880726372
  misc_feature (1)..(1): n is a, c, g, or t
ntagtcctgcctacagaatttcatggacagagcagcctggaacgctacagtccataaggtcacaaagagttgggcacgaatgaagcgacttagcacgcacacaaacacacgtagtttatgtcagtttacgcttggacgggctggtatatttattcatatttggaagggctcatatatttattcatatttggagggaccggtatatttattgatatttagctgtcatctattgagggcatgaggagtaaaatacaaagacgtgtggaagtgaggattatttggaaaggcaagctggtataacaggagaaagtaaaggcttgcttagcttctaaaagagaatagtcttttaaaggtcagctagacagatgtgtgtgtgtgtgtgtgtgtgtaaatcatatttgacagaaaggcacactggctcattaacaaaaaaaaaaaaagcacaatcaggatgagtccgcctgccaatgcagggcatgcaggttcaatctctggttggggaatgaagaccctcacatgccgaggagcagctaagcctgcctgcgacgacgagagagaagccagctcaccgcaatgaagatcctgcatgccacaactaagacctgacccagacaaaaacaaattaattttttttaaaaagcacaatctagcatgtggcatatccttctcacagtgcagggaatggggactttagaagctggacagagagccaatacaggtaggcgcctgtcctcacatgcacggacatctaaagtctattcttagttctcatttttctttctcttcccctctccctctctctctctgtctctctttcaatggccatctacctatttctacctattttctgaaagcactcaaacttcatcatatctcagtcctttgtatgctaacaggaaaagtctatccctccttgcgctgagtccagcctggcaactggtgagcatgcacgccacaaccattgaagcctgtgcacccgagagcccttgctctgcaaaaaagagaagccaccgcagtgagaagtccacgcattacaactagagactagcccctgcttactgcaactagagaaggcccacatacagcaatgaagacccagcacagccaaaagtacatcataaataaatcaaaccaatagtactgtgctcatatttgaaaactgctaagagagtagatcttaaagttcttatcacaagaaaaaacatttgtaactatgcatggtgagggatgttgacttattataatgatcattttgtaatataatattgaatcattatattgtatacctaaaactaaagttatatgtcaattatacctcaaggtttagaagtcagtaaaatgtgaccaacagactgaagccaaaactatattgcttaaagccataaaactaagtctaaatcagattatcaaaatagcctgctcattgttacttaactgttacttaactgggcttcacaaaggaatccagaaatatttcctatggccattcccactcatatgttacaaaagaaagaaataacctcctgtcaacctttgcctgtgatgtgacctcttagttgtacttcaagacccaaatcaagaagtacttatttgaaaacatttttatgaatgctctcggaaaaggtgagtcaatcactcctgtgttctaactgtactttgtacttgcctcttaaccagatgggttcaaactcagctttttcactgacttggaggtaatgttgatcatagagctttctacctaaaaacagagaggaaaatagaatttcccagagttgttatatgaaactaatgaatgtttgcttgggtcccccacaatatgaaaacacagctaccagctatggagggtttcctctggctttatttattgcttttccccattaaattaggagctcctctagaaaaagagactgtcttaatcacctatgaatccccactgtctagcaagcagtt

SEQ ID NO: 28831 - DNA, 1077 bp, Bovine  19866880738583
  misc_feature (1)..(1): n is a, c, g, or t
ncagctggcagtttaacaggctgaattctaaaacataaactcaagaataataatttcaggtttaattttcttcctagattagtgacacattacacttaattaaattgttaagtttatcttaaaattatattttctttccatggaaaccatttcacttagagaaacaggcacctccagttctacctcatgagttgcccatgcaaagttttatttgttgacttgactgaaattgtaagcatatgaaagccttggctggaactggtcctatgtgaattgagagaaacatagaatgcaaagctttccaaagaagcataatcaattttagaggcaattaatacaattggactagaacttagcctgggaagattgagcaatagcaagacaataattatagctttgtgtactcgcaatgtgtttaagcaatattaaatatattattgctaattatcataaagcccctgaaagttaggtattgttattctcatcatatagataaaaaaatgacctagagggatcaagaattttatttgaggtcacacaattggtaataaatttagctagtagtatatagcttcaaggatcctttactatctcttgtgtttgtctcctcttctttcattggttattaatgggaccatttattttaaaaatagagataatccagtcttaatatttgacataacatatttcagaaacactgagatagactgaggatgagagaatcaattcaatttatcaaaactctgttgaatgtgaaaatggtaaaacaaaaacccagtgatttaatggaacaactagttccattaagacaggtaaagattcaggagagattaaagttgtaatttggcagttgtaacaccaacacagatgaaatctagtctctgtgtaactttatgccttgcattatttgatttgccatctattttgattaaattatatcaaataattgccagatctcctctgcagtgtatgctgcacagacagctcaagagagaagactggacaagtaaagcactgaagataaatgattggattgggtttctaccctgtccatgaagcgatctgattaactgtgta

SEQ ID NO: 28832 - DNA, 1236 bp, Bovine  19866880752173
  misc_feature (1)..(1): n is a, c, g, or t
nttctaactttgagcaagtttcatggggcgaaagttggaaaccatctagaggctcctgttggagggactattaaggacatacggtcactaaccacggggtggccagcgggtgcccaaatgtgacccccaacgtggggacctgcatctgtattgggagcaggtatgggatcccaagccttacttggcttttctgacttttctgcagtgaccttgctttgctttcagtaaggatggagcagagctgggggaggaggcgtaaacggcaacagaaaagaaccccagaattttcaggtgagggggtcttcctcctcctgtttaataaagactcatattcacgaggccaccgggtctggccctgcccagatatttgggggtcagtgcaggtggcagggagcttggtggagccccccacccaccacaccacaccagcactagttggttgggcaggctgtgggctgaccactggacctggtcctcgctccactggctgcagtgaggcagcctgtccttctccgggtcgctttagtgaattggtgggaaggtggacgaccttgtccaaagcctttctgttggtgtcaggactgagaatgctgtcccaacttcctccggctgccacaacaaagggacgcaaactgtggggcctagaaaacacaacagccttgtgtacgctcacggttctggaggctggaaggcagagatcaaggtatcacagggctcagttacctccaggggactcccagggaggatccttcctgcctctttcagcttctgggggctctgggctgtggcggcatctcatggccttctctgtctccatagatcctctttaaaaaataaaatcaagccaaagcaggagtttaattgctaacggattgatgaagtgacattttccactaaaagacgaagatcgttctgagaaataaagtcagaattatatttagggctcatgagaaagaatcgagtaatatcaggaatctttttaaaaacacaaaatattttatttaacatatgaccaaacagttcaaagtatccctactcaagttcagaaatacaattcatgcgtgtgcactcagtcgcctctgactctttgtgaccctgtggattgtaacccaccaggctcctctgtccatgaaatttctcaggcaagaatactggagcaggttgccatttcctcctccagaggatcatctcgacccagggatggaaccccggtctcttgtgtctcctgcattgaca

SEQ ID NO: 28833 - DNA, 1806 bp, Bovine  19866880755880
  misc_feature (1)..(1): n is a, c, g, or t
ncttaaaaaaggaaattgttgacttcccttgtggctcagtgataaagaatctgcctgccagtgcagaagatacggatgggttcagtctctggactgggaagatccacatgccaccattcaactaagtctgtgaaccacaactgttgagcccgtgctctagatcctgggagccataactaccaaagtccattccctagagcctgtgctctgcaacaagagaagccactgacatgagaaacatggacaccacatgagagtaggccctgctcaccacaactggagaaaagcccacacagcagtaaagacccagcacggccaaaataaagaaataaatttattttaaaaaatggaattgtgatagatttcatcattaaaggaactctgtgagaagtgcagggcagttactgttataaaaatcatgtgacaaagaaacaggatttcattggttctaagcaactaaccaaaagcacatgctcagttctaagagaagagagagattaatccaaagacactgttttccatgtgggatgttttgattaagtgtgtgttaatattctggccctgctacttgctagcactgcgaacttgtaccacctattatctcttctctgtccttaatttcaaaatgtgtataagtggcaataatgtatatatatcacagttataaatgttaacttaataaaattcctgagcattatcattaataatgatagttgttattaataatgataatgtagttcttttctctgtaagcactggggtttccccatggtagtctcagttgatgtttgagatactggaataatcagtttatatttatctctttctaaaacctgtgagtttcagagagctcagagaacctcgtggttaaaagctcagcctctctggtcacacagagtaagttcaattctttcagccccagctctgcaattactagctgacagaaccttatcaaattgcatataactcccataagctacttatctgtacttatcagtgtactacttatctgtaaaatggaaataatatttatcccctaggcttatttctagtactaagtgaaatacataaaaataattacccctttttgagctctttctaaatgctgggctaattgttgaaggtaaagtaattaataattaccatagtgattattattgtaaactagacaccattgcccataaacaagccaaatatatatatatgaagtgatttagcaagatatttttacacattttaaaggagtatttttcaacttagcatttatggctgccctggtacaaaatgggcatacatctaccagagtgacacacacaaaaatcaaatttcggttgctggtaacacagcttccaatgtcactgaatggtttcagttctgcagaagaattaacagattgggtttctttcatggggcagaggaggtgacataaggccttggttaaatagcacgaaagaatagctcctgatatcagtgtagttggaatctcattactattcatggctcttgctgtccctttgttctctgcagtttctaaggctccaggcatttctttttggatttcattttcattttattaattttcggattttttttttcctcctcggcctggatactggaataaagtttttgccttggtcactcaaaaacaaggggtcagttttctgtctttccaataagatggtggggaatgtctttgtttatttgcctttataaccttgcccacttccaaagagatttttaggcaacttgtagcaagaattgaagatattcataagccatttgcacagatacaggttaaaatcaagt

SEQ ID NO: 28834 - DNA, 868 bp, Bovine  19866880826652
  misc_feature (1)..(1): n is a, c, g, or t
naaggctggcttgctgtggtccatggggtcgcaaacagtcagacacgacgtagggactgaacaacaacagcagatctcccatactatgctccccaaatcttttaagggatagattcacctttgcataaacctaaattacccccattgtggggacctggctcttattatggacttgaccttggttagagattcatagaacatcaactgagaacttccctagactgcacatagaacaaataatttcattttacctaaccttgatgtaaagagctgaactctgttttttgaactaaaggaaaaattcaagggtcaaggtcactactgaattttgaaagttagatctcccattaccactaagcagctttttctatatctgagtcacacataagagtatggtgagtgtctgaacaaggtcaaaataaacatcatcagtctgaatattagtcggactaatttatgttacaccaattatgcttgctacttgaaaagtatattttaagatgatttttcaagtacccaggcaacatttacagagaaagctgtgatggtattagagactgagctgttgattacaaacagggtgaatttttggctttatgtgatttgtctaaagaggcagcaaaataagtagaaacacagggcactatctgagccctgtcctcatggaatttgattgttacactcaaataatagggacatgtttggctgtcattcagtttgtcattacattggctcaagcataggaaatgtaaattattaagaaacttaaaaaaatgtccaattataactgtactcaagaaagtttcttcctaaaaggcacatctactggaattttaatcagagatgacaatcatttgaattctaaata

SEQ ID NO: 28835 - DNA, 1988 bp, Bovine  19866880840183
  misc_feature (1)..(1): n is a, c, g, or t
naacatttctgcagagggctgtggagttctcacctgtaccatatggagagttccagtcaagacctcggaggtcctctttgaaaagacaaaaggtttattgacctgaagagaaaccagaatattgaggtcctggtcagttcctgtattctgtgatccctcggctatatcatcctttgggttgtggggagaaaagaaaaaaaaaaaaagaatgaatcttcaaatgtatactattggtcatattaatataatatcagtaatagccataactacaactataattattaattagaatattcctttgaaatatataaagcatgttactttccattctgtcatttcatgttgaccaggtaaccattattatcttcagtttggataatagtaatgataggcatttgttgaatgtgcactgtgtttccaggactttgccaagctctttgaggcatgggtgtgttggtttgtatttgtcaatgctttgtccatatggcctgtaacagtgcttggcatgtggtgactaatcaatatatactggttaagtgaatgaatgaaatgattgaaagagtgaagaaaatatttgtggttttttacaggatattgagtgtagttccctgtgctatgtagtaggattgttgtttatctattgggttggccaaaaagttcgtttaggtttttctgtaagatgttacctgaatgaacttggccagcccagtgtttattttcaatatatctgtcttatctcttcctggccagattgaagactactaaaggcagtgaaaagaaaagagtgaaggagagatggatacttttgtttcatttactcatcatgagtaactgattgtagtagatattttatcttcattttatagatggtgaaactaaaatttagagagattaagtagagtagaatatatgtggtaggaaggatatggctgagttagaaccttagtcactctctgctctttctgtgttaacacaaaacagagatgctgattctgagaacagtagatcatagtgtatgatctactggctgtatgtttcaatcacctagagttctttttaaatttttgcttgcttatctattttacagttctttataaaaccgcccatgcctggatcccaccccagcccaattaaatcagaattcctgtcatgttggacctgggcttatgtatttttaaagcacccttcccacttctttcctctcctttcttctttcctcccttccactaatctttactgtactaatctgggaggaaagacataaaacgttgtgctcaaaaaacttatagtttagtacaattgctactgagcagtcaaatagagaaatgctaaatctaagaatgccatcaatttgttcttcacctgtatcaaccattatcctcaaaccataattatacgaaatctgtcagtttagagctgctctttgctcttgacaactcaaaagctccaacatgcctgtctataaataccttgagagtttgtgaaaactagagatttactgaatggaaattcacaaggaaagggggtatgaaattgtgccttttcctcctcaggcactcccaggtaattcttaaaaacgggccagtgtgggaaatattaacataacctgaaagttcctaaaaatgtgatcccctgtagcatcagcatcaacttgggagcttgttttaaaatgtgtattttctgagcctttttggatctactgaatcatcaactctccagtgtggccctgtaatctgtattttgacaagctctccaggtgtgcactaacatttgagagtcactgatagaaggaggctgtttagtgttgggccctaaggagatgggagcatgtccaatgccttgttcagtagttaagttcatgtctaactctttgcagccccatggactgcggcatgccaggctttctctgtccttcacagtctcctagagtttgctcaaactcatgtccattggagtcaagtgatgttatctagcacattgtctgccgt

SEQ ID NO: 28836 - DNA, 1453 bp, Bovine  19866880882968
  misc_feature (1)..(1): n is a, c, g, or t
ntctattaacctagttaatcctaaaaggaaatcaacccctgaatattcattggaaggactgatgctgaagctccaatactttggccacctgatgcgaagagtcaactcaatggaaaagaccctgatgctgggaagagaagggagcgacagaggatgagatggttggatggcatcaccgactcaatggacatgagtttaagcaaactccaggagacagtggaggacaggatagctggcatctgtagtccatggagtcgaaaagagttggatgcaatttagagactgaacaacaatagcttctactagtttcttgcaaaaaagtaagttggggggaagaaaaaaaacttttgagagcaactcacaatatctgaaaatgacttaaaaaaaaaattatttgacggtgctgggtcttagttgcagtgtgtgggatctagtttcctgaccagggattgaacctgggccctttgctttggcagcacagggtcttagccacaggatcaccagggaagtccctgaaaatgtcttaattttaccttcacagtaggtttagtttggcaggtacagaagtctaagttaaaagccattttattaacacctcaggatttggaagcctcaatcctgtcctccagcttctgatccgccactgagatctggtgtcatgctgatgcctggtccttacgtgcactctgtttcttttgtcgttgttcagtcgctcagtcatgtctgactctttgtgaccccatggactgcagcatgccaggctgccctgtcctggcaggttgccctgccaatcatctcatcctctgtcgcccccttctcctcctgtcctcaatctttcccagcatcagggtcttttccaatgagtcggctctttgaatcaggtggccaaagtatctaattctttactctgcaaattttggggatcttgctttagtgtttcaaaattttacaaagaaccttgattaggtctttttctctgagctagaatttcagaggctctttcaattaataagagtttttaggtccttccctggtagttcagatggtaaagcatctgcctacaatgtgggagacgtgggttcgatccctgggtcaggaagattccttggagaaggaaaaggcaacccactccagtattcatgcctggagaatcctaaggatagaggaacccggtgggctacactccagggggtcacaaggagtcagacactactgagcacatgcacagattttctgcttaaaaccctccagtggattctattgcacttgtaataaaatctgtataccctgtcatggatgtgcagagtcctgtgttatctgctcatggcctgccacccctgcctccctgtatactcttctccttcctctcttggttctggatgccttggtcttggtgttgttaagcagccttgggaccttggcatgagcttttctctcctgcttgtatgcgttc

SEQ ID NO: 28837 - DNA, 3128 bp, Bovine  19866880976592
  misc_feature (1)..(1): n is a, c, g, or t
nttttacaatttgccttacaggagctctgaagatatctctgtagacagatatttaagatacagaaattctaagattgtatctgattatatatttgtattacagcttctctgagttacctgtttgctacatcttatccatgtgacactatgctttatcacactttaattcatattcagcttttctggcccagcctcaacacagtctgaatcgatatgccatctgatgatagagtattaaaaacggccatggttcaaacatagctataggattttgaaattatattatatatcagttaatgatatttcagtacagataaaaaactgtttagaagcctactagctacataatcatttagtgtgggaatactggaaatttagagaaggatctgatagtcagaaatcctgattttgctggagtttgttatattgaacagctttaagtgacattgtagattatagttgatttgtatagatagtagagttatgcatttacaaaggaaccataaccatctgaaagtcagttaatggagaatcaaatccagaacaaaggaagaggtaatggaatgaaacagttacagaaaaagaaaaataattaaaaagtacaaaaacaaacactttaaaaaatctgctttttgccaattaaattcaaagaagtaaatggagaggaaaacaaggagagaaaaagagactactttgtgggaatacttcatgccatttaattaaccatagagggaagatgctttgcttcattatttcattggtactttatcgtaaaagaaagtgttccttttctaagtaaactggtaattcccctttaattacactataggttggctaggaagagactccctgctctccttaagggccacagaatatactcaaatcatctttatattatttagtgaagacctgaaaactgaatgtcaccttcttagacactgtatgccctcactgataatagtttcatttggcatgactcagttgacggccccaaaagccctcacttttcagtaacaaggtagagaatttttaaattatcatataacatgttgaattattcaataaataaccatgaataattaatgccaagaagtataacaaaagtcatcacagctggctttcctgagagtttccctcagaagataggtgttattgattttcaaaagagagattcagaatggggagcccaaaagctgtaagtgaagcaatttgtataagaagtctacacatgaataaataatagcataacaaatgagtcacctcgctaaagaaatacttcatagcaggaattgaaataatgttactgtgaatatacttgctcaaatgtgtggagtaatcatggaaccaagatgagcgtccagctagaaataccttggagaggacctttgcatcagagacatgaatgttgacatagcatctaccagttggattcctatgactcgataattgggtctgccttgggaatgtaattctattcttccttgtactctgaacaattcctctttgttattctcaaagataatttattatgggtgtggcttggcagggcaggaatatagaagataaatcccatgagcttcagttaatattttacaactgtattctataatatgacaatcatgcaaagtgagaccagttatcaaacattttgccccacaaagcattaaaggtccacctgcctagtcaagaggtttacaatatattcactcttaatgaaattctaagatataacagggagacagacatctgaatcggatatatgcttgcactttacaaccacatgaatactcttcagttcatttccatttagcctctatattaggagatattcatgctaaatttcaagccaaagtattattctaacttagaaaatggatcaataataataataggcaacaatttatagcatttactttatatcaatgttacaagccagagtttgacagttttttcagtttctataactagccagataataaacatattagattttaaaagccatatacagtctcagtcacaactactcaaactactcaactctgcctttgctgagtgaggtagctatagacaatacgcaagcaaatgagcatgactgggatacttacagacactgactaaatggatactggatttcatataattttcatgtatgaaaaaagatcctattccttttcatttttttccaatcattatagtgtgtaaaaactattcttagttcctgggccatgcaaaaacagtatgtatgtatgctcagtcatgtccaactctttgcaaccccatggactgtagccaccagtctcccctgtccatgagattatcctagcaagaatactggagtaggttgtcatttcctcctccaggggatctgcccaacccagggatcaaacctgagtcttctgtggcttctgcattgcaagcagattctttaccactaagccacctgggaagccctaggtatcagactaaatgtgaactacagtctagtttgtcaatctcttttgcaagtgcaggtgtacacacacacacagcaggtaatcctcacaataaccctaaaaagtagttcttttattattcccaatcagaagacgaggaaattatgttacaaggatattaagcaatttgttcagtgctatagcaaataaatcgaggaggcagtatatgaactgacttcagagctaagttcttaaacactccactagggtttctcctccctggaatgtgcagacagcactctatttctttcatctgtgagaagtattggaaatatgttacactcacttgatgtattcttgtggttagatctgtgagtaaccagagttgggacttaacttccccctttaacctttgcctgtattttccctaaataacaagtcaacagtaccaccacttgacagaacctgaaatatagtgggcacctcaaaatatttattgaattaaaaacttagagtgcatgagaaacaatgtcgtgtagagtgaagggtaataagaaatttattttatgccctaactgattagctttactcaaaaccaaattacagggacttccttggtggtccagtggttaagacttcaccctccaatgcaaggggtacaggttgattccggtcaggaagctaagatcccacatg

SEQ ID NO: 28838 - DNA, 1313 bp, Bovine  19866881014584
  misc_feature (1)..(1): n is a, c, g, or t
ncatacaaagacctatgggtaagaaaaagcatgacaatctggaaaaactacaagcaatttagtacatctggaacactggtttcttgagaagttggggccagatcatgaaaagacttttcgaaaatcttaaggagtttgttccttatggtgaaggcagtaaaagtctttaacatgttttaattgagagcaacataattagaaatgcattgtgaaagatgactggtggctttgtggagactccattggtggaacaaagtagacagagaagctaactgagaaattatttccatgatacaaagtatagatgatggtatagttggacctaggtagtaggagagtgggaatttggatgtagaaaatgaattttttaagaaattaatattgaaaagatgatgactgtactcagcaactaagggagaagaagcagtcatggatggtgttcattggagaaatcatgctgccatatgcttgaacaggtaacatgcaagaagccagcctagaaaggagtaatggtttaaatgtgtgggtattcctgaagaacaggcaggtggttatgtgaagtttaaaagagagatttgaatgggggtaaaatagagacttgagagtgagagatatgtcggctctcattatttgattagaagagaattctggaagtgaaattattcatcactgattattggtgcatttgacacagtgatatttggaaaagtcacagatgttggcctactgacacaataacttggacttttgacctgtcactgtagttttagagaccttttgtactatggggtttagtgcctgagaccaggatgtctcttttcctccatttcactgttgtagaccagaatgtctgcaggaggaccactttacatcataactcatttctctggtccccgtggggcaggaggatgttaaatgcatgacatctttgaagtgttgttttagcattctgagcctcagctggaatatttttaccagcagtaaataacacaatggaagagagacctttttcagtatttggcttccattcaaattgtagactcagctgtgatccctaaatattttaattaatgtctctcaaagggaggttttactgaagcaaactagaggcaccttggtacatatccatctatgtactgaggcttatgagcaggggactcttgacattccctaaagatcatacctcttggaatagataatgctcaccactctgatggtagaactgtattccttctactatatcactccattccagaagaaaaggaaaagactaaagccattaatcagatagtagagccactgagtgctagaga

SEQ ID NO: 28839 - DNA, 1365 bp, Bovine  19866881036673
  misc_feature (1)..(1): n is a, c, g, or t
ntatatgtatatgtgtgtatatatatatatatatgtatatataaatatatatatatgtatatataattccatttacttgcttttaaacaattcttgactgaataatgtcaagtgttctacagttaggtcttaggctctattttaacataagagaagcaatctataagtggaaggatatatatgcatgcgagagagagagccaaaggcagtcaatattcaaaaaatagaaataaggaataaaaatggttaatgggaatgtgtcatttaccaggtaggcagaaggtaatgtataagtgactgacaatccaattagagaattctttgtaggtggaaaagtgtggcagagcagaaagttatgaactacataacacaccgtgacacaaattcccagggcaaccagtaccattctattttcaaatatatgtatgagaaaagccatggatgatgaatttcataacatccttcctatgcgttacttaaaatatttgtgctgactgaatgtgatcatatatatatttttcactacagttttttttttatatggttattattttctgcctgtggtattagtataggttcatgatactggacatgttgtttaaaagcctacaacagattatcagaatttagatggcataataagcatttggaaaaaaaaatccactgcaacagattttttaaaagctattcagaaagaatgatgtaaaaataaaaaggatgggtgtatgctaaattatggggttggttaattttctgattcagtgttgtgattattcagcatttcacatctcagcaaaatcttaggaaaaggctcttttttcccctcccacctatctccaacatggtagaagttatccaggcaaagtagagttagatggaaaataacttattacctgaaaatatcagactccagccaatatacatatatttaagccttaagttttcagtaggaaatgttaatgttagaatgtccattttggaagctcagagtttatcaagactcaattcattttcttacaaaagaggatgctgatggatattggaaatcaagctaaggcaccatcatgctgtttttcagtgcaaacttcttacagttgcttaacagcatttgcaatgctgatcatgttctaggcttcatgctatgatgtataaagaataataacatgagacataagttatcaatgtagtagagtaatgtcagggatcatttttttgtgggcttactggaactaaatttattgacaatcatatatatatatataaatatgtattatactttaaatcatcatgtgtgttaatacatcacatacatgttacattatgtatattatttgtgttatatatttatatgtatatataatataa

SEQ ID NO: 28840 - DNA, 933 bp, Bovine  19866881044151
  misc_feature (1)..(1): n is a, c, g, or t
ncagtttagccaaggagtagggtcttagtgtcagcccaagtccttgttccttatttttggctctgaggatatattcagctttcagtatgggattcagggtcatgtcctggtttatagggctccaattccatggacaaagagctctacaaacacttcacagacatactttgccacagggtctgcttttttccaacacttcagtgattgtatgatttaagatgcccttttagggtttttttttgctttcaagattgtcttatggatagatgttacagatacctacctatattttaaatataactgagatcacgtagtttggtagcagttagcattccagttttagactgtggcatatttcatatttatgcaagaaatcctccaacattctcaaccaagagctaacttcaaagtatagtaatgggaaactttctatttaattaaaatacattcttcctgactaaagaataaagttccttatatttctttttcttttttttttcataggttctaagataatatagatagcacgtaatttcccctgtattcagtccattgtaacttaacaaagagaaactttgcctttgaatttgaggaatatacttcctccagagataaacttttataatatttgcttcagaacctaagagtttaatttgtaattctccattatattctgccattgtcagactggaagcatttggaagagtaaggggaggaatgtgaaaacctgacgttggtattagacttttaaacctttttacaggtatttttgcacaatttatattagaatgtggtatggaggcatttcaggttttcttagaggctctatcttttgggcagtgggtagtagtgtaaggaaattagtctaaactctatcttgactgaggattacctcccatttttcagaaagtttttaagatagatagctttacc

SEQ ID NO: 28841 - DNA, 1711 bp, Bovine  19866881050715
  misc_feature (1)..(1): n is a, c, g, or t
ntgagatatgttttgttcatttcataattggtgtatttttgcaaagctgccctaatttctacatgcattgatatatccacatatataagtatctaatttatcaataaggtctattcatgccacactacactggaccaagaacacatgcagaagtcatgtaaatgtatccttgtattattttcaaccatttctctctaatgctcattttcatataattctgtccctgttgaaattttccacgataaactctaggtgggattatcatcccatctcaggaagggaaaaatataagggaattgaactcactttctttctcaaacttttctttgtagagtaaaatgaggtcacaagtgttgaacaatacatatacaagttcatacagttaacttgataagaagtgctgcagatgatgttgaaaactcacttactttctataactaatggttttggtcactcagccagattgttggttgaggtttttaaaacagagtcagctccaaaagcgaactatttgtatcttgtctgtcaaactgtcaagaagaaagtcaatgaatagtatatgaagacttcctttatctgaatctttttctctatttagtggagacaaatctcctccatgatagagtctgtttgcattttatgagcaatactactatatcttctttcaaatctcagagtttaattagttccagtcctacaagttatcccttgacccaaactctttaggttctgtcctgggtaagcaacatgtccttttcatttgcatttggaccatgaagtaagacatttctgaacatagaacattgtagttccacaagccatgctaataacaccagtctttttatttccagatccagattattgtgatgcaaaggctgaggccaggtgtgagggtaagtgtgcatttcagatttaacagggccaactttacactgcctctttccctccctgaccccatctgatctgacttgctccccccaaattgtcatttttggaaaatagcatatccatccttctttcccatcccaatttcatgcagtaacgagtcatctgacatctcatatttgttcactccttacttacacccaatgacaaatcctgtcatttcttgttccaaagtattcctctttcttcatgatcaacacaccagtcaaagacgcccttatgcctcctctccttcggtggcctgtggtaccagttctcccttttgtatcaaattcccacctcacagctggatagagtgttgctgttgtttttgtatatttatattaatatttggctgcaccggatcttagttgtggtgtgcgggatcttcgatcttccttgtgacatgtgaactcttacttactggatgtgggatctagttttcctgatcagggatggaatccgggcccctgcattgggagtgcagactcttagccactggagcaccaaggaagtccctagagagcgtgttttaataagcagtttcaatcatgtcaccatactgctgaaaaccctctgaaggcttcttcatgtcatgaaaaaaagatcccatatccttaacatgactcagaggatcccacatgatgatccccatctatttctagagactcattttctgcccttgtggatggattcatttttctgttgccttgctcgctgcattccatccatgctggccttctccaggccgtttagcttggcaaattcacctactcgtccctcaatg

SEQ ID NO: 28842 - DNA, 1476 bp, Bovine  19866881063868
  misc_feature (1)..(1): n is a, c, g, or t
ncacatatgcactcacacacacacacgaccagtagacaggaatgtcaagatggagatccaggttctaacatcataaatgctatggtgaactgaagaaaacttgacattttctgtctttataaaaggcccatcctaggcttcaagaaatagttgaaattctattcttcattctacacgctccttccttccacataagaggcttcctaccttgtcctcatcatagctagagacgcaaataaaaatatttcgttttaaattattgtcctgtgatgtatttaattactttgccctcaaagtccttgttcatattttaaaaaaaaaaaaacactaatgcccaattactttgtgtaaagtacgtaattatttcatgttaagtaccaaaaactaggctggcatctagtatgtacttaatacaaattagctccactttttcctagaggaattattctcatttcttcacttaaggctcaaatatttctattatgtaatcataactcttacagtattaagggtatcatattctatacctatccttctcaattccaggtatgggatctattttgttaatattcgtgacatctgatttataaataaaattgatgtaagttaatgcgatcacagtaatggaaaaggatatgaaaagaatatatatatgcataactaaatcactttgctataaatagaaactaacatagcattgtaaatcaactatacttcaataaaatttttttaaaaggaagttgatatgtacatgtacctgtgaaggtgtatacataggtgtacatacacatgtatagaataagatggattcatatgcttttcacactcaagaatatataacaaattatttactcgattcagttgtacagtatttcagctaggttttatttatcatctccatcccccaaacctttccctctgttcatcctgacacttttgtctgtaatagtttttcctttgtatcagccttctgttttcccttgtggccaaagaatcaagtaatcattaccttaggtgtaattttgccagagaaagacagagaatatccaagtcatctttgctatattcttggatttttctttataaaaactgatctgaagttcaatgtctgttcctagatttttttttttttttttttttgcttcaattactcttgggggcagaaatcataatgtcagctctcacgagcacctcctgatgacttccggagcagtaggatttgtcagaagggcaatctgtattgctcctgactctccacctttgccctggccatatttccaccttccctgttctgaagatgtgagtgacactgctgactgcggtcctgagccggccaattcaggctacgcctttcctcatgtcagcacaaccgctccctgacagcagcctgtcctctgacggggcgctgcagagtgtgcaaccctcacctcagctcctcagctgtagctccacctcctcgcgaacaaaggaaaacaa

SEQ ID NO: 28843 - DNA, 1325 bp, Bovine  19866881111563
  misc_feature (1)..(1): n is a, c, g, or t
nctaatgaattgaatctgtttcttcccaccagtgtctaggaatggctgaatttactgtccaggggccgcagggacctggttgttctttggtccccactccattgctgtgatcacactgtctgcctttgtctcttgctgttatcagacacaccactgcagaccaagctggatatgggaagcaggcagcactgtctggttagactcaaacatccctgggagttgtactcgcccattctttgctgtaaattgaagcttcttttcttggcatgaggaaccctagacctggaatatgagagcagcacattgagagatatggaaaagagggccaaatgtgtgtctttgtccagagaagaaccatttgtctatgcattctgcagttatcacaggtctcagctctgtggtttcgatttgtttagggacagagcacacttggttatagtctacatctaactttaaatcctgcttttcaaaagcgatgaggatttggcagccagagtagtaattgagtcggatttaatgttttggtgtttgataaacatattctctggcttaatgatgtccctggttgagtggatattactgcttgacactaatttaatcaaataattatttagcttgaaaagatcctacagatggcctactccagtctcttcttgatcttcccatgaatatacctcagtttactcatttgtgcactaacccctgcccccaggagttgccaaatttcacacggcagagagagaatctgtggaggaatttggtattcagtgggaggtgtccacattatcctgcatataggaatgattatttttcatgaccttcaaaatagattttaagtagatgtccttttgtgtgttagggacagagacaaggagtggaagtggattgggaagtgaacccagagccctgatcttgagtagttctctgcttggtttgactgtggggtcatggcttgaatgacctagagatgctgaaattctttattctgggactcagaccacaaagagagtttttattgtaactcttctcttctggtaataatgaaaatgaaatattaagagctcttcattacaggccttagggaaatacgcaaatatgttacaactttctaaaatatgtcctgattaaatatctcatttctccacttccataatcgggagataatagaccaactgattgtgctaaatagattccagcaagcctcactgtcttgttccatcaggagagaatactgatttcttctctgcgtcatctttgtctacaaaggagaactcattcctactattcaatgtaaatttctttaaaaactaaacagaaaaaaaaaa

SEQ ID NO: 28844 - DNA, 1207 bp, Bovine  19866881112938
  misc_feature (1)..(1): n is a, c, g, or t
nagtctaatggagcaattaaaagtcagaatttgaatttcaaaaacacatgttctaatatgtacggctaagtccccttgctattcacctgaaattaccacaatattgataatctgtgatactacaatataaaatgaaaatgtttaaaaaaaataaaacaaaacacatgttccagtcttagtgctatcacttaactaagccattatatcttgggtaagtttattgatctctttaaatctcagttcctcagctgtaaagctggaataataatatatacatacataataggactaattcaatggttaaatgtgaggatgtatactagagcacctatttgagtggctggcaccaagttcatatctaaaactcattattgctataatattcctattattctgtgtatcataaatggaaattaagaatcctgtcagcaaaacctcaatcatgttttctgattatccaaaaggaccattcatagtcactggggcattctcccgtaagtttctggagaaactcagtttctaaaatttggtatcaaaaactggcagaaattcagctgagtgtcccactgcaggcctccaaaacacatctacatcggaatctgtctcatttgattttccaaagtagatcactggcatatgatacccttaactgttgtataaagaaaagcagcaaaactgccgttgcttttgcatcagatcagatcagtcactcagtcgtgtccgactctttgcgaccccatgaatcgcagcacctcaggcctccctgtccaacaccaattcccggagttcactgagactcacatccatcgagtcagtgatgccatccagccatctcatcctctgttgtccccttctcctcctgcccccaatccctcccagcatcagagtcttttccaatgagtcaactcttcacatgaggtgcccaaagtactggagtttcagctttagcatcattccttccaaagatatcccagggctgatctccttcagaatggactgggttggatctccttttgcataaatagctttttttcttctcttttagcatttttcttcactttctttagatctacaccttaacagaatttatttaggaaggttttttgttttgttttgttttgttttcaaaaatgtaataaggcaagtgaaacattgttaccagatgaccctgaacattatttaaacttttatattcttttagaccatc

SEQ ID NO: 28845 - DNA, 871 bp, Bovine  19866881118137
  misc_feature (1)..(1): n is a, c, g, or t
ncatgggctcgtgacacgggggcaaagagcatgagctttgcaaacacacagacatcaggtcaaaatacaattatgcttttactacattgttgttgtttagtcattaagtcatgtccaacttttttgtgaccccccccatggactgtagctctccaggctcctctgtccatgggatttctcaggcaagaatactggagtgggttaccatttcctactccaagggatctttctgacccagggatcaaaagcacatttcctgcttgacaggcagattctttaccactgagccacctgggtgcaacatggcgtgatttctttgtgtttcaactttcccatttgtaatttgagagttgtcctgagggtcaaatgagaaaacatatttgatgtgtttaatatggttcttggaaaatggtaagtgtgcattataaatgtagctagggtttgagttttttaaagatctggggcatgcatctgttcattcattaaaagtttactggccctccaggagcaattgagcctgtgctgtagaacccaggagccacaactactgagcccatgcaccccaactgctgaagcccgtgtgcccttgagcccatgctccacagcaagagaagccactacaatgagaagcccgctcaccataactagagagtagcccccgcttgctgcaactagagaaaaagcctgtgaagcaacgaagacccagcacagccaaagataaataaatacatgaaattatggggggggaaagtttactggctctcaaagttggcctcatctattcaaccatcagcattacagaggctagagattttcacaatattcaagcaaacggtgaactcagtgatggcatccaaataaaaaggaacac

SEQ ID NO: 28846 - DNA, 1361 bp, Bovine  19866881202417
  misc_feature (1)..(1): n is a, c, g, or t
ntaagtgatgtatcttctgatacttcccacataaacagttcctaaacatgctcttgactcctgtacctacaattttgcccaaagttcccctgttcttctaacaccattctgctttattatctcaggataatcctacccatttgggggcggctctgtgcaacttctcctgttccaaggtgaaataaaatggaacagacaaagaattagattcagactcactaagcacatgtgctgtaaaatgaaagttttaattcccttctcctgcaggatcaaaagacagccttacgtgagcgagttggactttcctggccccttcattagccaggttgattctttacaaactaactacactgaccctctggctctttttgcagttttaagacagcttcaagttggttcttccaagtggctcatcagactgagctgagttagtgcagagcttccagccaagtaaggcctctcagcacgaagtgtcaaacataagacagctaaggctaggagccaaaggaagaaggctcttcttgaccctgctcagagactagcgcattcacagagaagtggctggcaggctcccttttgatgcagtgaacaatgaacagcagggataaagtctcaccatatccacctcatgctttctctgtgtgtatgtgtgtgtgtgtgtgtgtgtgtgtgtgtgtgtgtgacatgtgcactctagcaaaagacaatgtggaaagtctatgacctattatttggaaataatccacccaggatcacagtgagggaaagagatcccacaagtcagatcccatataccattgataaatggtatagcacgactgagcgacttcactttcacttttcactttcatgcattggagaaggaaatggcaacccactccatgttcttgcctggagaatcccagggatgggggagcctggtgggctgccgtctatggggtcacacagagtcggacacgactgaagtgacttagcagcagtagcagtatccttagagtccattttacacatgaggaaattgagagtaaataaagggtcctagttttacatttgtttgtttttgatctgttttctcagttttgtacgctgtggacatttgggtagcagtttcacaagccatgactgcattttgcatcttcattgagttcttcctgagtgaaataatagtggtgctcattcaaacccagatcgtcaatatgaacataatccttcttttctcagtttctataattcagagttctttttggacagagtttctcattctatactgggagtcacatgtttagagatatatagtcacatatttagatatatagaggtatagagatacagcatcagcacagcgttaaagaccaaaaaaa

SEQ ID NO: 28847 - DNA, 942 bp, Bovine  19866881321632
  misc_feature (1)..(1): n is a, c, g, or t
natgcttagtgtcaagtggtaagactattatctttgcgtgtaagtcttgtttcgtgcaatagcagtaaaaatatagatgaggttttggagatggagaaatcacctttatttgggacatgcaaaataacctggatggggttttatgggctcatcattcacggctttaaagtttatcatccagcaatagtgaaggtggtcattccatagtgggaacagcatgtgcaaaggaaggaaagccttttaaaaggttgcatcatgtgttgtaagggcaagagaagtccattaggattgctggagtataagagtgggacagcatgggggcaaaaagaccagtgtagctcagatcatgtaaattcatgaagactggtcaaggaatctaacctttgtcttttcagaaatgcggaacgaatgaaggggagctagaaaaaaaggttactcctgagaccttcgttttcctcctgtccagagctttgctacttagtcacaggaatatgggtgatcgtacctcagaaggtatctgccagcattcattaagaccaatgcttaatctcaactgacaacatcaatgtcaaaatcagagcttggagctggcagtatttcagcagaggagtctttggaacttccacgaactggttcaataaacaatcttgctgtgaaacacaaagcttggaatttagaagggttttagctggcacatccacaaagtcgcagcgtcctgtccactgactaattccactgtgaaatgttgaaatatagctcttagctccaagaaagcatgtaggcccccatttgcatgcaaatcgctgccattcatgtgtgaactacagcaggtaacagctctgccagatggaacaatttggggtagggccatcctccttgctaaaggccacaggtatccacacatgtggcagtgtacctcattcctattttccacatcacccc

SEQ ID NO: 28848 - DNA, 999 bp, Bovine  19866881384766
  misc_feature (1)..(1): n is a, c, g, or t
ncagtgattttctagcccaggaattggcaaaccactacttgtgggtcagatccaggtcacttggtttaccattttaccttttcactgtgacctggtagcttgtggtatctttctctactgccaatggaaactcactgggcaatcgctatttaatgtgcatcttttgctcttctaccatattttgagttgagccttcttcacacttgtatttttaagaacaggcaccatatgaatatttgtaaatgaataatgaaatatgaacaagtttttaaaatttcctttatttatcttcagttactatcctgtttatacactggaccctgccagttccaactgaatagacttttctcgagcagatcaagtcctttcagaccttcttggtattctccctacatgattgaatcttactgtcttgttttcttagaaagtttctattccaagaaactgcctgcacatcatggccctttccgtgaagacctcctcactgctcccaagactttctccccacatatgaggagaataaaactcttggatgaattggtgttatatagtagtctgtttaatgtggattctagggaacactaaccattattggaacactatcttcaaagatacatcttctggcttacttcactctgtataataggctccagtttcatccacctcattagaactgattcaaatgaattctttttaatggctgagtaatactccattgtgtatatgtaccactgctttcttatccattcatctgctgatggacatctaggttgcttccatgtcctggctattataaacaataaccctgtgtacgagacagcaaaagagacattgatgtatggaacagtcttatggactctgtgggagagggagagggtgggaagatttgggagaatggcattgaaacatgtaaaatatcatgtatgaaacgagatgccagtccaggttcaatgcacgatactggatgcttggggctagtgcactgggacaacccagagg

SEQ ID NO: 28849 - DNA, 698 bp, Bovine  19866881418017
  misc_feature (1)..(1): n is a, c, g, or t
nattttcttagatatctacatatgaatgaatataaaaataaactatgaaagacaggacagcaaactattgattagctcaattagtatgttgattattccatacaggacaccattacacatatattaagagatttagagaataaactaagacaaactgtgaccacttggatcttatgatctagagagtaacacaagacaatacataactctaattgccaaatacagataactactgttattgcaatattaaaatatactgagcgaataaggagaaaaaaataattccaataaggtctaaagtatagtttatagagaaagtagtacttgattagtttttataaaacagactgaagtgaaaaaaaaaagggggggggaccagaggtacaaatgtaagaaaacgcagggtatgtttagttgtacttggggaagtttctgcttcaaagaattgttgattatagtcaatgtattataaagtatatttttcccttatgacctgtattcactcagaattagattaaggactttataggtcagaagtcgttcgaaatcagtattggatggagcagttggctaaagttaataacttgcatggattacttatgatccctggtgaagtttctttaattaagccaactttcataatccctttctaatgccttatcaactttgatttttatctatgtaagtgctggctgcct

SEQ ID NO: 28850 - DNA, 766 bp, Bovine  19866881435275
  misc_feature (1)..(1): n is a, c, g, or t
ntatatttgtgctaatactctggggtctgggacaccgagagcaaaaaccatgctcttccaacccagagttcttatctaactaaagggctttctcataatttgagtggatcatgctggcccaaagaccaatggattcagtgagttctttgcacatgaaaaaaagacctatttgaatttgaaatgaggatcagccttgtaaccctggatacagtcagagagacaaaaaaaatctttagggccataaggaaaggagactgcattcataatacaagaggagatggtttagattgtttaaagacagaatatatttttgataacagaagtgtgaagaagcatttatacaccatcctgcatttttaagcaactggagaacaaacaaaaccaggggaaattatcattggcaagtgccattctttccactcagacattccgttcaagtacctgagggagggtcctataattcagatttaactgctccactctctagctcaatgatcccccattccctgcaagataaagttcagagtcttagacataacaaaagagctaggctaaaacctttagagactgtaagcgctgaaaatattgtagtatatacttcatatgtaataaaaggtgaaaacaatactatgatttttcatagtattctgagttttcccatggtcacttcttgtggatttggtttgcatctgtaataacaatttttttctctctctttcctctcctgagtgctatagcatatgccaagtctctctgtaaggttggt

SEQ ID NO: 28851 - DNA, 1473 bp, Bovine  19866881520762
  misc_feature (1)..(1): n is a, c, g, or t
ntaggagtgactgcttttgtaaaggattttttttctctatgtgttggtttcttcttattcaaagaagaaaaagctgaaataaagtcactaatttagtgtattagaaaaagaaaagggttatactaggagaataactttatactgggacaatgttagtacacaaagagatatgcttgctagaattgggaagaatgtttttatttaagcttcctgttgggaaatgtaaaaagggaagcttgctgaattgcaacattttcagggtccataaatttaatgttatctatagttgctcctccattccctaagcattatttaatacagtgcctgaaatatagaagttcctcaatgaatattttctgaattattcagtttctttggctgtgaacatgacaatataaaaactccttgtaaagctacaaatcacttttcagatgcatagtcaaatatgccaattctgtatttatgcgtctgcttttctagatgtttcttttcccactttctgtgcttcagctcacatgcatgagtgtacatacacatgaacagtctagaatcattctgataggtaaacataacaaatcaaactctaaacttggcatccaatgctaataactcataattagtacatagtatgtactgttttaagcatttatatttgtcaattgagtcttacaataagtctatgatataagagttacatattctctgttaagatgtgaaaactgaaaaacaaatgtcagaaccttaccacactcatccaaatactttgactgggatttaatttatggttataagatgctccatatgtgtaacaatgtccacaaagagcttccaacattaactgtgctatagttctttcaatttctgattctccttaaaggaccatatcagaagccatccatttacagaagaagaaaaaaaatcctattctcctagctataggagttattttcctctctcttcttaattaaaatttgtgggaaagatgttgaaagtatcagataaattttcttgtataaatgtcaacccctgaacttaattgcttaaagcagccactaaatattagcttttggtttcgtgagttagcaattcgaactgtgctcagctagatggccctttggtcttggctatgtttacgcatgcatctgtggctctgttttggctggttgttggctggggttataggggcaactgggctctgtgtctctcatcatccagcaagctagccaattaattaatggccactaagctagtttccaagaacaggctgatataccagctcagaactggcacaacatcatttatgtcccattctacttgtcaaaagaagacacagggataaggcagatttaaggtggtaggagataaactatacctcttgattagaggagccacactgttccacatcaaaaggtcctgtacacaggtaaaagaaaaattgggccaaaattgcagttatctacccagcccccaaaa

SEQ ID NO: 28852 - DNA, 1346 bp, Bovine  19866881544962
  misc_feature (1)..(1): n is a, c, g, or t
ngtggcagtcatccttgtagagtccaaaaaatgtcagagccttaatctaaggctgtcttcaaagattacagggtttattggtggagaacattctccaaagcaacagcaaaagctttttcagggaagttccttggaaagaaggatctaattaactggtggacgttattgaaggagctctggtataaaggcagtggggtggggtggaaattacactcggtggtggaggagccagagacctgattctaatacggtctctgccgccaaccagctgtggattaagtcacttgtcctcagggagcctcaggttccccatctgtaaaaggaatttaaggtgtattttgagattttgaggagagaagtggcattacgtttaagtaatcagttgctttacaaatatggatgattatatgtattttgagagaacgcagtactttgaagtattagtgtaggaagctttgggtcgtcagatgttcctctgacattaaataccacttccttaattctctacatctctgcctttctcttccccaccctacccttcctcatgtcccttctctccctagctgaacttccttgttttctggttctttaccagttgctgagaatcacactattgtctgcttacccacctttggccaacctaatgacttttttctcaaagaaaatgattactcacccaattaaagtgagcacttggaggaaataatagctgaaatgctcagtaatttttcgttatggtggggaaaaatgatttgagtttttcttcaggtcatgtatttgaaaaggaataatgcttaatgggttcagtcaatgtcagcgtggcaatttttttttacaatctattgtcagacagtaaattacagaagtagttgatcatcacacagattcatcagcttaccaatgcagagaaaccaatgacaatttagagtgaaagtaaccaaaatatatatcacatttattctattcagaacaaaatcgttttttaacatttattttcttccccctagttaagtttcaatttatctgagagtctgtcaggatgacagaaactcatttacaatctaggaaaacagctgacagaatgtgcattaaaaattagatttttgaattcaaagaatgaaagcttttaaatcactacagtcaagtcagtgggacaagattgataccatatgctattttgctcatgttgttaaggaagtattccagccttgaagagaccttgtcactacatagcttctgtctgtgtaaataagaacaaagggaatatatctgttgtcaatgatttaaaaaaaaaaaatccagttcttcagagcaataagcggatcatataaggaggacaccgaatg

SEQ ID NO: 28853 - DNA, 1336 bp, Bovine  19866881573434
  misc_feature (1)..(1): n is a, c, g, or t
ncacttatgtgtgtgtgtgtgtgtgtgtgttcgtgatgtgtggttaataaaaggttgacagaatatgtgaaattaatgcaaatgctgatgcagtccttattcctaagctctatatttgcacttattaacacacttaatcttgagagtaactcttagaggcaggtaaaattgacatcccccctttttttttgccatccctttttaaggaaaaaataagaaaactgaggctcagggaggttaagtaaactgttcatggtcatccagatcataagcggcagagacgaaattcaaacacaagcagtctggttccaaaaatgagggcatctctgaatagtaattctctaattaagaattcttaattgcataattaataattctataatagcaacaaattaatacataaatatgtgtgttttatatacatacatatatgtacatttgtacctatgtgtacatgtgtgttggtttgttggttgtatgaaaaataaatatgtaccaaggtagagagagatgcagataaagttagatttgcaagtacaggtgtgactgttaggatacattccctttgcttccatgaccttagtgtactgtggtaacttagaatagacatttgaaatagatcactggaccagaagatttttaatgatattttattggccatatacatttaatgtgccccatgagtcaagcaatgaattagttcaagcttgaagtaaagacaaaataaagaaaacattttacagagatttgatagtctctgggatgaaaataaatttccatcattttactctagttgcccctcctttcaccctatcaatcatttagaaaaatacaagagaagatcctgaggctacctactttgatctctttttcaagatttacaccactgccagtaagttcagcattatgatttatagaagaaagcttcctaatgtttatacatctctgacattcattcctctcatagggtcataaaatgctatggttagttaactggcatgtccatatactctgcatgaaggcagtgatgccagacagtcatagagggagggcatggggagagagtaaacataaaaattttccatttgatttgttctgcttctttgggacctatttctttaaaataatcaacagtatagtacaactgatactgttaaaaaaaaaattccttagcatcgttccacttgaggggagaggaattgggaatatttgtacatcaactctctactggatgaagggtagtctctgggagatcagaatccgtcatcctggtgtccctgtcaccagccaggcatgccagagaatttccttttgggcttgctttaaggaagttaca

SEQ ID NO: 28854 - DNA, 711 bp, Bovine  19866881818312
  misc_feature (1)..(1): n is a, c, g, or t
ntgaaggaagacagcataatcctaactgcactaaatattaaaggaataatgtatcattttaagataaagtacataagtgatatacagttcaagtaaagcatctttttttaagtactttaccacttaataaaaaacaaattataagtacttctatttaatgattacatggtatgtacaacataatgcaccattactgtttctagtatctttatcattacaaaggattattattgttaacattaataatattattaactatcatcacagatcatttcatacagcactttttctgtgccaagcatttcacagtattactgaagttagtccacacaaccccagagttagatattcttcatttcttgttgaaggaactgaagctaagagaatttaaagatctaagtatcaatcaggtagttaactagaagacctgcctaggaattaaatttcaatgtctgcttgtctccatgtgtctggtccttcccacactaccaccagctatgagagtcaaagataacacacttgatataataggtttcagcactcaatgacaggaggtgtttctctatatgtcctagcccaaaatgtcacttgagggcaagacaattttgcaattcaatatcttctaccctgagtttcttattttcctttttcacttactagaagtagtatgttcctacttctatatcctaattcctgtttctctcaattttg

SEQ ID NO: 28855 - DNA, 860 bp, Bovine  19866882239619
  misc_feature (1)..(1): n is a, c, g, or t
naatatttccagatattgtcaaatgtcccctaggtgcagaacctctgatttaaggaattaactatttggcaaaatgtttattaagagtttgcttcatttatttgtttattgacaatacttttggcaacagcatggaataagctaagactctaaatgacctcacagctgacaatgagtaaacatatgaaattacaaagtatgttgatgactttccaaattttaaaatatagaaacaaactgtccccagaatgaccaagcttacaaacagtgggaagtatatttcccttttaaaaaaacatgcatgtctcattatttactatgtcaacaagaaaaaaaatcttatttagcaaatggtggaaagaaccatatatttttattgaagattttcttttatttacaaaatacccataattcaattctgctgagctatttcacttcatgtgcaataacaccattttgttaatataacagatgtctttcaaactgtcaaacattaattacaattaactagagtgtttttaaaataagattaaattgagacttattttgaattatagttcaacaagctaatatttttttttcaaagactgaatatcgactgatcatggtaaatagcaattacaagataaatttaaaaaaaagaaaaaaaaagaaagaaaatccttagggggggaaatgtgatattttgtgtgctgtctttgaagcagttctgtcttttgcatggaatgaagtatatatttgctacttccaaagtataaacctgtagtatttaatactggttgaacaaaatgtcaattttcaaatctctattaagacttaccaagggttctaaaatcatttggtataataattttaataaa

SEQ ID NO: 28856 - DNA, 2627 bp, Bovine  19866880479970
  misc_feature (1)..(1): n is a, c, g, or t
ntgaccccccaaccccctttatgcttaggaacgtttatgctattgcagagcccatagttttcacttcctgtaaacccactgattattcaagactgtcacctcttagaagggagtggtaaggtaacactccaggttgcaaatagcaacagcataatcccctttagtcagaaaatacgtgaatattaatacaccacagtatggatgcttaggcacttaaatgctaacatgtctaattggtgggattgtaggtgattggttcttataaatttcaagtgataaatgtgtcattttagggcagtgatctgggctcatctatttacatattcctgattatattaatcagctaggcttggcataacaaaatactgtagactaggcggcataaacaacagaagttcattttctcacagttctggaggatagaagtgccaaaatcaagatctagcagtgtcagtttctagagaaacctctctttctgtattactagtggtcatcttcttgttgggtcctcacatgtaggggaaagatctggtatctcttcctcttccttatggccacagtcctatccaattatgcccctgctcccatctcaattaattacctaaataccctatctccagatccagtcacacttggggttagggctccaacatattaattttttggaggggagccaattcggttcatagcacctgtgctcaccacaaacaccaaaagtacttggttcataaaacagtgaattctgttcaggacaagaaccagaccagaagttctgtgctgcagctcattaacaggtattagatatctgagctgatgcccaatgaaagaagtgatgtgcttagcaaagcgggtgttagcaagagactcttgtccctccccatccaaccccagcctttcatgtcccctgaccttagttgaaaagcactttccaaaaagcaagaagagtccatctaaaattccagcccttatacaccttagaagatcaagtcagaccctttgttttcatttcctcatttctgagacaaaggggctagtctacgtgacctcttctcccaaggctctctatctttataattccaactttcaggaaaagcacttagcatccctgttgggaggcacatatactgaataatatcctgcaaactgagatggaactttgggaccaaaaaaaacagagggagcaatgccatggagtgcaattatgaagttcactgtgggtaaatcacattcaagcacaaaggatagagtcgacagataattcagaggcattcgaagctgcactgcacactgactgccaaaaagggtacaaaagaatttaaagggaccagagctagaagtagaatctgactaccaagacagaagcacaggtgcagcaactggaatcggggttcctcccctcaggggtttcatgaccattaaccatttacgtcagcaaaagcactcttgcaggtctcacatcagatgaaggcaagggcaaaagttgatagggtactcatctggcctggactcacttcttgtaaattaagctaaagctcaatcatgcgaaaagaggggaggttaggactgtgtgaattaagatggaactgaaaaaatggagttggtgtggttcagccacacaatccccaagtcaggacccacttgatctggacagaaggggcctttcctgagagccaaatctgctaaaatagctttcctgcactcattttattcggctgaaaagtagccttgtgtactttcattccttagaagaccaccagaaatgaaccacaggagcccatgataaacatattggttatattattattgtgctgcttcattagaagtgaaaataaattgtgagaagatgcaaaaccatgcaactcaatgattataaacaacagaggaaatcgttgtagaaagtgaaaagcagcttatcctatgggggagtacagactacacacacaaagatcgtcaattgagagcttattgacagcatctgcctggtggaatttatgcatcaatggaagttttaagatgaggggaggggacattggctacccctgacctcttagccaggggttatgggtgagaagacatcagaagatacctaaaatcgctataaagatttgccaaaagcaagacactcaatgttgaaatttgctcttgcaaggaggtccccattttatgatgtttgagcacacacgttctcctgctggatagctgggggaaaatcaaacgcaaaaaagttattatgagggtattttcttaagattaagttcaatttcttccaaaagagctcattgccaaatcattggactccgccataagaaagaaaatgttggtcactcagtcgtgtccaactgtttgcaatcccatggcctgtagctctccaggctcttctgaacatgggatttcccaggcaagaatactggagtggattgccattcccttctccaggggatcatcttaaaccagagatcgaacctgagtctccccattgcaggcggcttctttactgtctgagccaccaggaaggtggccataccttctttaaatttagaatgccaaggcactaaccacaaatcctcagtgaggtatgtgtgtgtgcaatgtaagaacagaacgttgttagactcaactgtagacat

SEQ ID NO: 28857 - DNA, 970 bp, Bovine  19866880599394
  misc_feature (1)..(1): n is a, c, g, or t
nctgaagggaaaagatcatctagttcaaaggtataagtctacacgtattaaaaccaaggcatacatttaagtcagatgaagaaccaaggctagaactcagggcctcaaatgcaacttcttggttcttatttctagaaggagagcttttttggaacttgaggaatccttctgagagaaattgatcagagcctttgcatctgagactaaactcagtgtattcaactctgctaaagtctaaacatagctccttccctatcaacataatggtctttcatgattttatttatttatttttgtgtgtgtgtgtttatttatttatttatttttattcaattttaattaaaaaaaaattatacatgtgttccccatcctgaaccctcctccctcctccctccccatacggtgtttgggatttaggagattaggatcctttatcaactctttgggtaaagagcaagttgttcatttaaccatcttatagtctggaaggcaggattatggagacaatgtacaaggctttttgggaccatctgaaagtccagctatcaagtactccagctgacttcacttctgcacttgaactcctaaaagaagttaaggaggtgagtaaccaacttcccatttgtggatattaaatcttagttgtggcatgggggatctttcattgtggtacgtgggcttctctctagttgtgatgcacaggctcagcacttgtatcttgtgggcttaattgccctgcagcatgtgggatcttagtttctcttagcagggatcaaacccatgtcccctgtattgcaaggtgaattcttaaatactggaccacaggaaagtccttttttttttttttttaaatcccagaccttttaattgttgataaataggaattattttgggccttcccaagtgatgctagtggtaaagagcccacctgccaatgcaggagacgtaagagactcgagtttgatccctg

SEQ ID NO: 28858 - DNA, 831 bp, Bovine  19866880709005
  misc_feature (1)..(1): n is a, c, g, or t
naaacttcgggagatggtgaaggacggggaggcttggtgtgctgcagtccgtggggttgcaaagagtcagacttgactgggcaactgaacaaggatgatattaaagaaacatatctgtaatgattaataggtttgtgcttctaaataagagatccagagataatataagatttatgtctttaaattgtgtctcaaatatttattgtctccattccctttataatctgattggtaagttctttgattatattttttttgacacatgtataattattttgggaaaataagaaaaaaacagctaatcaagaaaataaaaagacacattcagatctctctctctctgtgtgtgtgtatatatatatatatatatatatatatatatatatatataatgcatgctttaaaatgagatagtgtatctactgactgctttttgaactgctttattagctttacaatatgtaatagacatcttttcatgcaagttcataaaagctcccctgcttttctgcaagttgacagaaatccttacaaagtcaaaagtgaaaatgaaatcactaatctgaaaaatgacagaacataaaaggttcagagtaaagggtacatcaagaaaatgcaagtttgcacagcagggggtttatgattattaacctcagcattcaaggcataaggcaaaattcatcatgatggtcatggtgaggaggatctccaataagaatgcgcagactgtaccttagctgaagctccctaattttcctccttagctctctcatctcctccatgaacctctccatatcatcagcatctccatctatgatgtcaatgttattg

SEQ ID NO: 28859 - DNA, 4871 bp, Bovine  19866880796135
  misc_feature (1)..(1): n is a, c, g, or t
ntacaactgtaatccagagctactgactccaagatctgtgctttggccattatctgctatatcaccgtgtgctctgtttactgttaccgctcattactgatcgctctgagcagtatttactgttattgtggccttacagtggctgctcggtggaatctaaggtctgcactttctaacagggcatcagtacagccatgctcgtcacttccctgaggctttttttccacttaattccagtttatggactttaaattggtccaacttttctgggtggaaggtggggaattaaattaagcatgtgtatacaatttgaggcagcaattccatgtcttgaaatgtaccctaaggaaatagttaaggatgttcacgactgtatagaaacaataacattcatcaacttgaatacttaattttgttttttaccacagacataaatttactgaaggataagaagaacacaaaggatatctatcaatgaaggggtacatggaaacacacataagtgttccagaaacacacaaacacacactcacagtatcggggtttattcccaaaagcctaaaaagtgcccacaggggttttatgggggaataaagacaaactcataaatgagctaaatctattctaaatgcaaatgtgaaacacctttatttcacaacagaaactgacaagatgactttcatttcaccattgtttattataagaaaaatgtattagttgtgtggtaggattatgaaagatttatgttatttttatcttttgtattagtttttttttcataggtgttatgagataaaacataaaattaaagaatgaaggcctatcaataaaaattgaaggttctcatcagtataagtcccttgacagcaagtagatcaaaccagtcagtcctaaaggaaatcaaccctgaatattcattggaaggactgatggtaaagctgaagatccaatacttaggctacctgatgtgaagagccgactcattggaaaagacgctgatgctgggaaagattgagagcaggaagagaaaggggcgacgggggatgagatggttgaatggcatcaccaaatcaatgggcatgagtttgagcaagcttggagagatagtgaaggatggggggcctggcatgcttcagtccatggagtctcaaagagtcagacacgacttagtgagtgaacaacaacaacaacatcagtataggtacacaaacttctggaattttaacagcatgtggaaacatttggcatgacttaaattataatgaaactgcaaaagagcaaggacactcttttgtatagcaaaaatcatcactaagaatccacattacttttgaacttcagtaaaaatataagagcttccctggtggctcagatggtaaggaatctgcttctccagtggctcagcaggtaaagaatctgcctgcagtgcaggagacacagggagacttaggttctattcctaggtcgggaagatcccctggaagagagcacggcagcccattccagtattcttgctgggaaaatcccatggacagaggagcccagtaggctactgtgcatggggctgcaaataatcagacatgactgaagtagctgagcacaaaaatatatgaacatgaagccttagaggtgtaacacgttacaatggtgaaaacaaacaaaacaaaacacagacatcgtccttgccctctttgaacttacagtctaaaaccagcaaaaatgatagagtgtcgtagctgctctgatagaggaagtcagagtgttgtgggaacaaaacagatagcacaagtacctgactggtcctgggtgtgttggtgaggcttcctacaggaagtgatgtttaaactgggactggagggataagaaggcattagctgagtaaagaaagggcaaggctaatctgagaccttagtcagatataacactcaggaaatactctctgacctggttcatccctggggaaatcctgtgtggaaattcattacccacagttgcgcatgttcggaaaactgtgaaacttaacaatacaattgtagaaattgcctgaactctgcagttcatgcctccctgatagctcaattggtaaagaatctgcctgcgatgcaggaaaccctggtttgattcctgcgttgggaagatttgctggagaagggataggctacccactccagtattcttgggcttctcttgtagctcagctggtaaagaatctgcctgaaatgtgggagacctgggttcaatccctgggttgggaagatcctctggaaaagggaaagggtacccacgccagtattctggcctggagaattccacggacagtccatggggttgcaaagaatcggacatgactgagcgactttcacttgcagtttctgcaattcatccatgagagaaaccaagaacgagacttcccaagagttgtctcatctttaactctttctgcaccattttggcagtgagctccaaccaggagaaatatacaaatcattaatatgttttttagaaagtgaatgcatgggtagctaaaatggtcagagcaacaggatatctctagggttcctcttccaaggttcctggattctttggtttacgctcgtgggttatcatgtctgagcccggccatgcatgtagaggtaaacgttaacactagacagatctagtggagaacagatattacagttctggagctcaggaaagaggaggtcagggcacagagatttaagctggcagtggctggcacactggagacactcaaacactatgtaacaaatggaaggatggatgaatgaatgaatgaatgacagatttttggaaacagcagaaaacgaaattgtttatctcttcaaagagtttccatccatatttattttttgaaatggactgggattgtattatatatttccactctgatttttaaaatattattgattttcataattagaaagtcattttaccctttcaataaaatatagaaaatatcttttgagatgaacctattcacagggcagcaatggatatgcagacacagagaacagacttgtggacacagtgggggagagagaaggtgggaaaaattgagagagtagcatggaaacatatatatgtgtgtgtgtgtgtgtgtgtgtgtaaaatagatagtgggaatttgctgtatgatgcagggagctcaaatcaggtgctctgtgacagcctggaagggtgggatgaggtgggaaatgggagggaggtgtaagagagaggggacatatgtatacctatggctgattcatgttgatgtatggcagaaaccaacacaatattgtaaagcgattatcctccaattaaaaatgtgtgtgaatgtgaagtcactcagtcgtgttcgactctttgcgaccccatggactgtagcccaccaggctcctccatccatggaattctccaggcaagagtactggagtggccatttaattaaaaataaattaattcaaaaaaagaaaatgcctattgacgttagtgagggttgcagtttgaatatcataaaccaggaagttgagaaatgagggagctgcctattctctatcaagcagacagagctttctggaagtcttctggaaccagaatattgctaaggaactcagctgctgcctcagacttgagagaggatgaatagaaagctctagatccatcttaggaggagattgtgtgtgtgtgtgtctctgtgtgtgtgtgtgtgtgtgtgtaaatatttgaggctatagattttaacatacttcacaaatacattgatttattttgaaataataggatcttactgcatagtttataattatattttttcctattgaagagtatattgtaaacaactttcaatatcaatacatgtattttacattaacagttttgtgattcaatttaaaactagatgttttctgtgttttgaaaatatataagccatatcacatgatatttgtttttctctgtctgacttatttcacttagtatgataatctctagggccatccatgttacggcaaatggcatcctttcattcttttttatggccaagtaatattccattatatataattgctaaagtcttggtcaatgataatgtcagtgtacaagtatatgattcatgggactagaggtctattttgaagagcaatcctggtctgcattttacattctgatgttgttgggaaaagacagaggtatatgtcattactccatcatcccttgagtatagaaaagggccctccactttagaagaaaacactatagataatgtgagagaacagctagatggtatatcttagagcaaaggacatactgcaatttgatggggagttaagtgacttctgaatacagtgtttaacttggtttcatcttgcagtaaaatgataaccaaagcctaattcaggggcctttaaagtagtttcatatctttctctgaaagctagaatgaatctaagataataagtccacgacctgtgtcattagcagtgaaaagctccaagctaatatacattgattccctacagtctcagatacttgattgcaatatatatctcatttttctcctgcaaaactttgtgtggttgagaggcaagacaggtgaaattcagatgggcagagttacaaagaggtgaaggtgtctatcaaaagttgttacatagctactgggttaagtctgtcactgggatccagagaggtttccttacttaggtggactctccagaagccaaagtactggcttgcttcttaagggacaaaaaactgggactcccttggcagtccagtggttaacactttgcctttcaatgcaggaggtgtgggttccatcccggtcagagagactaagatcccacatgcttggggcaaaaaaaccaaaa

SEQ ID NO: 28860 - DNA, 1701 bp, Bovine  19866880937368
  misc_feature (1)..(1): n is a, c, g, or t
ncctgtggaaaaaaatgaaaatagcatatatctacctctcaaatgggggaaaaaaaaaaaaaaaaactacagttgagtctaacaaacgttttgttcattacattgcacacacacatacctcactgaggatttgtggttagtgccttggcattctaaatttaaagaaggtatggcagcctccccggtggctcagacagtaaagaatccgcctgcaatggggagactcaggttcgatccctggtttgggaacgtcccctggagaaggaaatggcaattcactccagtattcttgcctgggaaatcccatggacagaagagcctggagagctacaggtcatgggattgcagagttgaagatggctgagcaactaacactttctttcttatggcagactccagtgatttggcaatgagctcttttggaagaaattgaacttaatcttggggaaatatcctcataataatttgtgtgtgtgtgtgtgtgtgtgtgtgtgtgtgtatttgttttctcccccagctattcagcaggagaaagagtgtgctgaaatgcaaaatggggacctccttgcaagagcaaattccagcattgcttgagtgttttgcttttggcaaatctttgtagagattttaggtatcttctgatgtcttttcacccatagcccctggctaagaggtcaggggtagccaaagtccccgcatcttgacagttccattggtgcataaattccagcaggcagatgctgtcaataatctcacaattgatgatctttgtgtctagtctttgaactcccataagataagctgcttttaactttctacaatgattccctccattgcttcataatccttaggttccatggtttcgccccttctcacaatttttttttttttcatttctaatgaagcagtaaaataataaatacgaccaataggtttagtatgggctcctgtggttcatttctggtggtcttctaaggaatgaaagtacacaagggtacttttcagcaaaataaaatgagtgcaggaaagctattgtagcagatttggcacacgggagaggccgcttctgtccagatcacgtgggtcctgacttggggattgtgtggctgaaccacatcaactccattttgtcaattccatcttaattcgcacagtcctaagctcccctcttttcacatgattgagctttagcctaatttacaagaagtgagtccaagccagatgagtaccctgtcaacttttgcccttgccttcatctgatacgaaacctgcaagaatggattttgctgacatagatagctaatggtcaggaaacccctgaggggaggaaccccgattccagtcgctgcacctgtgcttctgtcttggtaatcagattctacttttagctttggcccctgtgaattctcttgtaccctttttggaggtcagtgtgcagtgcagctgtgaatgtctctggattatctgtccactctctcctttgttcctttatgtaagttacccacagtgaacttcataattgcactttatggcattgctccctctgtttttttggtgtcaaattccttctcagtttgcaggatattattcaacatgtgtgccctcctacatggatactaagtgctcttcctggaagttggaatcatagagatagagagccttgggagaagaggtcatgtgcactagcccccttgtctcaga

SEQ ID NO: 28861 - DNA, 753 bp, Bovine  19866881204947
  misc_feature (1)..(1): n is a, c, g, or t
naacccaggtctcctgcattgcaggcagactctttaccatctgagccacagttgttgacttaggaatggctaagtggatccaaataaagttagacttttcacaaaaagtttgactctaactttgatttagagaagagttactaagtaatcctggtgataaagtgaaaagttaagtcattcaatcgtgtccgactctttgcgaccccatggactgtagcctaccaggcttctccgtccgtgggattttccaggcaagggtactggagtgggttgccatttccttctccaggggatcttcctgacccagggatcaaacccaggtctcctgcattgcgggcagatgctgtactgtctgagccactagggaagcctaaagcccagtgataaatatactctattgtcaatcaagttttttaaatcatgtacatttgataagatattctcaatgtcccaaaaagctgttggaagacaatcaaaactgtcttcaattccagtgaatgaagtacaaggccctagatattgaaaaactaattcctcttcttcaaaaatataagttgagaactaaatattagttctatggatagcctttgctactggaaattttattcctgcaaaaatctcttgaatgaaatggatggtctttgagatattccaaactgtgatagaaataatgcattgaatttgagtaggccccttcttcagtcatcattcacttatcagacaaacttcagattcaaaagaaccaattcaaat

SEQ ID NO: 28862 - DNA, 1265 bp, Bovine  19866881297123
  misc_feature (1)..(1): n is a, c, g, or t
nggtggttctctatgtctgtgagtcagtttctgctttgtagataagttcatttgtgttgtattttaaattccacatagaaatgatatcatatggtatttgtctttctctttctgacttactttgcttaacatgataatctttaggtccatccatgttgctacaaatggcattatttcattctttgtaatgggtatagactatatttatttgattttcataggcaaacatgtaagtaagcatcactttctcctacttcctgttttacaatgaggaaactgatgctccgcattctgcatgtggttccatagcctgggagataccaaagctcatgtttttcttgcatcaagctgcctgcaataagccaagacaccatatttacaggagaacactgtttagaaaaaattcttattggtagagacagtcctctcaatcttagaacataatcaccatcagtttgataggtcctctttgaaaatgaagacaatatgtcctctcaagcttgatttggagggtcactcactatttctgattacttgcaaaattctttactatcatctgattacttcatatagagaaaaatgattcctaatagaagagataattttagtaatttaagtaaattagctctttaaaaagtatgcaatttatgggtgggtctcaagtacacttgtattgagtctagagaaggtaagtatcctgttcttcccagtgcagaaaggacccctactttatataaccgcaggatctcaggctcataggtttttttttcccccataattgagatttttattggttgttttgaggatcagtacacagacatttcaatttgtacacaattcttcacatacataccaaaaatctaaaaaatcatgtagttgtgattcttctcttaacagttattccagtgactttctagcttaaaatttggaggtgaaatttccttaacagggtatcaagtaccaatatcttcaaatattgatatgctgttacatcataagtcccactgattcacagtttagtatcatatacactacatactcaagctgcaatcattcacagcacatcaacaaggttactaggaaaactagactaccaggaccagatgttatagagtgcacaaaattctagccaggagaaccaagatcaaggagtgagtggtttgctgtaggaaataattctaccaaaacaatacggaaagagaagtaatttaaagtgttccaaaaaaaatatagaagtgttcaaaacattaaacgtgcaacgactc

SEQ ID NO: 28863 - DNA, 767 bp, Bovine  19866881421347
  misc_feature (1)..(1): n is a, c, g, or t
ncgttatgcattgactttctaatatattttaacattctgacactcaaaagaatactagaggatcctaagctacacatatgcatcatgttaatctataaggtccagatgcatcaggaaaagcacaaggattgaattctatcagccaacttattccacgacatagaaacagaattgggtcacattcataatgtaaacatatgtttaattttcttttaaccgtgacaattctggatgttttctatgatttacagttatgcaatgggcttcccaggtggcattaaatggtaaagaacccgactgccaatgcaggagacataggaaatgtgggttcaatctgtgagtggggaagatcccctggaggagggcatctcaacccattccagtattcttgcctggagaatcctatgtatggaggagcctggtgagctacagtccatggggtcacaaagagtcagacacgactgagcatgcatgcagctgaaatcatttcacagtcatttctgctaagaaagggaagagatggagtaagaaaaacttaaaatgttgagttgccagacagaatgactgggcacactgcattcataggctatctttcttttttcttccgaataggctttcttttgaaacacggataacaatccccttgtacagatcaggaagttaagttttagagttgctaagtggttttagaaaaggcagaggaaccagagatcaaattaccaacatccactggatcatcgaaaaggcaagagagttccagaaaaaca

SEQ ID NO: 28864 - DNA, 1793 bp, Bovine  19866880350261
  misc_feature (1)..(1): n is a, c, g, or t
ntgtttaaagtgccttgtaacttcttagaagagattatttctctgtagggtctctcagatggaagaaaccaaatgtgacatttcacaatctgggaagggggaggcatcttgctaattgagaaaacatttctattcacagtctttagactgagatttagactatactatcccccaactaacatctgttcttggtaaagatagcatggctaaattcaacccgtccattatttaaaggatgaggcatgtctccattttaccttggtgggtctatggagaaggaaatatcaggaatttttacaacctcatgacacaccaactattctttttatgtataataacttattcttccatacctcctgaaggaaatctgaaagactgagcattaatcttaaaatactgagtaattaataagaatttgagacttagaaaccaacatttggtaagtttgcatgtttcacctacagcagtctctccccaccaactccctgcaatatcaggctcaagagaaacattcataagcattataaaacacaaagaaactattctcttcgcacatctgcataataagttgttaattttcaacccagttatatctaaatgctgactttgttgttgtcgtttggtcgctaagtcattgtctgactcttttgtgacgctgtggactgttgccttccaggctcatctgtccacgggatttcccaggcaagaatactggagtgccatttctttctccaggggatcttcctggcccaaggattgaacctgagtctcctgcattggcaggtggattctttaccactgagctacctgggaagcccaaatgatgactaccacatatgaaatacttcctttctttcagtcaaatattgcccatcttttaaagcccaaattaagttctgcacatttgccctccctaccttctctcacccaaagcttattaaattttctaagtcacagtagcatcctcttttttaacctctttttttaaaagcattgttatctgtattttatatctatctatttgacaatggctcacggacacagtgggagaagtactcagtgggagaagtactccagtactctcgcctggaaaatcccatggatggaggagcctggtgggctacagcccatggggtcgtgaagagttggacacgactgagcgacttcactttcacttttcactttcatgcattggagaaggaaatggcaacccattccagtgttcttgcctggagaatcccagggacagtggagcctggtgggctaacgtctatggggtcgcacagagtcggacacaaaactgcagtgacttagcagcagcaacagcagcatggacacagtatgtgactggttagtctttcattaaaagcttagttaccttaatcactgatttgtccatacttgattggtttagacatactgtagtcccaggagctaggaacttgggagctctagtctacagaaaatttcaggatagtttttagaaaggaataaatgaacacttggcaggagatgcctgtcattaacactgtacacatcaaaacacattctagtgggtatttttcaatggtgcacattaatttctagtgtttttacatggaattccacataaatatgtaaagctttatgtttatttgtttcttattaaattagttaatgttcattgttgaaattttgaaaagtgtgaaaaggcataaatgagtacaagaaagtcacttaatatcctactactcattttagcatactccaacattttttggtacatatttgagactttacacataatttcatat

SEQ ID NO: 28865 - DNA, 1947 bp, Bovine  19866880362488
  misc_feature (1)..(1): n is a, c, g, or t
ntttggccttggagtcaaatgaagtagggcaaaggctaacagagttttgccaagagaacacactgtgtggcttagttccctcatataactgtggttggaaaagggatgtatagttgggcaggaaagtaaaattaaacattgaaaaagtaaaacaaaaggagaaggaaccaaatggcatttttcaaaagcttggctgttaagagcagatgagagagaagttctgatagaggcacaaagttcctcgaggaggtggcaaagcttagttttaaataagaggagaggctcttcttccttcataattgataaagaaagaaggaaatggaatagattcccataaattttaggtgcatagcagggaattgaagaaactcacacatgataaagaaagaaggaaatggaatagattcccataaattttaggtgcatagcagggaattgaagaaactcacacatgataactcatattttctctgtgaaagataagaaattttgcacaattatatttcattccccactctgttatggctgtcacctataaaatgaagccattaagatacctcataggatgactttcttttttagagtaatccaacttcaacttggtatttgagttaacatcagctaataatcactttctgaaatgttctattcaatttacatctctcgcctcctagaaggaagaatgttagtgatgagaaaagctgtcaagtctctgattactgcctacaaatgttatcacttgctactgttcaaaatattctgatgaaaatattactactaatggaacaacatgcatatgttcttaagacagaaatagtataactacattctgtttgcttacaagtaaagtaaattagcactgaacagaggtgaagagtaattccttgagcaaagttctcatgaaattttaactctgaatgcacacatctcatagataagattgcaaaagagttcaggcttgagtactttctaaataaaacttcatttctcagtagatactagtacagaatgaaaccagttaatgccctttttgaagactgagttcatattgtcaggtatgctatattgtgtttattgtcataaactttcccaagggggctgacaaaggacaaagtgccaaaaaataccatcatatcaatctataagcaaatttcacacacagtagccacctatacagtggtctttctggaattcaaattgacaaaatcatgtccaatatcttcagtgaaaatgacagaactgcaaatttaaatggaaaaggctttaggatatgagtttaaaaactaaagggtaggtaatgcaagaattttagatgaaataaggaacagcaaagaaattcttaaaactatagaaagtttatagtatttatcaggaatcttaagcttacttgaatcaataatttcaacagtggggctctactaaggaaataattttgtgtggacactctttatgggaaaagacattcatcacaatattatttttaatttagaattacttttaaaggttaagaaaacaatgtctccatcaatgggagagtgggcaatgcagcaaggagatgttaagtatactatatacacctattcaatggaattttatataatcattacaacttttaccatataataccatgtagctgtttaatgaagtaaagcataaacatgtaaatgatagtaaaatatttttaaatgtattaagtgacaaacataggctgcccaactatataccaagtgtgatctcagggttgcatgtttatgtatatacattttatctgtatttatgcatacaagtttatgtttaaatgcaagggcaaaattctggaaggatatacactaaatttcactgtatttattactgttgccctatacacttatgcattattttaaatttctatagctagcatgaattattcatataatgagataggaaacatacatttttgcttttaaa

SEQ ID NO: 28866 - DNA, 1821 bp, Bovine  19866880412598
  misc_feature (1)..(1): n is a, c, g, or t
nggtctacttttatatgtttctgttagagaaggccattaacacagtgacatggactaatttatcagattaatgataaacctggaagctagacatctgggctctaagagatactggccaaagcaggtaagtgtgggtaatctggaaacatctgaaaaaatggtatgctgaatggagtagcttaggctagagggtggcaggtgcatcaccatgggaatatcaaagatgaacttggcttctttcataatatttcaagctcttctaggataaaactgaaatatccttagttactgtgggacaagcagaaattcaatacttttgcttagcttttggttgcttatattctctcattcaaggatatggttacaaactttacactccacccctaacatgggccttttaataaatggtgagttacaatctgataatagaaaggatgttatagctgaaatcagagtgcataataagtccattccatgctgtttccttggaaggcatagacactgtgtcacatgcctctaatattaaaattcttagaaaatacagcaagcagtagtgtttgagtaagtcttagaggcaaaactgatctgaccaagcaatgtatgttggttaagtgaaatgtgaaagactgtctgttctatctcagctgaggatgtttgccatcgaaaatgtttgttatggcacagtagagagactgaagctaccggtttcttgctacccaaatttgtcttggttaaatttgtcttctgtcttctagaccctagggagctgtcagtctcctgaagaactgggcagtagagtgtaggaaacaggaagagagtttgaggagtttagccagtttaccagaaacatttactgggaaaatctacttggacactaaatagacactggaaagtctgactgtctaatttggatttctccatatacctgtcatggtgaagtgaaatatctgttgggctggagtaagtgtgtcagtattttggtcatacctctatacaaattaacattaggactgggagctttgtggtaataactttcttcatgtgtcagagctgtggagtttttagattccctttaacttcccccaaattccttctcaacctacaaaagactgtagaggtcatattgagaatgcattttatcaagtgttgatcaacccattggatgtttgccatgaccttgccttgcttgccatcttggccaccaaagaacattttcatgggtaatatataggaagttcaaaatgcaagtaataccacagttttgtttttttttttaatctggaaaccaaaatctaatggataatgataatgttgactgctaccattaagtgattaagcatttgttatgggccagataattcgctgacactccatagggaaaggctttgccctcccagggatatttggcaatatctggagacattataggttatcacagcagaagagaggagtgctactggcatctagtgggtagaggccaaagatactgctaaacgtcctgcagtgtacaggacagcccccacagcagaggctatctgactcagattgccagtagtgccgaggctgcttcagagtcagtatcttatttaacttgtatacatgataatcatagaagattcaaacctgtcttacagcccgaggttcaaaacggttaatttttcacttttcattaaccagcattctgtttcagtctctactgctcgatcttcttaaactaagagatggcactcacacagaaatcttttcctcccttcccccattgtggaaaatgtccaccctcagtctcttcatccctaatatgagaatattttctgtccttta

SEQ ID NO: 28867 - DNA, 1746 bp, Bovine  19866880460668
  misc_feature (1)..(1): n is a, c, g, or t
naggagcagactgagattatctttttatacaagcaccaaaccacttgttttaacctctgagataaaagcagaagctaaaagtaaaaggaaatagttcgtatttggtacactaataatctacaagttcaaaactcaaagtatttgatttaatctgatggaagtaattccaccagagaacattttttcatatttaaaagtgtcgtcatatctccctgaaaaagttctgtatattctgtggtattatttcagaatactgtaaactggagatggtatttcgctcctttgtgacagcatactattctaatgatggtagcataggcgattaactcctcttattacaaaccagattttaatgtttttataacagtaaaaataacatgtacatcaatgcctccatgtgaacttgctgacatccaacaaggacagtcttattactctgtgatgcttcacaaactactcaaaaaccaaggtgaggagtgggcttggaattacaggaatccactggatgtcaaatcagggtaaggtctggcttctgatgggtgaagacgggtggcaggctcagtgttacgcatgctatttaattcagctggatacgtttcatttaaaattgctccgttctgaaactgcaaacagcaacttattagaacagatccttcatatatattaagccattagatatgtgaaaatgtagttctaaaatctttatcctccgagttgttattgtaactcattcagtgaagtcatattgaacacaggtattagttgcacttacaatctttcagtttctccattagatagtataggtgagtgatattgtctcacttcagatgtggcactccatacattgactctttgatcaatgaaatgcctttggtttgggcaggaaccactggatcagaaagtaccagtcacgaaccacaggtactattctctgtcataagtaagtctgctttgaccagattgtatctcagtaagttttaggtatcagtaaactaactaccttcaagattactacactggattacagataacccagaactttctgaaaagaggcaagttatgatttgcaagaggtttcttaatatgtcttacatactatataccatgggtatgatttctagaaccaattttattcataatatgctttttttttcttttttttaaaattttattttatttttaaactttacaaattgtggcggattcattttgatatttggcataatatgcttttaaagtactactaaaattattgtcctaactgtggaaataaaaattaccaaagtaaagtgcttgctcttgccttttaacaatgaaatttagtctcatttccgtaagtgctactggaaaaaaaggagggagggggaggaccctgagacacacagttctgtggaattacaggaataattcctgttacttataattagttggtgatgaacagggaatcctggcgtgctgcagtccatggggttgcaaagagttggacacgtgtgagcgactgacctgaataattcctaatagttctgtaggtttttatagattacagaactttttgaatcttagtaataattagtgaaagtaatggactataatcataccttcaattgcttcaaatgaaatttacctttctaaagcctatgtaacatgaggtttctgtccttctaaactttatcaagttttcaaagggaaggtaataattgctcagcaaaaggtaggttttggataaattactttcatcactcaata

SEQ ID NO: 28868 - DNA, 1478 bp, Bovine  19866880464945
  misc_feature (1)..(1): n is a, c, g, or t
nattcaagttccactgcctggaacgaaaagcatgttgaatcatgtatccacccttgaaagatcacccattccctgccttagccatcatcctgccatagtcttcaccataggttacaggcactatagacaggatcataagaaaaaaacgctggttctcactgccaagatggcaggcggactttaagtgcccagctctactccagtgaagctctagtctattccaagccaaactccaaatgcctttataataatagaaatattattatatatgttgtgtgggccccatgatgattttagagaagaaactgtacaatatggtttaaataggcttttgtgggttggcctggaaacctaacattgtttctatggaaaaatgctttaaactccaaatgactctgttcgaactgaactttggaatgcaacctgttttaaattgggagattgtgtacgtgtttacaattaaaatacacaggaatgaaagtgagttatcaactgcaaaaatcacatttggactgtggatttaaattgatcaataacccattgtcattttggataaaatagccctaaataaaaaggggtcgtgactttcagcagtaccaaataacaatacaaaatcagactccattttaaagtaattttctgttggaggaggaagttactttacaaactaaatagtgcccaccctaccaaaacctgtcaccataaccagtgtgtttttaaacccactgggaaatatttcatgcagtaatttgaatgagtacatgaaaatccatccccttgctgcaagggaaaaaaacaaaaatagcagagatctttgtatctaaggatgaatccaaatccttagaagttctgcgttcaagtcaaccaacaactataacttgactccctctccccctacatctccattttttgatccaggtactagggatgaatcagggtatagtagaaacagtacttcctaattattgtggtttatatctctatttcctcaaattgtaaagtgaaaataataccatacaggtccctgggctatagtgacatttacacatagcatcacccaacactatgcctgaaaccacaaagtcctcagagtcagttcactacctttctgtccgttcttctccccctacaagaatattgccctcacataagatatccaaactctctccaacctacacacataactgacaaccagagtttattctactggtaaatatgcatatggtgtctaaagaaaatcaaatctaacataatctttcaactgtatgtgaaaatgaattaacatttctctctgccttacataaaatattatgattgaatgctatggggacttttcaatactgcaatgactgtaacttgtatttaaattctgctgaaaccatggctttctgagaattagcatattgaaaaaacacaggggtagctttgtttcataaaagggcaaaaaagaagcaattaacaatatcagttcaaatcag

SEQ ID NO: 28869 - DNA, 676 bp, Bovine  19866880487760
  misc_feature (1)..(1): n is a, c, g, or t
nattcagaaaatagtgtgaaaatatcatcctaggagttgatagtggcaaatttcaaactggtgtgtcagtgtgcatgcctatggaatatgagagaggcatcagataatacggaagaagagaaattcatggagaaagtgaacaatagtttgtaagactgcaaagtgagaaaaggtctgatgccttcattttatttaggacttacgatgtcattagtgacctgaacaaggcagattctacaaaatgctaagggcaaaccttggttacaggaaggtgaagagtagacagaaacttccttttccaacaatattggcagagtaaatatcctgaaaaatgatcctgctgcttatcctagctcccaaaagtagtagatacaaaattaaaaacatattttaatgcatggccaagttggcaagagtaaaagaaactacctaagtcataagaggccaaaagttctgggaagaatcaactcaaagagttataagcaccaaaagcatctgttaatttcagaaacctaattaatttcagagctctggttttgaccttgacaaaatcagatctgcattgacaggagagctggaattcagttctgggatctgtgaagaattgcatcttcagtgaaagtgtaaattagaaaaaaaatgcccaaataaattaaatctgccttgaatgaagaaa

SEQ ID NO: 28870 - DNA, 4491 bp, Bovine  19866880533401
  misc_feature (1)..(1): n is a, c, g, or t
ntcctattcctcagattatctgctctctttactggacttgagtgaaccaaaagggcccagagtagaaaggacttgggagaactggggtgtggatatatacaggacggtgccttaccactcctataaagaagtgggtgagactgtgaggaggttcaaagtgcttcttttataggtggggtcaaattgaaacttgaatcattactcacaggctggtgagaaaactcaagttgttgttcaatctctaagtcgtgtctcttttgtgaccccccatggactgtacccgccaggctcctctgtctatgggatttcccaggcaagaatactagagtgggttgcatttccttctccaagagatcttcctgacccaataactgaatgcacagctcctgtattggcaggtggattctttaccactgagccacctgggaagcccctttcttttataggtggggttatattgaaacttgagtcgttactcataggttgatgtgaaaacgcaagttgtgcatttaaaaagtgagaaaacggaaaggtacagggcctcttcaggtaacaggcagcagtgagagcagaatctcaactctgcatctctgaattaagaacacataaaaaaatcttctaacaggcactatgcaagtgttttgctatgatgactgaagctaggctgtctcattgactttatatccccagggggtgaatatcatagttccaattttacacacaatgaaactattttaaaaagcaatcaaaacaaccaggatgatggtggtagataaaataatggtgcccccaaagatgtgcatattataatcccagattggatggcaagaaggtcttcacagatgttactagggaagaaccttgagatggaatgcttgtcctctcttaccttggtggactcatgtgatcacaagagtccttataagaagaagggaggagggtcagagtcaaaagaggagaggtgatgacagaaggagagagaaatttgagtatactctgctgttggcctgaagatagaggaccacaggccaaggaatgcaggcaatctctagaagctggaataggcaaggaaaccaattctcctctcatgccttcagaagggaggcagccctgtccacagcttgattttagggcttctgacctccaggactttaagataattaatttgtattgttttaagccactaagtttgtggtaatctgtaacaacatcaacaggaaactaatacagtggttatggattttaagaaggcaaagaaggcctttgggaagaaaacaattactcccccattattatcatgtctgattataattagggcttccctggtggctcagacagtaaataatctgcctgcaatgcaggagacccaggttcaatccctgggttgggaagatcccctggagaagggaatgactatcccactccaggattcttgcctggagaatcccatggatagaggaacctaatgggctatagttcatggggtggtaaagagtcggacacaactgaatgactaacactatacttatgatcacgtctagaaacaaacagaagagccattctctgcccctctcctgctactctgcagtagtccccatccctccgctccacctcagctacatctgggcctggaaaaaggacctcccctttctggatgatggtgttgcctggtaagctccagtcttgcctgggcatggcaaagaaacatgggagaacacagccaacacagtttcattacagctttgccttttccagatatttagctcatgtcagaggccaggaaatatgttgcttatagcctgcattttgtttctaaagaagggtcctgataaatgtgtctagtctttgcaaataacctgaaaaattggccagattcctaggagaagaatggctttactccagtaatttagatattatataagcaatatcagatatacagctaagtgttggttcttcttttacaattaataaagcctttttgataatgcaattttcaactatgcatctatggtgctatggggaaaaaacacgtttttacctagaccatgatgttatcacacagataggttgaagaaaagactattcaaagagaataagtgacccagaactgtctgaaagcttttctttgctgaatgcaggccagtgtatttggacacacagtgctgtatttggacaccaatctcacaaccattatcagaattgccaataactatataaggtgagcttttttggaaaaagaagaattcaagaagattatgtaaccctacaccgccagtaactggtaggatcaaaaactgtgtggaagtcaccttacctccaagttcaaaaaattttttaaaataattcagattggtcttcaataagatacaacaggaattgaatcactggtttaactacatgcatcaagcaattcaagtttatcttgaagttgagctgctacactgtgggttaaacttcagatagcaaggcaggaacatttgtgtggaatctgctaaggaaagactagtgaggaatccctacagttgaggaaactgaagctagaatgtgagataattaatgctaatgtgggggcactagtggtaaagaacccacctgccaatgcaggagacatcagagatgcaggttcgatccctaggtcaggaagatcccctagagaagagcatggcaacccactccattattcttgcctggaaaatcccatggattgaggagcctagtgggctacaatccacggggtcacaaagagttgacacgactgaagcaacttagcacacatgcagtcactacccaaaatgaccttctgtcatgtaaattgttataaccagacttaagaatcatcttggagaaggcaatggcaccccactccagtactcttgcctggaaaatcccatggacggaggagcctcgtaggctgcggttcatggggtcgctacgagttggacacgactgagcgacttcactttcacttttcactttcatgcattggagaaggaaatggcaacccactccagtgttcttgcctggagaatcccagggatgggggagcctggtgggctgtctatggggtcgcacagagtaggacacgactgactcgacttagcagcagcagcagcagcaagaatcatctggccatctgactgaccaatctttcaagaggtctctctgcttgattctagtgagatatgaaacaaatgtctcccactcaacattcacaacagctagaatattcaagatggctctttgctcttgacagaacttcatggttcctagaaaattaacatgtgcctctgcactaaggccattgacaaaatgtcatcttgaatttgatatatagatagatagatagatatagatatcaaggaaaaatcctaaattgccaactggacttaaaaatcttgagaatacgtcactttaaaaatatgacaacactaagataatagattcccatattttccctgaattcactaactaccgcatttgaaaattcatttaaaaatcaagttaccaaaaagattttatcgtatagaaagaattttgacttctcactaccttccatgttctaaatatccattatataaattttcattagccttctggggttttgaggaagccctgtgtccattttatacttgtttgaagtaaatatactagaatcccattctggctgctggtatgcaggagccctgcatcagtgtctactgttttgtttcctagaatgttcttcacaatgatgttttttaaagtggttttaatcctaataatacattgagttaatgtcatcagaaactatgagatgtttttcagggtctgttttatagaatattagtcacaccaaatattaacatgtggatttgataatcaaataagtttgggaaacactcagcaaagaaaagttaatcagattgcttcattatggttctctaatgtattactgtgctgtgtagtatttttgtgtgtgtgtagtactatcaggcattactactactacttttccaagaaatggaactgacgtgcaatattcaccaaacttatttgacactggagccattttcagacctcattattacatgatgttagtatgtcaagtaaagtactccgagaaaactatgatctatggcaaaagattccaggttcttctcttggattgtacctatggctcagagtccttattttacaaatacaacttggaagacctatgacgcacccatcaacatgaagttatctgtcatttctctaagcacacagattcattaaatccagctttttactatgtgaaaagttgaaatgttatttctaatctcaagtattcactataggagctcttctgtatatcacctataaaaataccgcaaacttttcttttgatccagcttgaccatcaaaaaaactctgtagtttagccttattactttgaaccatatgcagaaagagtttcactgagcttatcttgggaggtttttaggttttttgagaggtagtaggagaagcagt

SEQ ID NO: 28871 - DNA, 949 bp, Bovine  19866880574271
  misc_feature (1)..(1): n is a, c, g, or t
ncattcaaatctgtgttgttcaagggtcaactgtacttgttttatccctactattccagagttctaatcctggccctctaatacactaaaaatagaggagctttgtttttaattaaattaggctttgactatatatcacaatttatggtaaaccactcaccttgaatagacaaacagatgactgaatggataaataatgaacaaaatattgactgagtacattattaaatgtgtcagttcattttgggttccgttcttaactgttcatttataccctgctcttcatcatctgtgcctttgtgtaatcggtaatcagtatctgagttttactgagtcacattttccgttttatctcaatggaatttcagtttcacagtaatcagatcacattttcagtttaaaggaaatatttcacccattctttccaggcccactgttttctcagtctggctctgtgcccagaagactggcctctgcggactgcatcacctggtctttcttgcctttgcactactggctggcttttgcttgtgggaagctcagagagagaagtcacaccatacttagtccgaccacttcctctctgcctaaggagccataatttggcagggatcgcattcttctgtagccagcagctcccacagatgcagctctcatagggttctgctcaaatgctttcacccctcaacacctcaggctgtgggacattaaggactgttgctatttctgagctgtatgtacttctctacaatttgctgcctcctctcacacggtccacatctctataagaagagtgacttaatccctcttttctcctttggttgtgccacctgttttccagcgtgggctgtaatataggctaacaaccacctgtactaagaataagggttttaaactggtcgactacaaaatgctctggtttccagctaccatatagctattttcatca

SEQ ID NO: 28872 - DNA, 3773 bp, Bovine  19866880600244
  misc_feature (1)..(1): n is a, c, g, or t
ntttctagtcaacacatccatgcatcatatattaccagcatttttttccagtggcctgtgtttacgaatctttttaaagctaccattttagttttcagagaaatggtatatactgtgttttcaattcacgtttcatggatttacataaaatgtcattacttgtacgtggttaaaataatggcatcagaatttgcaattttgagaactgagagcaagtgacaacacagcacttaggagtgaacgtgtgcaaggataccagaggggacaacagcagtaagtgatcaggatcccatggacgtcagcaggcattaggtgatctcgtggcttgattaagagaagattggctaagagagctgtaataactgtgaataacacttatgcaaggtttattctgggccaagccctgtgttattacttaatgtagtctctcatctaacctttaaggtaactatgaaagttaggcattagtacccccatttatgcaagggaaaactatttctgccaagtagcttgtccaagatcaaatgctagaaagtaactgagttaaaaactcctctagctctctccagagacctgatttttaaccatcttgctatatcatagtaattttttgactaacaactcaaaaatattattaaaatttttgagttgactaacaactcaaaaatattatacttacagagagaatgcagatatcactaaaaaggctccattttactaaaggactcattttttcgacttggtgtccattgttgttcctcctgttacagggagtcacaggaaaagttttgttgaaggagcctggaaaaatacaagcagtgactttggagttctgtataaatgagggccaatagaccaaatgtctcctcctgctctgagttatttattagaacgtttcccaattgagtagcgagtgatgccacatttaataaagcctcaggacttccatgaggtctattagcttgcactttgctgagttaggaacacaaagactttatgacagacatttgttttcttgtggttctttgtactgttgctctgctctgttagtttaagtccttcagttttgatgaaagctttgatgtttgattagagaggataattagaataattagggaaggtttctggcttttattggtgatttagacagtgacatgtttatggctaagctatggcatcaaccagatttcatatttatatacatatatttttttccacatctcttatgtttaggaaagaatattctgaaaataagttgaaagtagaaaattgaccttgattttatgacgtaagtcttggagtaagccaaccatttgttttgggaggtttctagagctgatgaagaaaactgtctaaaagtcctcatccttcgtgaatcagctggtgctgttgctctgcattctgtttaatcaagtcaaaataattttgggtttaatagatttttggaatctcctgtacctaaatggaatgcttttgccttaagtgaatttgacactcaactccctagagtgcctttattatcagcatgttttcttcacaccttttgcatattttcatgtattaggaagtcacttctcttgtgactttgagcgttgacatagatcatgtggtttatccaaatcagcctctccttcccctggtgctgtgctgctaaaggtctaataacgggctctcagtgggaagagacttggccctgattaatagcatttggtgatgtacatggtaaaaaaaatcttcccttctggcctatgtgaggcaccactgtggttgggttgggaagagatgtgaacagtcagttctcacgaggtaatctgagcaggcaatctgtctcttatcaagtagcacaattctgtgagttcacttctgatgttgactgatgggaatgcaatgcaaagttcctctgggggaattccctgggtgtccagtggttaagactctaggctttcactgctggggccttacggtccatccttggtcagggaactaagatcctgcaaatgtagcatggttaaaaaaaaaaaaaaatttcctctggcagggcatccttactgagttttcaagctatttcttctcaagtcttttacttacacgttaagtcaaagatttcattttagagcttatctgtgtgtaagtgtgtatatgtttttttggggggtgtgtgtgtatatacacataaattggtggtggtgtttaatcaccaagttatgtctgactctgcgaccccacggactgtaacccgccaggctcctctgtccatggcatgtcccaggcaggaatactggagttgggttgccatttccttctccaaaggatcttcccaacccaggatcgattctgtctcacctgcattggcagattctttaccactgagcccacctggaaagcccgcacatatataaacatacacatgcgatttatatgtattaaaattgatattctgtttcaggttttcattttgggttttgtcataccacattttcttaatgttttcaagagtcttgagtcccgtctctttaacttgttttgctcagcctcctgagtaataaaatcagtaatcaatcagtaataaaattgttttaggcgtgagcccctcactttcaactcttccttccagtataccctcacagatttccctaatgcaaacttactgtggtgggatagacttttcttttctttttttttttcaagaagggaaacaataacgcaaatgtgacaccagccagtttcatgcaacctcttcataacctttgaacaggattccaagtgcaagtaagatgattccattgatcttttaatgaaagaatgaaagggggttaatttctctggaaacatctctggcttttcatggctatcttggtctgaagttccctgtattacactggataccctcagcaggatgaaacatggaaaaatactaccacccactggtccttcctcctcaagacaagatttccagatgttagataggttggctcttcttggataaggttttggtccctttacagttggtacaagtagtgaccgcagtagtcaaaatggagcagagggtcaaacttggaaaatcccttctgcctcacacatatagaaatgatagatgacataccatcaaagctcagaaaacaaacaaacaaggacaagtggccccaaaacaaaatacatattgtggggggctcagaatgttgtagaaatgcctgagagtgagcagtgttagtgctgctgtctctgaagtcttcctctcatgtcaccttcccaactcggcttccctgaacaccacgctaaagcaacttctctttctctacccagacaagcactcacccccttctctgcttcatttttatcctttattgttgttcagtggttcagtcatgtctgtctttttgtgaccccatggactgcagcatgccaggcttccctgtcgctcacaatctcccagagtttgttcaaactcatgtccattgagtcggtgatgccatccaaccatctcattctctgtcacccccttctcctccattgctcgatctttcctaggatcagggtcttttccagtcagctggctcttcacatcaggtgaatgaagcattagagcttcagcttcagcattagtccttccaatgaatattcagggttgatttccttcaggattgactggtttgatctctttgctgtccaagggactctcaagagtcttttccagcaccacagtttgaagttcatttttatccttagtactgattatcccttaacatactgtgtgccttattaatttatcttat

SEQ ID NO: 28873 - DNA, 1191 bp, Bovine  19866880675215
  misc_feature (1)..(1): n is a, c, g, or t
ntcaattgaaaaaaataagggctgtagattttaatggtggaaaactaatagaactgaggccagcataagcaaaatgttattcatttctttgattgaagcatatatataaatatgagtgtgttaaaagcaagaatccaagtgaaaaagtcataaattataacgctgaaaaaagtcatgttccaaaataaatcttgttttcttcagcagtctggataacattttaccttgtgttcaaactatccatgcatgcaatgaatgcagttttgtcaacctcaaattattccccatatctgatcgtcttgtagaaattcaacccgtgtccacggaaatgtagcactacgctgcagagctcagtaaaacaaatactacttggcatttaaatacatcaagtccctttaaatggtctctcaattttattcaaatatttccacctggaaaaacagactaaaaatacaacacaatatttcagagattaaatcagtataaaaacttgccctggtcaatcacagtattaacctcttattccataatttattcataaattaacagatacctttctgagtttcttcctgcctacttcttatattacaattcattgatgtaaaagattttaaggtccttgtacttgaatttaccacatcttgcatgatcattcctcatccttacaggaataggcatccaccgtgtgctcaaggctaattttcccccagtagtctgcatcttatttcctaccatttctttgccacattcttccaacatttacttttaccttcttctgcaccatcaatctctccttctctactggctcatctctttagggctataaatcttttgaagtaaagacacaaaaagaacaaaagcataaaagtccccaaacctgcaaatgtcttctgggtacctataacctagtaacaagagaacaccttttctctgccatgcttttcaaaagagtggttccatccatggaatccaatcatctgattccattcatatcctccatatatagccattatgtgctagtaagtgttcagcaattagctctcataacacaaatacatttgtatgtatgtacgtatgaagcaaaaggcaaaggaaaaaaggaaagatatacccatttgaacgcagagttccaaagaatggcaaggagagataagaaagccttcctcagtgatcagtgcaaagaaatagagg

SEQ ID NO: 28874 - DNA, 1625 bp, Bovine  19866880708736
  misc_feature (1)..(1): n is a, c, g, or t
nttaaatccctttaagcaaaatgatgattgaagaataaaaatgatcaattttccccttatcataaaatatcagcaagtaacataaaaatgtaacttttcctatcaggtataatttttcattgttgctaaattttcatgtccaattttctcaccctggaatcttcctaatataaattgagctaattttgagtttaaaaaatttactcagtcacctaaaaatgaattaatctgagctctggtcacatgtgcaagacataataatctatatcaaatttttattaacatacaccagaaaaatagctaaaacagctaccaaacttgatctggcagaagaaagttgtctctccacatgaagccactgagaaataccagaagggttttctggaattttataatgtagatgaaattttctttttagaaataaaaattgcattttatagaaaactacacagatacaaatcaaatacatgactaacttcatacaagcagtgtggtgaagaatttagggttcacatggagtcaggtcagacggcctgggttggaaaccatgccttggaagctgtgaaaaattaagacagctactgaatctctcaatgttctcatctgtaaaacagggatgatgatactagtactaacgtctaggattttaatgaataataggagaaatgactataaaatctttggcatagtgcctaattgttattgttattaagatcacagattcacacctggcaggtatggcaaactgcctggttttgaatcacagctgctgttaattactggcattgaaacctcgggcaagtaacctaacctctatgagcatcagattcttcaaaaggagaaaataatagtaacaacgtacttcaaggatataaaataacacacgaatcacttagcccaatactggaagacaataagatctcagaaaaatatatatgtctcatgatatcctcatagtggaattcatctttgcaaataatttaatatttggcttttcatttatgtgcactgaaaacttttgtcatttaaaaatttttctcacaaatccaaaataaagaattattctacagcttgagggtcagaaatattttatttttgcaggggtgaatagttcgggattgatctagacaggggttttagaagtatattcactacagaaccattcattctcagtgctcccaagtagtccacagatagacagtttacttaaacttcattcttttctaatatttttagctgcaatgagagaaactaacacttcaaacaagaagtcttgatgtacagtcccacaccgaccagaaaataacccagcaacgtatgcagctatacttgtttaaatcattcagatgcccaaaagtattatcaggcagattctcagattattttcttccttgctggtctttttttcacagcagccttcccggcagccatgcttggtactgaaatacgcttaacattggtaccctttcaatttcaaggttgtatcctatttcctggactgccctctccagactgacattgaaagatggatcctctctttcagaatgactatctcataacctacattccagctaaaagtagactcaagatgaaggccaacaaaagttcttccaggcctggaggga

SEQ ID NO: 28875 - DNA, 1267 bp, Bovine  19866880743178
  misc_feature (1)..(1): n is a, c, g, or t
naaatcttgagtcaatgttaaaaaataaccttttcatggaactttctccctgcttccacaagtatcaagtaattatagcaaaaaagtttttcttcagaatccccccaaattatttgctgtttaagtttaccttcccttgtgtcagcctggtacatagtaaaataaaaaattactttttgcatataattcaaactgccatctctttggtattctagaaaaattagagtcaaaaaccaatgtaatgtcacccttttgacataattacatcccaaaggcccccaagtcctaatgccatcacattgagagtcagaattttaatatatgaatgtgggggaagcacattttatctactgcgattgtatataaataaaccagaaccaataataataataataacaacaacaacaaccagaaaagtaaaaatcaccaaacctgggtaggattatttcactggaaatcaaaataagctctatgttttagagctaaggaaatggaactgcagaatgattcaatgagttgcccaaatttattttttattcaacatctgctgatgtagtaccttttagaaaattaactcattgaatcctcttaacaatcctgatgtcaatgccactgtgatcatcattttacagatgaggaaactggggtacagagaagttaggagccttcgcctgttcaatggcaaagccaggatcagctcccagactcgccttttatagaccccacatgtcatgtaaataaccactgcctcactcaaccagttagtggcagagtcaaggccagaacacaagagtcctgaccctaaatgtttttttctactctaaaatttctgtctccacacagtcaagacaggttttcctcgtcccagtcactgaggctcttggctatctctacatcaaaaatacttccttttctccagaaacttcagagttggttgtgtttctcaatttcacagatggaattttttttctctcctcagctacactcatctcacatctccctacaaccaaaccatgactaggtaaaccacaacaaaaaaagcctcggcatcatgcattgttttaaacaaccaaccagggagaaagagcaaaaactaactacatgaaggtcctacttttatttgtcctggaaatgaaggagtagaaatgcctgcactcatctagacaggtcaatcgcaacacaaacacttgttgagctttatggtcacctccctttcaggggccacagctggagaaagcagtgagccctttgtttcacttcactttct

SEQ ID NO: 28876 - DNA, 1961 bp, Bovine  19866880805980
  misc_feature (1)..(1): n is a, c, g, or t
naaggtctctggccagtacgtaccatcaatgcacgtcaattcatagccactgaacttttatgtaaaatattctgcctcccacctactgaagtcggggtgtgcctcctcttgactggcacttggatctgctctctgtaggagcattccttgcctccctggttacctgcatcatgtgtaactgaacccatgaccaaacacccaccttggtgggctaggacagtaaacagtctgcctgccatgagggagacccaggtttgataccttggtcgggaagatcccttgaagaagggaatggctacccactgtagtattcttgcctggagaattccatggacagaggagcctggagggctgcagtccatggggtcgcaaagagtcagacagaactgagcgactaacacttttacttcaagtagcagccttgtctgtacaagcaggctctgcctggttgtgccacgtgggcccctgtgcaatgcctacttgttcctggtcacgccacttaaatcccaaagcagaagtcacccagctgctttcttccagcctgttgcacttgaaaacaggaagccggggtttaggaagatcttgcaagacaactcacaaagaagaaaagtgtttgcaatcaggcttctttcaagagctgttcctagagtgtgattttggagatgctagtttggctttttggttttgcacaatccaagagaccataaggtcacagacaccagcccaaccacaacaccaccacacctctgaagcacaggcagggcactcagagttctttttcctctggaaaagattgaataattaagcagagaagtgagatttcttctgactataaaccagagtatagaaaaatataatggttttttattgtctaggtagccagtgcaaactgctccatgatctagagttggaaataatgtcacatttcttcatttcccaaggcaaattagaaccgggcctacctactagccattagatgagcaaaacatccacaattaatgtcctcgcccaggggtatttaagaactcagagagcctttgcaggtggtgagctgggaggcttggaggggtgggcatctggactgtggctcctgcagacctaatggtggtcctcacgctaggctttgctcacacacagtccacctagccttgtagccacattcatgtgcagctttctgcctgggcctgtggaatctcctcagatgggataacctgcttccactgtcccttagaaagacattagacgttaaagaagccaagctcttccacacctcaagcaggagaaaatgtatctttccttcattccttgacatgtcccagtctgctttctctcataataggtaggaattataaaattattattaatatttggtgcacttttgaacactgaagtaggatttacattgctataatattttcagagggaagtttggctattatctctcagtattttaaatgtaaatatatattatgttagatattccaatatgaagattttaataaatatctcaaagtatacaaagatatacatataaagatgagtattccttccttgtttgtaaaatagttagaaaaaattgtaaacaacctaagcttccattaataggggatagttggataatttgtggcatgtgcatacactaaatcactacccaaactcctagtaagaaaaaaactgaatcattccatagaaaatatgttaagtgaaaaagcttcatacacccacacacaaatgaaacagtgaaatgattgcatatagagtatgatagtatatacatcaatgcagcaggccattaaatttttacaatttaaaaatggtaaattctggaaaatggtttgaaaaaaatgaaactttgactttttgtttcatgcatgtctttactctatacactttgcaacagcagaaactacatttgcaaatataggtttaaatttggctctttacattgaaaatatattaca

SEQ ID NO: 28877 - DNA, 1765 bp, Bovine  19866880841409
  misc_feature (1)..(1): n is a, c, g, or t
nttctaattgtttctacattcagtgattctttttcttcgatgcatagatgactttctattgaggcatagcacatagaaaagaaatcatgtgaactaattgcatgcacaggatcatatgatactatcaggacgtttttcatgactttgcacagattatgttaaacgtaccagatggaactctgcactttgaaactggaacagcaaggccaaacactgactgctctccccacccccggggcctctctggcgctgcttgaacctcttctttccctgaggttcatcgaccttaaatatttggttaaagtggcaacaccgctcccatttttcagttttggagagaggtacacatgtcaacactaatgatcagtgtttctcttaatctcagatgccagccagtatgttaaacctctatccatcaattctgagtgagctaggattgtatgatgaatacttacagattttctaccctgctgggttcttgaagaactttagtaggaaaaaaaaaaaagttggctcctcgcctctgccttgaattgtaaaaatattcctctgaattagcatacttctctgaaatgtccccatatgttgattttttttttaaggtgtgcattaaatgacaaaaactattagagcctgctctgagtcaatattgatagccatcagatcaggaactttctcaaggaaattagatttaacatgaaccatcagagaagaaaaatattattcaccaagcattcagccctcaacctctaacaaatgttatcccaacaagcaatttattctccagagaatgaacataacttcaatttaattcatcattatttattattaatatggagaaatatacattaaaagaaaaaagaccctttaaatttctccaaggccttagagagagctgatttttcgatacttaatgcaaacattccacattcactggttaaatgaaaagcaacattaaatgccactctatctatagcacattttttgtttattgcatggagctggcctgaggcttgtttaaaaaaataccagatgtgtttttgagaaatttatttgtctttgtgtgatgacagatgctctttgaaatgacaaagtatgtaatagcagttggctatttgaaatcaggaaattcagttttttccccaagtcacatctaaaagacaaagctcactaaggttttttgtttttttttaatgtgatcgcattacaagactgccactttaaattattgttccctggcttggaggactaattaattctaaaaggcaaagggttcatttaagaaccattttcctattttgatttaggtgttgtgtggtattaacataaattattcatctatgccatagtctcccagagaaggcaatggcaccccactccagtactcttgcctggaaaatcccatggacagaggagcctggaaggctgcagtccatggggttgctgaaggtcggacatgactgagcgacttcagtttcacttttcactttcatgcgttggagaaggaaatggcaacccactccagtgttcttacctggagaatcccagggacgggggagcctggtgggctgccgtctatggggtcgcacagagttggacacgactgaagcgacttagcaatagcagcatagtctccagtctaagccaagttctttttctctgttccttaaaactgaggataacacacaggtagaatgtgacaaatttttcacctttttaagtgtgagaaaaaggttagcattcataagaggggaaagtctctgca

SEQ ID NO: 28878 - DNA, 1342 bp, Bovine  19866880866790
  misc_feature (1)..(1): n is a, c, g, or t
nactccttgggcatagctctgtctctcttatttttctggctatacatgtaaatcctagtaattctccatagaagtatttagcaaaatttgaataaatgaatggacatgctcaatgacatcaaatgggagaagacagcttgtatttgcattactgaagattagagatctgagcactgtttaaagatgccttcattaaacacaacctgatcttttcttctttctctcttctctacccaaatatcctccctccttccctcctccccccctgcccccctgccccttacacacacacaccctttatacagctatttcaaaaatagtaaaaaaagcaagtgtgagaattttcacttttctcaacctatgcacctaaggagggtgttagatttaaggcctaaatggggggggcggttattacaatggcactttccccaacagatttaagagtgttttctgtactttaccttttcatgtcagaaaatcaatatgttaaaattcatgtaatgtcaatttccagtatggatattttcaccatgcagtagcaaatagtggctggttaatgttttcttttcgaaaatgtgattatacttaattatttataaatgatcccttgctttttaacctttagtttttaaaattgaaaattctttcctgtcctatagtgtcttgtttctcagaccctgagacaaaggtttgagagctggtagcttatttaggaaaaagagaacacatgagtcggagtacgtaagtccatgtttttcagtagcccagtcatgtcctactctttgcgaccccatggactgtagcatgccaggcatccctgtccctcaccgccacccggagtttgcccaagttcatgttcactgcattggtgatgccatccagtcatctcatcctctgacagcctcttcagtagagggttgtattaaaaccttaaagtcagtaagtcaatagagggttgtattaaactgtctacagtttggggcaactgaaacctaattcttcttgaggaaattgtagaaagtcccccttggaattatctatccagaaagcaagggagctgcatgtcacactatagggctccttggtggagggcagcttccagcctgctgcgtgggttcagtgaaaaccccaggcaacaaaatagcagtgttggcagatggaagcctgtgggcatacagttgagtagtaagggccaggggaaagtgggtgggcattagtagagtccgctatatatggagatagtacaccactctgtgaggagtgctcaagtgtgaaaaatatcagaatttaagtggcctaacacaagcatttactcagccattagattatgtgctaagtactg

SEQ ID NO: 28879 - DNA, 1298 bp, Bovine  19866880901601
  misc_feature (1)..(1): n is a, c, g, or t
ntaaatataaattaatttttttaaaaacccacacaaaataaggtgaaggcttctggctgccttgtaaatcaaaaacatggtccccaaaggaacaaaataaatccacaaaaaatccaaaatatatgagagaatttgctttatgataagcagggcatcacatatcagtggggcaaagaaggcaatttaataatgggtgttgtgaaaatatcttgttcattcctcacctgtatatcatgataaacttaaaatacattaaaaatcctggatgtaaaaagaaaccataaaaacatcaaggagatattgggagaatttaattatatccttgaagtgagagagctctttctggtgatgactccaaatccaaaagatatgaaaggaaggattaattcaagtacataagagaaaaataacttttcatggcaaattacaccataaccatatcaaaaatcaaatgatcaattggaaagaaaattgttataacaaaggctgaatgcacagcacataagatccctcaaaagtcattttgaaaaatatttattctacacataaaggcagtacattatacacaggcttttagctcagtgatagcttcttcatattttttcatctgttcttcattgtttggggaatatgtgatttcttaacccagtcccctattgatggacatatggatttgtgttctttaatcttttgctttaaatcattttttaaagagaaacaattttgatgttcaagagcttaaactgcctgtgggttccaattttggctattttcaattttaagctgcttaaccttgaccttgggcctctctgtttccttagcagcattgtgggttgtaaggtaatagtatcaataagatgagatgtttgtgaggattccatgtgttaacatctaggtgaaggacttagaatagtacctggtctattagttattacttgttgatattattatcactatgtgtcaaacaatatatgctttgtgtgtgtgtgtgcacatgtgcactcagtcactcagttgtgtctgactctttgcaaccccatggattgtagcccaccaggctcctacatccatggaattgcccaggcaagaaaactggagtgggttaccatttccttctcgaggggatcttcctgacccagggatcaaacctgggtctcctgtattgctccgatatgcttttaattggctttaaataaacctgtgtttttataatgtttagaacccatagtaaaagagaacttcagggggagatgctatttcttaaaggcaaaaaagtgggatccagcaacgaggaagta

SEQ ID NO: 28880 - DNA, 1576 bp, Bovine  19866880942349
  misc_feature (1)..(1): n is a, c, g, or t
ntaaccaagcacgcacacacacatgcacattagagaaagaaggctacttaatagcacactctgttttaacaggatcaggtgctctaagctctcagaggatgtgtgggtgtgtgttagtcgctcagtcgtgtccgactctttgtgatcccgtggactgcagcccaccaggctcctctgtccatgagattttccaggcaagggtactggagtgggttgccatttcctactccacgggatcttcccaacccagggatcgaacccgggtctcctgaactgcaggcagatcctttactgactaagctacaagggaagaccctctcagaggatacaaaagagcaatttgagttgacagtatgggacagagactcctcagttttcaagtgagagagaaagggcagcttacaacaaaccttaagccaagagcaaagctggagagatgccatggtcagctagtagcagctaataagttgactaaaaacaattcggacaggagaaagtttgccaaggagtcccacttttatgacttaaactttattgctttgatttcctaagcttagagaagtcaaattttgctattgcacctggattagcattagttctaagttcaggaaggaggagaggaaacatttactgttcctgaaatagaaaatatacaagtatggttttaaaacagaaatgctatgatatgctatggtatggccacttgtattaattagattaatcttcctgctgaaaatcactatataaactaagtaaactacaaacaccgggagtgtgaagttatcacaaaacagttacagcagccagaaggtgaagaagccaagactgagaggtaaaaggaaccccaaagaggtcagcctgtatacctgtgggggattcattttgatatttggcaaaactaatacaattatgtaaagtttaaaaataaaataaaatttaaataaataaataaagacattaagaaacatggaaaaaaaaaaagaggtcagcctgaagtctctgcccctgttggccttaaagcaggtgctgattcttcaattataaaatcaccatgtacgacagaccaaggaagagctcatggagctacgacattttacgacaacacccaagggaagaagctcaggaaggaccaatgaaatattttgctcttgaggtcaggtagtcctgtgaataggataatcagaaacagtagatgttcctttataaagcaaatcatctctcaagcaaaaccagattattgggccctgaacaaattgcaaacataaactacgattgtcagtagattctgagctactccgtaaaccacagcatatttttatccctttgagtgattcctccctgctaataaatgtgaaatatttggaaaagagcattctttgaagttgaagccaatctcattgatcttctctcagaaatggacctgctacacaaacagctttctcaactccaaggaaatccgcaataaagcaaacattttaccttgttaaaagaatttttcaagtcctgataattaatgtctcttcacatttacatgaaagacttttgcagaaaatcagttacttctcttctgcaagtt

SEQ ID NO: 28881 - DNA, 1386 bp, Bovine  19866881007629
  misc_feature (1)..(1): n is a, c, g, or t
ngaagtcactatgcacagcctacacgtaaggagtggggagtcagtcctgcctcctttagggtagagtatctatgtaactttctggaatttttacttttacttttttctccagatatcagcattgtgcccacaccaccataggctgttatggattgcaaaactaagtctaaacaaaaattttccctctaggaaattttttcaataaaagtaaaagctttatgataaatctccattctttaaaaatgttagacacagagggaagataaatgaggtatttgtgatggtggtggtgatgatgatgctagatgttgtatagttttctttctagggaaaagtattgcataaattttatttctgtttgaaatgtttgtggcagccccccaggggcccagacctcccactacgcttgtacccttctgacttactttagccaatgaaatatttgcagaagtgatgtgccactttcaagtgcaatctctaacaaccttcctgttgctcctctatttgtctttgccctcagccactagattagcatttttgcaaataaggacagccccttccagaaatgaaggacacacagagccctctgccatatcacagaggacataaacgtcagcaaggaataaaccactaagatttgggggtttgctgttatcacacctttgcctgacctatccagtcagactgcagagtccttcctgagttcctaaaattggagtaccaagtgctatgcttgattcagttctcttcagtgatcacctctgaggtgtagcctttcaggacctgtttgtgtttggttatgatatagtatgtttgaaaatgacttcctattaggtttaaaaaaataacattttttatgagtgaaaaaaaaaaaaatcccatcctttagttattacactgtcaacaaaattaattgaatacccactaaatttttttctgaatattagttttagggtgatgccattctaaaagatataatatttagaagtaatggagaaagacatttaactagaataatataccagaggtagaataatataccagaagcttccacttcagagaccctcatttgcaaagatgccttctaaggctctgtatttataatttagtattattttatttagtagggccccaaatatgtctcagcttcagatgcaccaaacctggctcttcccttgcatactacaatatatgaaaggatgaaacaaagagctataagagttataagaataacaggcaacattcccagtctttgtatgtgacttcccagaaagtgttctgtgcaaggtggccctaaagtttgggttccttggtcagatttaaaactgagtcagcatgtgcatctttaataagagaagaggatatatccaacgtcaggcagagcct

SEQ ID NO: 28882 - DNA, 1340 bp, Bovine  19866881011687
  misc_feature (1)..(1): n is a, c, g, or t
nttggtgtgttttgtttgttgagacagttcctgctgacccttcttggctgtcttggttctgtaaatgttggtgtgtgtgtgcatcttctgaggagtgggtctatggttttcatcagcttctcaaagcagttcttgatgccaaggttaaaaacctctgctttgtagaataggtgttcttgtgatttggagaatcaaaataataaagttagaagggactagaggaaaccacctggcagctaggcaattagaccgtctaggagatagagtgagttatccttttctgggagtggctcgtccgtgactaaagcacacagctcttcacctgtcaaaaccactaggcttcaagtctgcctctgggctcgagagcagttaggcgttctgatgaagagccctctgttgttccttatcacactgcttctgcaacctccttacagcttcaagctgttgaaaatgattacgggacaactgaacagggcctggaacatatgtccagtacagcttaccaaggatgaccttaacaaataaaacccaccaaataggttcttctgccaaccaacttggtgagcgtcctccatgttgtggatcacacaagctacaacctgcacaggtgggcatctctcactgcatgtcaagctgggtttctggtaagtgtgtgggatggtgacaaaatgcatcagaagagaaggcagaatatttggatttagtcctattctgcctaaaattaccatgtccctcacatgcaacctaagggaattgaggagggaaggaaccagaattttcctctctttagtactcaaaaagagccaatagagataataaatagttatgttcagcgaaacttctcaacactggtatggggcttattattattttcattttttagactaaaaacctaagattcagacaacttaatattacgcaaatagtaagtcacagagctgtaattctaacttatccctttgttttttattagtaaactttattttttaagagtagttttggttcacagcaaaattgagtggaaacgagagagagttcctgtttatccccagttctcacatatacacctcccacgctattaacatccaccagccctttttttaaacacacacaaaaaacaatcttctttttccatcataactcggagattctaaacacattcacgtagtacctaatgtgttggagaaaaatcacatttaaaaggccttgttattaatctttgtaagcaaaaaatgtttttgtaaagtaaataataaccacttcatctgttttctgagtaaatacagagttttgcaattaagagctttccttagagtagggtaacactaccaaaatctagt

SEQ ID NO: 28883 - DNA, 2563 bp, Bovine  19866881074566
  misc_feature (1)..(1): n is a, c, g, or t
nttttgaaaggaactgagatcctagttttatcacacacacacacatacacagacagaggaatcttcttccttttagataaaatgaaggaaaggagacatgaattctgttagatatattctgactcaagacaaagagtctaaatatgatggtcatctcagactcaccctttgtccaaaccttagaaagacagattgttttccgtggtcttcggttcatcactgctggtcctcacacatctttgagatttcggatgtatatgtgcttcaaaaaaattgtacatcacactttactcccctgcctagaacagtctgtgaaaatgacttatttgaatcacaaacttaccgttcaccaggcaggggactttgaacgagttgcttaactcctctaagaatgagttcagtcatctctaaaatgaagataactctatggctgtaggaattaaagtgagataatgtatgtaaagcatctagtacaaattctgggacatggtaattattcaataaaagtaatctgtcttgtcttttccttccctttccctctatcaaaatatattctcaggaagaaactgaggtcagttgtttatacataagtgagaacttgtccattttttcattttttaggatactctaaagaagtagatgtctactgacagtggtggtggtagtaatacagttatgcttactgtatcctttactatgaaagttattgattagctggcttatcctctttacagaaacttaataccgaagaagtcattccatgcaggcagctttctactctgcgtgcagaagaagacttacgccaagtcacattcagtgatatgcttgttcgggtagcactgaatggctatctcagaatgacctgtcctcagagctgtatcccagctgactcaggataagagtaatcgtgaaagtgaagaactaaagagggcgggtgtgggaaagcaattaggctggacttctgtgaaaattcttacaaagaagtcacagtaattagcagaatggaaaatatgatcttcagccacttggagccccactggacatacatatctgggcttcccaggtggcgctagtaattaagaacctgcctgccaatgcaggagacataagagatgtgggttcagtcactgggtcgagaagatcccctggaagagggcatggcaactcactccaggattcttgcttggagaatcccatggacagaggagcctggcgggctacagtccagggggtcacaaagagtcagacacaactgaggccacttagcatgcacacaaacaggcacacaacagcctagcccacttcaggctggagggtgtgagaaactgtgtaagggaggcttgaactgcctttcaaatatttctcagacactccttgctgggatacttgtcagaagtgccctaagtctgtttttctagagacatgaaacccttattcaaggacttgtggagagaaggcagacatggcttcagactctgttctcaatttttactggagggcatacctcatttacaaaaggagagttagattatgtgatcctgtaaaacttggcatagagaaactgaaagcaaatatttaccctacaaggactggttagccatgttaaggtattgagacttaccttgtatgattgtaaggaagtttattgagttattaatgcaatgatgttatctctgattaataaatgttaggaaactgctgtcagatttctggtaaatatttaacaatacttgtgaatcagacagcagaaatggagtaaaatccgcccaccccatcccccctcccttaaaaaaaaaaaccacatttttcttttggctcaaatcaaagtaaaatactttgtcctatgcaattggcctctctgtcactgtgcatcttttaagtttctgggtcagcactgtggggaaattgacacagtttccaaaggaccctcagataagtttgctccattttgttgattcgtatgaagaaacacaatacctaatttttactgagaatatcctaaaatgccttaatcctgactttgaccaaggaaagtaagaggtcttttggcttcttcattgctctctgtctgtggtacgtacatgtgtctgtgtgtgcacatctgtggtttcgtctgtatgaatgtgttcagaaagaatatttgcaacagtattgagatcctgaacgccaagacaaagtttccgtcaacaaatgacagtgttgtctggaaacttctttttggtgtcaattctacctaatacatttcagctccttcatagcctgggggttgtgatagttgatgccatgggagtccagaatattggcatgtgacttcaaagaagagatcaaagagagaaattctaggggagttccaagtgtgttctgtagctgttggtggagagtagcaaacatttataattcactagtagtgtctacactacatcgaatggagtagagatttggtactcattctgttattcatcggttgtctccctacgttgatagcacacaccaattagaataattagctaattgaccgagctctactttgtcttttgttttatagacagtcctagactataga

SEQ ID NO: 28884 - DNA, 740 bp, Bovine  19866881238471
  misc_feature (1)..(1): n is a, c, g, or t
nctgttgtatttttttttttttccctttggaaaaagtatcaagtgttcccacgaattttagagaacagcaaatatcaattaggaaacaccttttgaactatatgtcaccaatttaaaaactaacgatgcctcaattctggaagtgacaaccaaatgaaaggtattttcaggtccttggaaacacaacaccatgagagggagggaaggaaaatagcttctttgggaaaacacaggcacacccacacacacggacatctacacagtaatccatgacaatccactcatgttccttcacacatgtgtgtatttgtgcctctgaatgttctcattgctaagtttagctatgtattttctatgggcctattcatttagctatttttctaagtcaataatttctgcaaagcatttcactctgtctctaacacccagaccaaacctctagagcacagaacattcacaattaatgggcttcatgtacttttgtttccaagcattgagttgtgtcttgactgaggttcattttcacttgtttcaaacctgtaattataaatttacaagtgaagtaagtgtaacaaggaagaaatttgctgtgtctatgaaaattcagtttaaagttctaatatgttttaagaaggggtatcattaaaaaatgcttttgaattaattgtgggcagaaaagttgttacaagagatcagggaataaaatgttaacattttatggacattcagcactctgcttt

SEQ ID NO: 28885 - DNA, 2908 bp, Bovine  19866881249361
  misc_feature (1)..(1): n is a, c, g, or t
ntactaatccccagccctaatccccagtggtggtggaaggtggggcctttgggaggtaattaggctgagattaggatgtgagggtgggacctgcatgatgggattaacaacctgataaaaagagggggagatacaaactctctctccatgttgtgaggatgcagtaagaaggctgcaagctaagaaggatgcgctcatcagacatcatgctggccagcactttgatcttagactctttagcctccaggactgtgaaaaacatttgtttaagcacccagtctatagtatgttgttataacagcctaaactgattaacacagattgctattgaggaaaaaaacaaaaacaaaaccccaaattcttctcataagaatcttctagggtctctatcaaaagaaaaagacattttataatactgaagcagggaccaagccattgatttttttttaagccttcacttaagacaatagttaggaccaagtgaactcacaggaaacttccaaagtctgctcaagattgctatatgaaataatattatttgttataggacagattattttaagaacagaaaaatggatgggaagcatttctatatattctgcaacattgggttatctgcctccaaagataacttgaagattaggacttagtcttttcagaacattctttcactggtcttattttaataaaagcaattaggcctttttcaataaggggttcactccctgccacctcaggagactgaataatatgagagaatttacaagcctcatgttgatttcggaaagctctcacagtaaccgtcctaaacttgtatgtaagagtgtcctggactggccccttcctgcccactggacctgttgtgcacatgcttcccaatttcatgttcagtgaggacatgttggtagcttgaatttggcaggagtacgtatttcatgaaaatatgcaaacagtgccagttaggacctaagttttccagaaagctggttgttaaacctttaccagcatcccactgtttataatccaggtcagcgtcttcaggcatggctcttgtaccatgtctttttggattaaactcttcactgattcatagaagaagaatctttatatccattcctttccggagaggtttccacagttatgacaactgtttcttcttttctgaggcacagccaccttgtgttctctctgacattcagatggcttcgacagaggaaaagatcacatgactgaatcactggatcgtgcacaactgaatcacaactgagtgaccagtgtgtttttagtggaaacagatttgccaaagggcactttttattccaaatgaacatttttttttccagtttatttcatgcttactattactgtcttaagcactataagggatacaatggtcgtttcttacagaatcctttcaaacttcctaggaaattcactgaatttctaataatcagagaaatttattagccaggactaatgaaatatacaaaacaaataggaaaggcaggtagtaagagccaatcatttaaccttctgaaatttgcaccaaatgatccatattttgaacaagtatacatgcttgaggggcagaggaagcagagaagttgggaaaatttgagaggtatttgcattcaacttcagtaaaatgttgaattactattgtctccagagattgtattcttctgattcatttaggaaaatttttctggacttcttacacttattttttatattcttcttatattttttatatttatttttatatttattcttatatttatttttcctagattcattgaacttttctgattcttcatggtagtagagcacatacaatgtaatattactttaaaaattggagattgcatagaactcagccattattctttcctgatgaagcagaaaacatagttttggacaatttattaactccaggacccatatttttgtaaatgaggccccaatttgagcttatcttttttatcatttgcttgtaggaattcagtatattctactaatgacgttgagggtactatttaattctaagggagtatgattccatggttttcttacaagtctagggcatatacctatacactaaaaaggttaactgaggattttgcttgtttgaatatgtgtaagttatcaaactttgaataaataacattttagagtatttcttaagatttccacattatactatccaaattctgttaccaaatagaggaacacaggaaacagtctcctaagcaagtctattaatagaaggagatttctgtttcaagcaaagggaaggaggaaatctaggctttatttcatgtacacaccatgtgaccaaaactgttctagctgtttcacacatgttcatcttgaatcacagcgattgtgtaagaaattttgtctccattatggagatgaggaatcagagattcaaagacatgtattaactgagtggtaatatagttggtaagcagtatacacaagaatggaaattaaggtttatctaattctagagctaatttttattttcattgccccttgctccagaaatatgtctatatatataaacttttataaaagaaatttcaaaatccattttttttcagattctgaagcagtaaagtctgtatcaatatatttctgagtccaaaaaccaaaattatccttacagatcaatccccaaacagaaatacattttttatgtattaattcaatattgctcaaaataaaaatcacctgagacatctgcttggtctagagataaccctaaaagagggatgtcatgtaagtttcatttcctatgtcagatcttatcccttggtagtggctttgaattcctgcgtggagaagaaatctgaagttatctctggagtcaaggaagtaccttgggattcatcagagatgagga

SEQ ID NO: 28886 - DNA, 764 bp, Bovine  19866881365389
  misc_feature (1)..(1): n is a, c, g, or t
naatagccagtttttctttgcttatttactgtagaaatgtggaaaatccctgtgctgggttatttactttgaatctggctgaagtgacagatacagattctagaattttatgaatagatgatatataaataacagattcatttattttaatatgtgctttgagtctttatttggatttgtttcttagaaaacactgctttgtagagcattatgtataactgctgtcatgtgacttgttttgcagtaggactctcttcagtataatttagatgctagaggggccagaaaaatatcactagttgtgacatagtcttattactgacatcttataaatatggagcctataattcattacagtaatacctctgtctaccttttgttgaaatcttattattggaaattagtacattatttgtattaatgattgaatatcttgatttatttcaataaggtgtatgaattgatgcttcgagatgaaagattttatccttccttcagacagaatgcactttatgtgcgcatgttagctgagctggatatgttaaaagatcctagtttcagaggatcagatgacggtgatggaggtaaggtagtgcacattgtacatttatccattatatatgtatattcctgtatatattctgcttaccaaatagcataaaaatgttcttaaagctgaaatataaattgtaatatattttaaaatccatgaataaatgatgaagtttacttacttaaactaaattaaaatgttaaaatctgat

SEQ ID NO: 28887 - DNA, 1572 bp, Bovine  19866881394062
  misc_feature (1)..(1): n is a, c, g, or t
nataaatgtgctaaatttgatacagtgagtgggaaatttttctcaccacatggaaccactaatgagcttgggaagtaaacatggttaagtagacatagttgcctttttgttactgtaattctgaattggcccattagcatgaatatcatttcagtacactttgcaattgtagctttgggactgacccccaaaccccaagccaaaaaagaaaattgtctataaatgacagagctattgtgggttagattatgttcccctaaaagatacattcaagccctaacccctggtacctgtgaaagtgaccttatttagaaagagggtcattgtagatataatcaagttaagatgaggtcatgctgaagtagggtgggccgttaatccaatgtgattgatgcccttatccggggaacagaggtagacacacagggagaacacctgtgacaacagaggtagagatgatgtgatgcagcagcaagccaaggaatgcaaaggattgccaatcaccaggagaaggagaggcgaggaaggagtccacccagagtctcagagggagcatgaccttgctgacaccctgatttcagacttctggcttctagaactatgagagaagaaatctctcttgtcgtcagccacttagtctatagtagttatggcagccctcagaaactgacattagaggtaacagtgggagcagtgatgaagagaggcagtggtagtgctctgtggatttgcattctcctgtagcttcatgtcttcctgcctctcccctgtgatcttaatataaacatcagaaaattggggttttgtttcttcctgcatcacatgcctttgcagcactacttaatctctctgggtctcatttgcttcattgctgaagagaggatctcgcacccttctgagtaacactagccatcatttaggggaattttgcctatccagacccagggctcactgcttaacacgcatgattttatttactttttataagaattctatgaggaatgtattattatccctactttacaaatggatcaaataatgagatttctctgtgactccccatgttttcttgtcctctcagagacttgaacatgagagtcagagctgaaaaagtgttagtatttatgtttccttgatgggaaaggtaacaacagatatgtaacttgacttaatctgcgtagaagggggttaaaggcattggaaagggatgttacaatcactttggtcatttcacactttctccatgtgcagaacagagagtaaatattttttaaacttctctttgatatatttgactcctttttattttgaacaaaatattagtataatttccttattttctgacttacttgaaagtttatttatttattttttttcaggaaacctaaattttcaatgatttttttttgtctaaaaatgatagtaataaacaattttttaaaaaccaacagctgcaaaataaggcacaacaaggcattatatactgacaatgcatatttaaaacagcataattcattgtggaatagctctgtaacatatttaatttgcttaatttgctcttcaatgtatcta

SEQ ID NO: 28888 - DNA, 1143 bp, Bovine  19866881403486
  misc_feature (1)..(1): n is a, c, g, or t
ncagcagcagcagctgcagcagcagcagcaatgggctcctagctgcctaaggttacttgaggaagctcctgtggttagtttgtatccactgtgtgcctagggcacacctgcaggagttggaaaaaatctctgtggttatttttgtagcctatctgtgagctcacccatatctctcctggatgtgtctgggatgggctttagagatcagcttacatccctttccactaggctaccccttgttgctcatgcctaacttcctacctaacacttggattttcccagcttcacctcttgctcagcagatggtatttccactgagcccctttggtataggagcaggaaaaaacccaaaactcagttggctctgggaccagagaacactcacctcttaagtcagaagtgtctttattctatttctggatctcaaattagcaccttttgtttagtggttctcctccaggggtttgctttcttggaacagtccatccacttgcagcaagtttgaaataagagctttcagggttataggtcatgtggtatcagcccagttgatctcaacacctctgataaacagcagcaaaagaaaggactctttccacgtgagtttcttgtctgtccctgaatcttagggaggatattattccttaccccgaaaagctatcatcttgttctacaaaggccaaataaatataattaaccccaaatttgtgtttggctgaccaatcagcacagtcataaaaagataacgttcatgaaataaatgacgagacctccttgacaagtcaataaggaaaaaatcttgagataaatcaagatgaatgggaaatcagctggaagacatcaaacaggcaaagcaggtgcgttggcctgtgtttgggaagatgaagcacagcatgaggcatcgtgcacttacacaaaagtgagatctgtaacctttgtcaggctttgaactgagctaaatgcatgacttatttaagaagagctggtcgctgggaactggttgaactaagagtgtcaagaccaattctgaagatgttttctcttccttagcctgtttttctgtgctctgaggactgccaagcagccagtggcagatggcccttctgctaagtgtgttttaagtgatgtgagggatggcatgat

SEQ ID NO: 28889 - DNA, 974 bp, Bovine  19866881418104
  misc_feature (1)..(1): n is a, c, g, or t
ntgaatactacagtcctatgtgatcctggttggttaaatccaaagatgtagaactatggatgtaggaggccaactgtaagttagacttggatgtatactctggctgcagagggtcagcacccctaagacctctttattgttcaagggtcaactgtggttccttgactcctgagaattccaccaagctgtggaaaggaggctaaccctggaagaaagataggtataagcttattcccactttagaataaagcccagtgaactgacttgaaggaaagtcatgcagacgaactccaaggcaagtgctcttttgataactatgctgcctttcctgcacacttcagaaatgaactgaacagtaaaagtgccgaaatctaaagaatattctagaagtccatgtgaaacctcttcagaagtagatttgacctctaatgtagggtgggggtgaccttttaaatagtttagaaatctaatgtttatgttacatcaaatttttcatagacctcacctcctctgaagacacagaacttcctgccagctcccgaaacagccttgggagtggtgggcatcatgactcacggtcaggtaaacattcctttgagacacatatcagcagatttgttattccattactgtccaaacagcagaaaacctcaggaggtaaaattggattagtgttgaagaattcagtctcacctgttctcttttattcaaatcaaacttttaaaacattctctgtggggagttcatttttgctcctaaaaagggataagggaaagatgtgtggcaagtctcagtctttggagtcaagccttattctggaactgtttcatttggaaaccacacctaactcccagcagggaaatcatctgacataaaccacgacctgcttgcaggtgtggaaaaggaaggagttggcatcaaacagcacagtgtataagggtaatccacagaattctataaaagcccatagcact

SEQ ID NO: 28890 - DNA, 603 bp, Bovine  19866881511892
  misc_feature (1)..(1): n is a, c, g, or t
nttcgtggaggacacctgcattccacaggcttccaagggctcttttgaagtatctccaggagctaaacagcctttccagaaggccgtgctcgtaaagtgtgatggatgctctcccagatggccccattttgctcatccagtgctgtcatccaggtagagagaggacagcctcctgccagtttgccctaaaacaaggtcactgatcgtgcagtgaggccacttataaatatttcctatataagtgacatctgatgtcaatacactactcttttaaacactgatctttttggttggctagggaaaaaaaaaagacactctgtttctaggtttatgtagctagaatttcccgtatgcaattttagcagaatcaaatccatgaacagcccatcttatgccaggctgtggttacagcaaagggcctgaatgggactgtttccttgtacagtatgaaaagcaaaataatttagtcattgatgttgttaattaactttataaatagaaagaattctttatagccctctgtgttctggtttcttccttttgaaagccctttactcagtctcaatgtaggtatttatgaaacattttgcctagttcaacata

SEQ ID NO: 28891 - DNA, 1246 bp, Bovine  19866881865416
  misc_feature (1)..(1): n is a, c, g, or t
ncctctgaaactagagtcttttaacatatgcagctcagctaacatgtgcacataaaatgcagtctgactgaaggaaggataaaatctttcatctcaagtactcagaaaggctcaacaaaagataacagaaaaagatgatcaagtgaaaggtacagaagaagatctcgtagataccttctttgaagctgaaatgcaaaaggacatttgtcatgacctactgtgctgtgcacttctctcaaagatgaagaaggattcctaagggcttagtgtgaggtcttcttgtatttattgctacctcctggagatttccagaacaagatcatgtgatctttgtcaggaaaatccttgcatgggaaatccttcttccattaataaatcaactcaatgtcctgattatattaatcaatatatcttatggatgatctgtgattctgattgaaagtatgaggactttattaacatcattaaattgagcaacaatattggagagctagaagctgtcagaagtaaagcagcagaagaattacagtatcttcgatctctagatacagctggtaatgatatcaacaccatgaaaaatcaaataaatagcttattatttgtaaagaagtatgtggttcaaaaatacaatggttgcagtcagacaaagaaatgaatgttgaaactggcagcagattttgggaaactttgcatagttcccctggacagcattcttttttattttatgttattattattatttttttactttacaatattgtattggttttgccatacatcaacatacattcttataggcagtgtgaactccaattttttaaagattacatgcagcaaactggaggtcaggcacatctcttcttctgaatgacagtgaaaggataccaggttatagaccagtagcagctagaagttttatcaagtcaacagagagatggaaaacatcaaaaccaaccacaccaaagattttaatgtgcagcttctgttggaatttatgaacaatatttattagaaaggcatctccaagagttactgttgatgattatttggtgggaaatgttagtaaacactttgaatcatgaagatcaaacccatgaaatctctaatcacattcaaaggaaagtttatgaattgatcccacctccttctttttgttccttactcttccaaaacctatgtagccaattccttgtgttaaattcatgttttgaaactattactgggtagggagagggtcaaagaagat

SEQ ID NO: 28892 - DNA, 632 bp, Bovine  19866882037319
  misc_feature (1)..(1): n is a, c, g, or t
naccccacgtagcctgcctacaggtttgaatatcaagtgtgtttaggcaacaccctggtcttgtgggaatggatctcagcctccagctgaaaggtatgcaagacttcccactgagaattcattctgtcctggtaatggtaaggagttcccatcagaaaattattttgctgtgcctaaggtaaatggaatttcttgtgagtgctcttttcagaaaaaaagtaaaattaaggggatggatgcatttaaatgtcttctatctgtgtaagtatccaaattgtacttctgaatgtccttggcagaggaacctcataattcagaaagttcacggctgtttctcccactcagttggagcatgctttgcttcctcttaagtaataatcaacattgcaaaacttgcaactatgcaactagcaaactgttcccaggaaatacaactgtgagcttttgctcataacaaattgtgttccctgtctcctgcagactcttgttcatgggtttcttggcttcagcacacctgccatttggggactgatggatcttgattgtggggagctgtcctgtgccctgcagaattcttcagcagcatctctgggctcaggtcatgtctcagctcaggcgctagaatagaacat

SEQ ID NO: 28893 - DNA, 753 bp, Bovine  19866880415482
  misc_feature (1)..(1): n is a, c, g, or t
nctagcactaccaaaagtgacagttccaagactgcgatgcactgggaggtcacgtgctaagctgaaggctctccactctgctccacaggagagcgcgctcccagcccctgacaaacagaaagcacaagaggacataccagacatataggagcggccattgcagtcttctatgtccatcttagagagactctgctggaagagaaaacagctactattagaagccagatctggaaagggagtagtttttctaacatcctggagttagcaagaaccctaaaggactacttaagtgtgctctgaccctattctaacaaagcaaaacctcagactttgtcctgatgacaaagacgatgtaccctgacttccaaaaccccagggtctcctccaacccccaacttctgcaggcttccccagtctctcaggtggaaacgctgtctcattccgaactggtccctgattgtgttgtttggagagtagaccctctctctgtaagtgaagctgatggtgtaggaaaggagacacgttacagctcagtgctcatcaggcaaagaaacaaccccacagagtcgctacactttgttaagaagggagtagtaatctaagaagtttagatccagtcattcaagggaaacatgtttgggtgggcggaggaagggggacgggaaagtagaagatagaggagagtggcccatctcaggttcagaaaggggacattaaatccttaagtgggttcttcttactttttgtcaatta

SEQ ID NO: 28894 - DNA, 2254 bp, Bovine  19866880430289
  misc_feature (1)..(1): n is a, c, g, or t
ntcagtgtcaggcatggtcggggaagaagacccaggtggagggtggaggtcatgggaggacacggggtagggagaagtcttgggggagagtcagcacttgaggtttgcatcctccttgccctaccctatctcaaccccagtcccttcagggttctggagggagctggggaccagtcccagaggaggcctggggtggcaaggggaggaagcagcccacagggcacccttaccagcagcatgcaggggtgtccacttgcgtttgcgctccttgatgagggcagaggcgccgtgggtcgttagcacctccacacactcagtagagcctcgctcagtggccaggaagagcgcggtccggcccttgtggtccctcacgtccaggttcaccagcgtctcagccagtgtcttcagggcttcacagtgaccgttgtaggcctggaggggtgtgggaaatccatggataaagctccagacatggccccactctgctcttggggcccacggggagactctgggcagcaggcctccccgtgagctccttgggcccctctcagaccactgcctgcttgccacatccccacgagaaggcagaagcaaggacggattcacacgtgctggtacctgtgagccggcctggggcgggtggggacagggaaggcaagaggaaaagacctgggactcacagctaagtgcaaagggctgactggaatggtgctctctacatcctccaggcagttaaaggacatttctaagagctgcaatggacagaacaggaggtgctgaggttctggtattcccaagacatcacccttgactccacccacagcaatccccgaagtccctggatctagagaccacactggattcaaccaccccttggcctgagaatccagacacagaagcagactgcgtgctgggccctgccctgctcccattccccaaaccaggtcccacacgtaccagttcgaggttctgtctattgccataggcggctgcatagtgcacagctgtgtagccctgcctgtcccgcagggaggggtctgcaccgttatccagtaagaattccaaacagctgtgggacaggagcagatggtgaggaagggacaggcctagccagggagggtacagtttgggaggagcagaggatagggcaaaggagcccctccaggctgaggtggcccacgctcacccctcactcttaggaggctaactccggcccgtttgacccagacccaccacctccaggtctgccctgaaccactctagctcctcgaccctttgaatgtgctcctagagaccctggagcacaaccacagttaccaatctgctgattgaaacactcttccccacctccaggcacactgaccctgccttctcctcctagcccattgggaaaaggcctgcttgtctcacactcactcccagcaccctcttctgtgcgaggccctccccagccttcccaacaggtgcctccttccctggcaccactctcacagatcagtagcaactctactagtagtaatagtaatactgcatttaacatttacaacgtgtccaacaccgttttgtgtagtaagtgtgtggtaaatcacttaatcctcacaatgatcctttgaggtagatactgttcttatcccaactgtgtctgaggaaactgaggcccagagattaagttacttgccagaagtcacacagttacaagttaggcctcccagattttaaatatctttttgttgttgttgttagataaataaaccctttaaaacagtcataaagaaaaattacaaggataatagagttcccatatattagtcacccaatttcctctattattaacatcttacactagaaggtgtaatcttggggtattaccccaagaataagaatctcggggtaattcatcttttatccttaccacctacaacagtacttggtgtacctattaagtaaatactcatttaatgcttgaggaataaatgaatttgtgtttagcttttctgatcctctcaagaagaccatccatttcttgaaggaagtatctctcccacttctgcctgtacccatggtgcttggtccaggattaaactcagggtgtaaggcagcagaagacagtggtggagaataacaggatgggaatctgccctgctgggggaggtgcagcccaagggtcttctctgctactcacaagaaggcctcctttctgcggggactccttcaggggctcatcctcttcagcatcatggctggaaggtgagtg

SEQ ID NO: 28895 - DNA, 1140 bp, Bovine  19866880523105
  misc_feature (1)..(1): n is a, c, g, or t
ncagatggtgactgcagccatgaaattaaaaggcgcttactccttggaaggaaagttatgaccaacctagatagcttattgaaaagcagagacattactttgcctacaaaggttcatctagtcaaggctatggtttttcctgtggtcatgtatggatgtgagagttggactgtgaagaaggctgagcgccgaagaattgatgcttttgaagtgtggtgttggagaagactcttgagagtcccttggactgcaaggagatccaaccagtccattctgaaggaaatcagccctgggatttctttggaaggaatgatgctaaagctgaaactccagtaccttggacatctcatgcgaagagccaactcattggaaaagactctgacgctgggagggattgggggcaggaggagaaggggacgacagaggatgagatggctggatggcatcactgactcgatggacgtgactctgagtgaactccgggagttggtgatggacagggaggcctggtgtgctgtgattcatggggtcgcaaagagtcggacatgactgagcgactgatctgatctggtctgatctgaaattgactggaggtgctaacttaggaagaattggtgtgaccaagaatttagttcttttggtgtggttcgtgtcaaaaatgccaatgtcagcagcttttacacccagctgtccaacatttttgttatttacagagacaacacaccatggatttctcttgcccaaggaaaagatattcacctcactcttgccaaagtgaacaacaggaaactgattatcaagcagagcatcaggtgaaattatctcaaggtgacaaaatctgtggagtctttgtacttaattaacaataatactgcatcatatagttagttgttaaagtatgtccaattagtgtaacatctaactgttgctcaaaatgactctttcatcagccttagtgacccagttgccagtgacagaggtagaaataggcagaagaagtgtgtccaatcagtgagttattggccatcacttgctgtatatctgtcatctgtataataaatttaactttttctgatggggaaattaactctaaatttccttgaaatttcaaagtcttaaacttacaccattgatcctatg

SEQ ID NO: 28896 - DNA, 865 bp, Bovine  19866880523952
  misc_feature (1)..(1): n is a, c, g, or t
natttctgtgactgctggaattcagttcaacccgtttggctcaggaagtttaagtagggtgattttggggttggaaacttccacgtcagccctcttgccctctactcccattctcaaccctggaagctttaaacaagtgcttaagtaggtgagtattgagggagaacagggtttggggaataaggtacaaatggggcacagtgggcaggggcccatctatttaagtaaagccaaataccaaaaaatgaaataccaaaaaatgaaaagtcataataaataaataaataaaattcccagatcctcacttttgcccctgccctcacttcccttcccccagccactgctggaaggagaaagagaagaagctaagaatggattttgatttcctctcttactgagaatggtagtcaggggacctccccagccataccaagcccctcaccttgccagtggaagaaaggaggcttggcgtggggctttctcttagtactccatttctgtctctttctcgtggttatctctgcctagtctctgtctctcctgcatctctatccctttgccttctcactgctgctttttgttcctctgtctctatccctctgctctacctctgtctctagtctctctgtcttcttgccaaaccttctcacctcagacattccccacctgaccatgcccctcctctcccccctttcccccaaacccctcatccctcaatcccctacctgcctccctcggttgtattgcacaccgtgtgggcagggaacaaggtgtgatgttacatctgaagaggtggagggagctctagggcctggggagcagggggtcagggctggggggagtctaggggcagggtctgttgggg

SEQ ID NO: 28897 - DNA, 1878 bp, Bovine  19866880532940
  misc_feature (1)..(1): n is a, c, g, or t
nacccgagtcccctcgcccacctgccctccagtccaccccgtggagccctctcccgccccttgccccctccaggacccttctcacctggcagtgggctggcactgggcaggaggttgccctgaacagctgccacaatggcagggctctgggctgcggcggatccgagccccggcccaagaggcaaagaagatggcatggtggtggtcgccggcaggttaggatgtagagggttcgccatggacacaggcaggttaggtggggggagagtggccggggcaaacgggagatggtggtgatgcccatgcaggttaggaggaggggggaggttaatactgatggagtcggctaggctaccaaatgggatgatggatggagcaggagggggagccggcatgccaaaaggcaaacccaaaggagcattacccgccacgcctgggtgcccgctgcctggcactgcccctggcatcattgagggaggagtttgttggttggggaacggtgaggggcctgggaatgaagaggagagatggagaaggttggaggcatacaatctcactcaccaactcactctcacagtgaggataacccagtcactcctaggccaccttcccttttcctgatactagaactgagtgataaatccttggaacaaaattccaaaaatctggctctggggagggagccctgctgacttagggaatagccatggtgaaggaggatctgtagaaactgaggtcaatccttatctccagtcctatcacacactgcctctgaggggaactggaacgtgcccccggaaccctccactcagccagagttccagaagccatcactcaccatggggtccagggggggggtactcctggtgggacggccccaggctggggggcgccagctggtggctgctgctgtggccccacagttgaccctgcctgcccaagctgttcggagggccccaagcttccaggaggggccccactgcccgcaggagccggggccacagaggctggagccatggccaagccatggacagtgggtggcccagcagcgcctggtggtgggataggctgggagcccgggggcagggctggtggtggctgctgctgctgttggtgcatctgctggaagtgctgctgccgggcccgcatctctgcgtacttcagctgctccatgtggaaggcttgtctgtcggccaagagctgctgcctctggtactccagctgccagggccaatggagagctgtcacccgggggcaggaaaccccaaaggcacacaccttgccccctgctttgtcttctgacaagcccagcctcccattctggtgatccccacaccaaacctcagccttgtgcttggcttctgctgttctcgcctcccctcccctctccagttccccccaccaggtcttctggctgcctgcatggcttctcactgcagtggacaagtagacttaatctggtggcagcccttgttcattttcagctccaaagctttgaatttgtcattactttcatctggaaactgaccacccacccccaaccaagttcctctagtcaaatcatgttctttccctccttcaaaactgaagaaaaactcacaattcctaggaagccctcccaaatcacctcactagcttctgagctttggcctctattctgctctcactcagggcttttatacttgattggaaatctcttaattttcatttgtcagatacttgaagcattagccaactttgctgtctccatattggatatatgatatcttcaattgaggagttcaggatcagagtccttgtcttctacttcttttatatcttctaagaatcaaaaagattcgacaccatgtccatcctatttcctttccaactttaacc

SEQ ID NO: 28898 - DNA, 878 bp, Bovine  19866880533529
  misc_feature (1)..(1): n is a, c, g, or t
naatatcacatcctttgtgaataatcactacttctcgttcttacagcatagattaatttgctgtgtttttataatttatataaatggaagcatattgaatatacccttatatgcctgactacttaaactaaggattacgtatgtgagctctattcgttgtatgtggttgtagaaatttcaatccaggctagggtcgggagttaaagtgagagttcggctgtcttccagtgcctggccacggcggcggccctgggagcagaggtggagcatccccattgcgtcaaagatgaaaggctgaggttggctggccctgcttctgggggcccacaaaataaaaaaaagaaatttcagtccatatgcttgttgtataatattcaacttaattaacatgtagcaatatatcaattctactgttgatatttgggtaatatatttttagtcaattattaatagttccgtgttgaatattttcctcagtgaatttcagtgaataattgtgtgccttcatcttgggtatacatctaggaggagactttgctgggtcatagaaaaatgtgtatgtttggctttcaaaaacattgccacagttttcaagaatgcttctgccaatttacactgtcatcagtaatgtaagaggattctgtttattttacatcctagctgacaattgacatttccaatctgatcattttgtggtagtatttctttgtggttttaatttacattcatttaatttctaataaagttgatcttttttcatatttttatttccatgttgacagtatcttttgtgaaatatttgctcaagtctcctaccatttaaaaaattgctttgtctgcttttgattagtgatttagaattccttaatgttttctta

SEQ ID NO: 28899 - DNA, 640 bp, Bovine  19866880548004
  misc_feature (1)..(1): n is a, c, g, or t
nccctatcctggggagggtccttctcagacccagcttcacccccactcccattctgtttattgtctggctgtctccggtcctctagacaagagtcagatcacccctctgttccttctcccactcccatgccagctaagcccccctctttggggtgtctccggggcggtggacacctgaggggtgctggggatgctggcactggaggagttctgttgatttcttcccctcccccccagatctcagcttgaggtttggcactgtcagggccccttccccagggtgggagtgggagaaacacctgtgcttccctcacagttgctgggcctaaatttagaccctgggatcttgggatgtgaacactcccagctggtagagggcgggggtctggggattggagtgggagagatggagtaaagtgactgtctcactgttccgctcagacccctggaatcttcagccgggaacccaggagtcccggatcctggccgccttccctgagggagacaggaggcaggcatggttgggtctctttaccctttatctggctcctgcagcctctgggcatccggccccgtctcagtccttctatagcccctttgtcctggtggtgatgggggcgggggacttgggggagaaggc

SEQ ID NO: 28900 - DNA, 1330 bp, Bovine  19866880568656
  misc_feature (1)..(1): n is a, c, g, or t
nagtcagtgcacataatggaaggtgtctactctgagttgcacagtgtggtggctgaagtgggtgtgcctgtctccgtctcccactttgacttgcacgaggagatgctgtgggtgggaagccatggggtaagaactgtacccctttgaaagggctgaaaggagatattgggggtctcttacctggttttagcccaagaacaactgctttgcagggagccagaactgagttgaggtgatggagttagctgggtttctaaatcaagccaagaggaagggaggggagggagaaggagggagtcatagaatgtagagatggattacatcggtgttcttattcagaaggtatcccacttcttccacaatttgtccattccatgctttgattaatcttgataactacgcattcagttagtctatagccatctgaatacagtctctaatgctcttcctctgttttccatttttataattataggatgttttctttttgaccatgccagccgctttggggatcttagtacccctgaccagagatcaaacccgggcctgggcagtgaaagcatggagtcctaaccactggacaggcagggaattccctaattacagaatgtttaactactgtttctgcacatattacatggaatcattttgtctttggctgactttaatctctccaggagcagttatcattgttcatttttaaaaatgtatccatattgccaatatactcgggagcccaaagattttggaagaaataacatggtgtccgtggtttatttactttccataggatgtgaattgtttttctgttggaaagagtgaattttttggtaatacattcatttcagtaggcactgtctactgctagactaggctcagggaataaagcttaataaaacataatctttgccctcaaggaggtcacaggacaatgaaggaaaaaacccaagtatatgaatgtaattttatggcattttattttattttttattttttttaaattttatggcattttaaaagaaactaaaaagtgtttaacttaataattatgaatttgggatatgaacttaataaatgccagtgtgaaaatacgtactggatgttggtgagcaaagaagagaattagaggatctccagaaggaagtgacacctgagctcagtcttgagagatgcgtaggagccagatgaaaaagggggaaattccgttttgggaaaagcaatggaataaacaatgattcccaagctagtacacagcttggtgattgcacagtgcaggaactacaagcaggtagggtttactggaatggaagatgaagctgaagagttaaag

SEQ ID NO: 28901 - DNA, 1884 bp, Bovine  19866880572637
  misc_feature (1)..(1): n is a, c, g, or t
ntccttgctccctatctggaccctgggttatccattccctgaggttgtctgttttgggggggcctgtgccgggctatacctggccaccagacaaaatagagcagaaatggggcaaggtgacctgaggacagcaggtgtggtatgaagtttggcttttatggggagcatcaaaggttcagaaaaagttggagccctgtatgctgaaaaagttggaggaagggaagactgcggatgaagaattccccaataactacttttgcagcttacctggtagaaaggaacctatgcattaagacaaacatttaaggaaggggcgcagattagtaaggcctgacagaaccattatcttacaaggagagcagggggtgctgttctaggtaccagtgatacaacaatgaagaagacaggcaggggagaagggtaaagaactggaaaacacagaccgaggagtctgagcagtcaatgccaccagggctgctaacctcctccacaaacactctttgctgatactgtgccccccttctctcttatcagccgaccctgcggtgcagacagatggcagccctctttgctgccatttccacttcagccccaaggtgatgttcacaaaggtactgaaggcccagctgtgggtgtatctccggcctgtgccccgcccagccacagtctacttgcagatcttacgactgaaaccactaactggggaagggactgcagggggagggggcggaggcccggcgtcacatccgtatccgctcactcaaaattgacctgcactcacgttccggccactggcaaagcattgacttcaagcaagtactacacagctggttccgccagccacagagcaactggggcatcgagatcaacgccttcgatcctagtggcacagacctggctgtcacgtccctggggccgggagctgaagggctggtgagcagggagcctgagatactggcagatatgaataacctggccctgaggaggtggggtgttggaagtggtaaagcaggaatgtaaagggggttagggaccagcatgatttttctaggcctggagctgactctagaggggttaggtggtggtggtgatggtggtaatagggtgataccagttttcagagatccaaggcaggccaacagttgaaaactgtatttggggtgaaggtgtgagttaatagattcacgggacaacaaagatgggctgttgttgagaccttgggccaaggggctgatgagggtcaggttgccaagagagagagaattagggaaggtgagtttagggagacatggctagctggcaagaaaagtgggtagaaaacaggggttggggaggggagcactggagaagactcagaaatcacttggtctctgttctcctgcccctactgaggggcaggtgagaagaaacagggagtaggagctcctcgaggctctattacatctctttctcctctccctcacccccagcatccttttatggagcttcgagtcctagagaacacaaaacgggtcccggcggaacctgggcctggactgcgatgaacattcaagtgagtcccgctgttgccgctaccccctcactgtggactttgaggcttttggctgggactggatcatcgctcctaaacgctacaaggccaactactgctccggccagtgcgagtacatgtttatgcaaaagtatccgcacacccacttggtgcaacaggctaacccaagaggctctgcggggccctgctgcacacccaccaagatgtccccaatcaacatgctctacttcaatgacaagcagcagattatctacggcaagatccctggcatggtggtggatcgctgtggctgctcctaaggtgggggacagcggatgcctccccaacagacc

SEQ ID NO: 28902 - DNA, 1917 bp, Bovine  19866880573383
  misc_feature (1)..(1): n is a, c, g, or t
naacataatgttgcattgaacaggaatgggcaggaacaggtattcccttctagacagaagatttcccaccacacttcctgacaagcagcaactgagaccagtccaaggtctgacttccaaggtcaggcttcagctaccatccccatctccacaaaaaacatacccacagctctaactattggtgacaaaaatatcagaaagtcaagttttctctatgtactggctctgaaagcctgaaataaggtggacatcacaagtaatgaaagctcttcaaatcctccaaagaatcctgtttgacccagtgatactccaaaattggaatttaaaacacactccatgtggcttcatgggtagaaaggtagtgacaaggatgttgctgaaaaatgcaggtggaagtggagagagggctaagtctccatgtcatccttttggttgcagtagggagaaggggaatttttttcctttggtctcacttaggatctgaagtgaagcccagggatcattattatttttaaaatatttatttatttggctgcaccaggtcttagttgtggtatgtgggatccttgatcttccttgcagcatgtggaatatagttctctgaccaggggtcaaacccaggcccccttgggagcgttgagccatagccactggaccaccagggaggtccctccccagtgatgatgatgatgatgattttaatttttatggaggtttagttgatttacaatgttgtgttagtttcgagtgtacagcaaagtgaatctcttacacatatatccactcagtgggcagcaaagtcattatgttttgtgcttgagaagtcaacatctgttgagtagaacaagatataattctgaagctgccaaattgagggcatctcccaccatcctggggcccaccccagaaggtccactgagacctcttctgattcccaatggtaaggctattttcttttataaagactttatctcaggagccactagtttgacggttcttgtgatccagggagctgtctggattctctgaattaggctgtaagtggggaaggccgaataccgcataccgcataccccaaagaaagattcactgacctactggcagacccatgaggagatgaggaattcctggctggacatttcacataccctaccaaataagatgccacacccagagtgtctaatttggccttttatctggtcttgtcctcagaatttgagttatcttaagtggaaatattctaggtagtcagacacctgttgttaattcttcctaaagtggctcagatagtaaagaatctgcctgcaatgcaggagacccatgtacaatccctgggtcaggaagatcccctggagaagggaatggctacacactccagtattcttgcctggagaattccatgggaagaggaacctggcaagctacagtccatgtagccacagagctagacaagactgagcgacatttttttttttttttttcctcccaaggaaaagtagcagtaaggggaaacagtcaggcctcaatagtcttctgtttggtcatgatattggaaggcctagagttgatctgtgagcaagtcacaaccacaccaggctcaccactgatgctctgagggctcagactggagagactagggtaagctggagctctcaaacatgtaagtgggggtgtttaagtcacaacagtagacagttttggagaaggaaatggcaacccactgcagtattactgcctggaaaatcccatggatagaagaatctggcacgctacaatccatggggtagcaaagagtcagacaaaactgagggattttcacttttttttttcccccaaggatatgaacatgtaccttcacacaggcaaggtgaacaagtagcagtaaggggaagtagccaggcctcaaaagacttctgt

SEQ ID NO: 28903 - DNA, 636 bp, Bovine  19866880590159
  misc_feature (1)..(1): n is a, c, g, or t
ntcccccactcggtcatacagctcgaaggcctccttgaactctgaagtgtaaggagaggtcagtgttgacaaggggttcccatcaccaccaggagaaaggaaattcagaaacagtgtgctttgagctgggcagaagagaggacacaaggagcactagtgtgggaggtttcaaggtcgggaatagaggtaggggaatagaaagaggatctgactggggacttgggatggacactgggctcaggggcgtctcctcaccctccagctggtccttgttaaactcgatctgtggaagagaacagcatgtgaggagagatgacaggactcactcaatccctctccagcactcctcccgaccaactggcagccacttcgggggaggggcccatagggaccaggctgggaacccagccacctcagtcccattcccagctccagaacttgggagaatcccaagaggaggaattattggggggagggtttcctgggaacagggttaatcccatgccacctgttcccctccctctactgccctgagccctgcatccctcacataactgggggctgaacaaaggctaaatttacccctggcccccagctgtgattgtctaacaagtctgtcctcttcagccttccctc

SEQ ID NO: 28904 - DNA, 947 bp, Bovine  19866880593291
  misc_feature (1)..(1): n is a, c, g, or t
ntggtggcaggacgatgattagagcaatcatgtaacagccaatgaggaacttaatgcagaccgtgttgttcatgatggtcgtgtaatgcaggggtttgcagatggccacgtagcggtcataggacatggccgtcagaataaaaaactcagtcacagccaggataacaacaaaaaataattgagtggcacatgcattgtaggtaacagtgttgtccccagatgccattgtgtagaggaatctgggaatgcagacggttgtgaatgacacttccaagatggagaaattccggaggaaaaaatacatgggtgttttgaggtgaggatctaccagagtgagagtgatgatgatcaggttcccagcaacactcaaaaggtaggttagaagcaaaaagatgaacagcagaatctttagattcgggtcatcggttagtcccacaaggatgaactttgttattgctgtgtaatttttcatccctgattcctgacagtggttgtgtctgtgtgttaaaaaaaaagagagaaattagatcagagaactagactgttacatgagttagcagagggatgacatgaaattcctagctaatgttaacttagttacataagccaaggttttattttatttacctgtgaatcaagaatgctattttatttacctgttaataaagaatgctaatggagcaggggttaattaatcattattgctactggattctcactgctgagcattgtactggatactagtcagaaggctctactaaagattcttattactatatcaatgtagtattaattcaatagtaaaggaattatttggttaacaacttaatggaaaggaagctaggctttattatcagtgttaatgaacagaaaaacactgtcataaaaatacacatggtttgtaatttcctgacaataaaacctcaagctgtgctgtcatcttggtt

SEQ ID NO: 28905 - DNA, 1163 bp, Bovine  19866880600464
  misc_feature (1)..(1): n is a, c, g, or t
natggactgagtttgataattttgtttagtgtgaattaacattgtgtttatttaagaaaaaaaaaatatttttttacagaaaccctactgaatttgtagggttttaaaataacatgatgtctgggatttgcttttgaatgcttcagccaaaaaacaaacgaacaacaaaaataaaggatagataaagcaaatgtgacaaaatgctgatagttgttggaccttggggagacacatgcagagccatcacatcactttttttcagacatctttcttggtcagttataatcattttgtttgtccccactcccaatttctacttgcctctagtccatcctcctcactgcttgccaaagtgatccttctaaaacacaaatctgatcatattcaaaaagcttttgaagggtaagttttatggtatatgccatatatcagtacaacaaacaaaatcgtctgaggtgccgttgcctacaggataaagtccaaactcctttgcctggcactcaaagcccccactctatcttcttggcctcatctctcatgatgtacatcagccacattgctagtgtctgctcatggccttctgcctagaatgctttatgccccagccaactatttactgtcttcttcagtcgaccagagtgcaatttacctgtttaaaatctatcattttgttatacattgtgcatgtctattatggctcatattaagcaatgccttggattatagtaatttatgtatatgtctatttcatatactttaacctgaaccccttcagaaccatttctttttcatttcttaagttctttgcacctagcccagtgcctggtacgtcgtgggtattcagtagattaaaatgcactttaaggaacttcccttgttgtccatcaagtggctaaggctctgtgctcccaatgcaggggaccagggttcaatctcaggtcagggaactagatcccacaggtcacaactaagagtttgcaagccacaactacctgacctcacatgccacaactaatcgaagatccctcgtgctgcaactaagtcctagtgcagttaaatatatttttttaatgcactttgaatgtgagaatgaatgatgtgtcacagacactgttgtcccctgagaagggagtgagtaagatttgagggccctcatagtatat

SEQ ID NO: 28906 - DNA, 2504 bp, Bovine  19866880602068
  misc_feature (1)..(1): n is a, c, g, or t
ntttaagaacttctacattaatttccctcccctgtctcaatattcctaagttttcccaatcttctccagggagcatggaacttcctttctcgggaaactctctgagaggtctcactgtttctttccctaggttatcatggttctttactaaaaccttgcagatacattcttaacttcattttacagatctggaaactgaggcccagagagtcagagggtgttatcatgagccccacagctgactggcatcggaataagcagaccggtttccagagtccctttccacgcgtctctcccaagtgcttctctggggcaatgcttcagtttagtgacaattcccaagtatctaacctgggattcaaggggtatttggaggtgccttttgtgtggagggagtcagatctgctgtgagtcttggacttagtgtactcagggttcgttctacactatgggctttgggatcctgggcaagttattttacctctttagtcttcaatttatgaatgtgtaaaatgaagattaaaactacagtgtcatagggttgctgtgagaattattcataattaagataatgtgtcaattgttttcaaaaacaatattctgacagccaccaagtactgtagaactgtctcttggctgattcccaccagggagaagaaaggtatagagatgtgggtagatttacattgagagaaatattttgtattcagggaagaaacactcattgagcagcttactatatgttctattcatcagcatgttctgtctacagacatcaatcagtatacactgaagctgaaggaaaagtacattttagtgattgctttcttaaagggattctgcttcctggttctattccaattgactcccccagggagctagagagaacccctgactttgagttcaagtcttcctggttctgcgcagaaaggttagagggtctcccctggaggccagcactaccactggcgttaggagctgatcctgaagtccaaagctggtggtactttttcattttgtcttagttttcctttggttacatatcaaaggcaaagatgagctggacttaacggtcaaaacagatagagatgagaaaggaagacaccatttggctgggggtgttgagggaggtaggccctcctcaatccctccaccccaaaacacatgtgggggtgggcagtctcagtcttacctctcccacctcccacagcaccaaaggcctcctaccccaggggctgctcccaccgcaacctgggctgtacatgcagcggtttccagcagtcccaaggtcagggggtgtggcacccttttggatcccttatcaccacctccgcgggggctgtagagtgacagcatggaggacgtgaagggcaggctaaatcgctagcgaatcaggtgaggccctcggtgaacccccccttaaaaagtacttacacgtggagtttgtataaatgctgcccttacgcatcctgcatgtgccatttccatgtgcaatactgcgctcgcgacaccctgtctgcctcagcgtccgcgcttcccacgtattccagctggaaactctgctgcatgtctctgttcagcctgggaccctgagtgagggaaactccactgacatgcctgtctcaatatctgtgtgtagagtgggctgaatttcttatcactacggaattttgaaaactgaaatgaagaggagagccaatcagtttacacagagagaagaaaggttcttaaaacattttcaagaaaacagatgcagagtgtcatcaggttgtcgtcaagcctggaacctggaggtcagtagaacaatgttttctgaaggagaatcatttcctgcctagactcctacacggagaccaccaaaggagaaaaaaaaaaaaaaaaaaactactagaaaagaaccaaacactttcacacatgtaaagtttttaaaggcacttccttctcctctcaagaagctgctaaaggatgtgcttcaccaaaacgagggaggagaccgagagaaagatgtaagatcgaagaagccaggatgccaaccccaggaaaggaaaggggactcaccaagatgacagcaaaggaacatcccagggacagctataggccaggcagagaaaccgccccgttcagactgaagccaatcaaagactccaggaaaggttggtcaagatgaccctgagaagactgtgttttggaatattgaaagaggtttacagactgggagcgaattagggatgggactcgtgatcagtaccacaaatatagctaaataaatggggaggggaggcaatcttattccagtgaaatataaaaaactatggaggaaaagggaacaaagtcatgattaccttaggagactcagttgtgaacaacgtgagcacagtcatgataatatgaacactgaacttgaaatgatcaaatttgaccaaaatgatcaaagtgtatcaggaggatgggggaacaggaagtgggtacatgcatgtggtggagatgagggtggggtagcagag

SEQ ID NO: 28907 - DNA, 1972 bp, Bovine  19866880619139
  misc_feature (1)..(1): n is a, c, g, or t
ncccatgcacagcaacaaagacccaggctcaattaaaaattaattaattttttaaaaactaaaaaaaaagaaatagtcataaaggtgctggtagactcaatgaaatgaaatggagaagaggtcaaggaccagagaaactaaagagggcaaaaagctgattctatgggtgtgtggaagtaaaaaaggtgactgagtaaggaagctaaagtaagtgatggggagccctgtcactggtggtgttctgtgtagtaggatatgtagtaggtgcagactgcagtggttctgatgtgtagctggcttgaaaattcaaaggaaaatcaataatctcatgttgaggaattataaaagtattgcagggacttccctgttggtctaggggttaaaagtccaccttgcaatgcagaggacacaggttcaatccctggtaggggaactaagaccacacatgccctagggcaactaagtctgtgtgacccaatggaagattccacatgacacaaccaaaatcccctgtgtggatgcagccaaataaataataaatatgtatctttaagtattccatagatgctgagtggagacactgagaaacagaatgaaatgatatgatacgtcttgtccttgtgggcagtggatgttgaccctgaagttttagagaaaatgctacaattgcatggcaacatcttccaggagaattacagtgacagtggtagatcaatgatctggaagcagcaagggaaagcaaaaaagcagtgtgattccttctcttctacacggtcacatgagaacagaagatacctcttgggagggtaaggtgagatgtcatatctgaattttcattaaatcagtttaaaaaaaacagttaataagtagaaatgtactggacaatgagtaatattttcaaagcacacatcaaaagaggcaaattgaagaagtacctactatgtagagagcaagagaacttgtaccactttgaaaggtgatgttgcagagaagtagcagagacttgggttgtcattagataccatatgagaggtgggttgagaagtaacatggaaaacaagaaaagcaagaggcataaacgtatattttaaaacagactgcatgtaccaaagtacacacacacactcactgctattacaaatacacaatgaggactacaaaaaaacagtaactccttgccttgcacagcattttataaattgctttcacatatactatcttattcgactgtcactgaatagatacgcacatttttcctaaagatgaggcaattaggatggggcatagccaaaatgaaaatcttgattcccaattttcaacatatcaacctcacatacacagcagacacttcagcatctcaatcagccaagatggaaaatcttctctgactagaagaaatagtgggttctataaacttgtcagaggacttgagaggccactagacaccttctcgtttaccttctaccacctcagatccctcaactcttatcaccatcaccagagaaggtaccgaagggtgatgggtggtgttatcaaggagagaactccagctgaaagttgtattaggttcctcttctcctcacacctctggacctcagtgaactaacaattaagatgaggaagagtggaaaaagaactatgtagcaatgaggaggtctccaacagatacagttttgataaatagtatttaaaaggggctccggtagggtagaaagcaggtacactgagagatgggggaggggaaaagggggggatcaggaattggagggaattgagagtggaggcgcccccaagctgaagaacccaaaagagatatgggagctccaagtgctagagaaaagctaagggctcgtgagggtcctggatcaaggaccagcattgaaggaccccagggcttgggtaaccggaagcggagacccccgaacaagagaccagaagggggcgcaggtgacacccccgtaggagagaatga

SEQ ID NO: 28908 - DNA, 1452 bp, Bovine  19866880632548
  misc_feature (1)..(1): n is a, c, g, or t
nttatttaaagtgatagaaatatcaaacataatttataagtaggtattgcaaaaagtagggtgtaaaatgacatgtagtatcattgccattatgtaaaaacaaaataataggggaaaaaattgtagaaaaaagttactggagaaaacatatattgaatgtcacagtgcttgtgttaggatgatttctttatatttttgaaacgttttataatcatttttattactatatagtgaaaagaatcccaatattaattggaaaaaacaatcatacccaacaaaccatacaaaaattaacccaacaacccgattttttttgtaaatggaaaaagtaaaaggtttgccctttatttttccacaactctatcccattgattgtgcttcacgctcaatttcccatggcagttatgacacatggatcccagccagtgaaattgaagcgtctgtggaagacgctccaactcctgagaaacctaggaaggtgagctttgcttgtccgccctccctcccccaagaatactggggccagaccgctcttggaggtgaacagagaggctcctgggcccttgggttcctctgttaagggtccccagacagaacgaaggcttccaggcctctccccaggacagtctgcctttgtacttcaggttcatgcaaaatggattctggacacagacaccttcaatgagtggatgaatgaggaagactacgaagtaaatgatgacaaaaaccctgtctcccgccgaaagaagatttcagccaagacgctgacagatgaggtgaaaactctttttcgtttctcctgagcccttagtacaagtctcagaacaatcttcgctggagattgttggctgacatctgccccaattgttcaacgggcaggtgaacagcccagattcagaccgacgggacaagaagggggggaactataagaagaggaagcgctccccctcaccttcaccaaccccagaagccaagaagaagaatgctaagaaagggtaggccagcccctaaccggcccctgccttcactgctctgtccattccctggttaaggaaggaaggactaatcccctcccataactaccaggcgctggcctacaagggaagaggagatctttagctatccagtgtctacttccggtcctggccactcaaagagagcttaatctgcagatgaaaggtcttcgcctcttccacttactttgtagtgatcagtttcttctttgctcagttctgctgtcgggttttctctcccttttttcttccttgcagttgtttttcttaattaatttatttttggctgcatctggtcttggttgcagtgctcgaggttgctcaagatcttccttgcagctcgtgggctctctagttacagcacacgagctctagggcattcaggcttagtatttgtggcatgggcttagttgccctgccacatgtgggatcttagttc

SEQ ID NO: 28909 - DNA, 1068 bp, Bovine  19866880678691
  misc_feature (1)..(1): n is a, c, g, or t
ncatgggattttccaggcaagagtactggagtggattgccatttccttctccaggggatcttcctgacccagggatcaaaccccagatctcccacattgtaggcagacgctttacctactgtctgagccaccagggaagtcctaagaaagtacctaagtcctaaggaagcacatggacagtacctaagacatggttctgtaattgttactttttatgtaaagatttggtttagaagaaattatatgtgcaaagtatcaagcagaatacttgagtcaatctaactgcctgataaaattctagtttcctttatcctgcagatattgccatgacctcctaaatggttgttctacctctgtctctctgttccggtttgacacactgttaccagattactgctcaagtgcaatttaattatgtaaagttgttcagtataatttgtcaactgttaaatttggcatatacccttctgatctttatttttctgtgcactttaagaacattttttaatcagacggtatttacgtttttatgtgttgccttttcatttaacctcatgacataaatatttttccttgctattaaaaactctttgtaaacatcttttaaaatactggcagagtgttttatttgagcatgcaccctgttaccttttttctgttattggacttccagattgtttctagaattttgttataaaaactcgatgaatgtttttgtctgcatttaggattttttcttaggatagatttctcagaaatagacttactggattggagggtacaaacttttatttatttttaattaattataaaattcatattgtttatagaaaacttagaaaatattttcataactagtgtaaagtataagtcacatgcatgtttggtaattccagagcccaaagatgactacagttaatgtttccttttagtttttctttctatgcacatatacagcattatctatttaacataattcggatcatactgaatggctgtgctttccaggatgtaactctcagaacacttagtagtcctgtgagatgtgctataaaataaaaggctaaa

SEQ ID NO: 28910 - DNA, 1436 bp, Bovine  19866880711238
  misc_feature (1)..(1): n is a, c, g, or t
naaattggttttcctctaaacctaacacactgggacacttttttacaccaccttattaattgaatttgtccttactggctttagaagccctgtgatgtgcccagcctttgtacagtgcccttggaaaccttgattgttgtccctccagaagcttttgttttctcttctacaaagccagtcctagagaaaattgtgtagatgtgtatgtgttttaaatcctcactaggctttgccatttcctacatcctgatggtatcctgtccctttttttttttttttgtcactttcttctatacatctcttcttatcttttctaccttccccttaatcaaagcctactttcaagaaaaatggtctaaaattgctccacattagggtgtaaataacgaagtcatttaaagtattaatcctcccaagaattcttgctttttaaagagggagttaaagaatggaaattatcagtatagaatttcaaacatagatctggagttacaaaaatatatttggagaagaggagtttcccattgctcttgaaatcatacctcatcccttctttttgcccaggagcaaggattgctcttttacagtttgcttgtttgtgctcactgatacgaatttgacttaggaggggacataggtatgagaagcaagtgcctgctccctaatcctatggcatttcagattggtaagtaataaccaaagtgtgagacagtgtatttaaattaaggaaatgcaacagcctggttggaggagggataccttaaaaccctacacaatacactcccacttcccaaaagagtgttttaggaaagatttagtcattgactgaacagtaactgagctgagtaaggagccacccaggtgagcaaagtgtgcatattctaggtcaggttgtagtttctgttgaggggcagaaaccttttcagatgtatgattttttatttttcctttttttaaacttgtgtttcttaagtttaagaattaatggagatattgaaccaaagttttttttagcacttaacattaactgaagattcagaaaactttgtttttaaccatagttgcctcagtgttacagtgggagggctgcatatttggtgtgattaggccatctgaagcatagtaaagtaacgggtgacaggaaaagcagttagcccatgtgagttgcaacagtaccttgtgggctgggtcccaagagggccctctatccaggggagatgacaaacaggcgagagagcaatttggcctattaaaaacgttcccaaatggaaataagattctgtccagaaggggaggagtagatggaggaagcaagcaggattgctttgacattaatgaatacctactaggggacgacagaaaatgagatggctggatggcatcaccgacttgatggacgtgagtttgagtaactccgggagttgtaggacagggag

SEQ ID NO: 28911 - DNA, 1006 bp, Bovine  19866880738702
  misc_feature (1)..(1): n is a, c, g, or t
ncctctgggcttaaggcactttcgggagacaggtccttggggtcccattatacagactgagtgggaaagggaggggctagggtcccttctcccccacttttgaatcaggacaccgcttgcccttctcaccctcccccacgacccatccctgatttaccccctttcatctcacagcatcataaggggaagtttggcaggggggtggtcctcatgggggacagagatctgtgccccagaggaaagagatcctgccaaatctggatgggacaccagtaacccattctaccctcgtcatccccaggagccatatctggggaaggggtgcaaggggcctatgggccaggccaggtggagaaggctaagctgtgcctggcactgtgtgcccatcagagcccagctctgggtgcccatccccagccaagatagggtgggcgtctgggccctcccgccgggggctgccccagttgttcctcaggatggtacccgtcttctcctccttgaactgctgccggtcttcccgcgggatcttcaccgcatggtactggggtacggtggcttcggggtaccgcgctcgcttgaagaatcccatctggaagaacagcaggccagacatgaggagcctgtggggcacagccctggagcacaggcccggcacagcccagttgctgtcccaccatccctgggacagaaagaaccaacagcagcctgtgccagaagcagcccacacaggtgccaaccatcatggctgggttcccccggtcctcatgcacagcaagagaaagaccaggaagggcctgagctgcaggaccgaggacgtctcccttggcgcctgaaagaggggttgaaggtagaacttcaggactgctgtcccaaagatttcaacacccctaagctttttaagagatgcaacagcatccctgagaacacaaacaagatctaagggaaaatatggcttcctagactcctgcgaattccagaatgattcttctcaagcctcatacacaca

SEQ ID NO: 28912 - DNA, 1231 bp, Bovine  19866880797796
  misc_feature (1)..(1): n is a, c, g, or t
ncaatggtcatgtatggatgtgagaattggactgtgaagaaagctgagtgccaaagaattgatgcttttgaactgtggtattggagaagactcttgagagtcccttggactgcaaggagatccaaccagtccattctaaaggagatcagtcctgggtgttctttggaagtaatgatgctaaagctgaaactccagtactttggccacctcatgcgaagagttgactcattggaaaagactctgatgctgggagggattgggggcaggaggagaaggggacaacagaggatgagatggctgaatagcatcactgactcgatgaacgtgagtctgagtgaactccgggagttggacagggaggcctggcatgctgcaattcatggggtcacagaaagtcggacacaactgagtgactgaactgaactgaatgttcctatgttgatttttctttggattttcatagcctgagttttactggctggatttctggggtttaagggaaaaacacagactttggaataagactccatgttctcgggttcaaatatgggttctgtcacttattgataagtcttagacaagttatttattctctcttggtttttaattcttcactagtaatgaattattttataggttgtctctacctattcatttccctaagttaaatgaatacttggcacagtgctttgcatttatggattgctcaagaactggtagacttactatcatcatatcatcatcatacataactattcatgttatgtgtcttgtatctccctcggtgtatagtatgtcttacatgtagtaggtactcaacaaatgtttgatgaatctctgctttgtatgcatgggcaggttgggctttctctcctatcctgaaggcactcctggtgggaaaatctcctccacttcccattctagtttgaaaattcttctgttctgtagtaacatcttgagcattcttgtttggtttcctctcagtcttaagacttgttcatcttcaaaaatgtgcgaaagtgaaagtgaatgctaagttgtgtccgactctttgcaaccccatggattatatagtccatggaattttccaggccagaatactggagtatgtagcctttcccttctccaggggatcttcccaacccaggtctcccacgttgcaggcagattctttaccagctgagcctcaaaacatttagtagtaggtataatacgctacaaggaggccccc

SEQ ID NO: 28913 - DNA, 1826 bp, Bovine  19866880811840
  misc_feature (1)..(1): n is a, c, g, or t
natgctggggactcgcttcccagcagggtaggatcccaaacactccaaccccacctccaaccttcgggggcctcaggttcatttactcgctactctctgccttctccccgccccttctccccggcttcccgcttctcgccccaaatcccgctcatcctctcggccccaggccccaccatcttgacgctcagctctgcgggaccttttcctgcagtaatggctccggttcctggcccaaccctagtcttagtacgtgctaatgacgtcaccccagctgacccagccaatggggatcctggcccgggtttatgcagatgatgctactatattagtaataaggtgggcgggggccagctggtgttcaagtctccagaatagccctacctggggcacagaaactgcagaacaaggtggaatggggcgcaaggaatctgctcctccgagcagcgagaaagtcagaggaggtcgcattggtgggtgcgggtggggaagaggagccctccctttccctcccccacctctaaagaaagcaagagtcggaagctaagggaggaaacgtctctttattttgaaacaatagcctcctagtggcaggaacgtgcttttgcctggtgggggcccagcgtccgacccccctgcacctgtggaaaaagatgaacgttgccaaatcctgccgctgtcgcgcagcaagacacggaaatgcacttccctgcttttgtacgcaggcagagggacaggaaggaggcttgcctctcaaggcgcagtgagagtgccctacctgcattgctcagacgcttaggatgtgcttcaggaaggctgcagagagaagaggccagaggggcttcagaagctggcctgatgataacccatctactttagataattcaggctccaggatgcctccacccacatacctcgggcctcctgcctccctcctccctagtcgtttctgctcctctggcccctcaccttcgtagttgatgcagccactgctgtcctcatgtcctgccaaaacagactccacctcctcttcagtcatcctctctcctgggcccagacacagtgttttagcccctgccttccctccctcatcaacccacgcctctttcttctggtggtacctcctcttctcccagcctggagagttgcccatagcaacagtcccccaagagaattccctctttgtagtgggcatgccttgagtgtgtctctgaatcttgctttccatttcacctcagttataggtggtgaaagctttgatagacaaggaaactgaattccagagggttaagaaacagaccatatcatagagtacagccatctcttcccaagactgaaactcagatttcccacctcgttccctttcctctgcccctttgggaggcagctgcagcccactcactagactgaagggggaagaccttcagatcctgtccctaaggctctgaccttctcagtctccttcccatgacccacaggacaggaatccctcattggctctgcctacttggctaaccttcttagttcatcccctcctctcaacacccccaggagttctggtccctgcctcacccagggtggtgaggacatgtctgagctcagctcccatgactttgccattctgctctttgtcaaacacccgaagcccctccaggtagtcctggtatgagcctcggtccggcaacttggcgactgcctggagcatgggcaggaaagtctcaaagtccacacggcgcgacttcagctctggagatagagaggtgaaggaaaggttactacagtgtcacctaggacccaactcccatccccaccatgaagggtttcat

SEQ ID NO: 28914 - DNA, 740 bp, Bovine  19866880814970
  misc_feature (1)..(1): n is a, c, g, or t
ngttctggtgttttattgattgattttggttacactggatctttgttgctgcggccagctttctctacttgctgtggtctggggtgaggggggcctcctctctagttgtggtgctctgggttctcattgaggtggattctcttgttgtaaaacacaggctctagagtccttgggcttcagcagttgtggcttccagactctagagggagggctcaatagatgtagcacacaggcataattgctttgtggcatgtagaaacttctcagaccagggatcaaacatgtgcaagccgattactagccagggtgccaccaggaaagtctgacatttgtttttttccattgcaaaactgacacttttatccaaaaaataaaactcattaaaccacctgagcctggccaaaaaaaaaaaaaatctgatttttatagtggaggaaagcaaaattcagatcagctaagagttttgcccttggcaagtgggactgagatttgaacccaggtcttctgactctgaacgctagtggctagggtttttagttcaacaaacatctgtattatgtttcattatatactaggtaacaagaaccaggaattcatatatgaataagactagccttatttctactgccataaggagctccaaatctagtaggaataaatatgtacaaagtgcaaaaaatgtttataccaagggcagaaacaaatgggagcagaaaactctataccttgcattgggcatt

SEQ ID NO: 28915 - DNA, 1915 bp, Bovine  19866880830137
  misc_feature (1)..(1): n is a, c, g, or t
ncttcatgtgtggggtaaataggggtaatacaagctctgcaaatcttgggaaccctgacttctcaaagacttgggaccagtttcccacctttgtccaactagctgcataactttaagcaaatcccttaacctttttgttcatcaatccccctgtgtttattagtgcattaattcatttaataaatctttagctgaacacttggcatgtgcagcgtaccatactagttgttctggtgattaaattagcctctaagacagttgataacttagtgatcaagagcacaggagctggagttagacagaactccaaactctaggatttgagcccaaactctctgttatagatgtgtgactttgagaaagatactgtctgagctttcatgtgctcatctgtaaatcagagaaaaaaaggtttctatgtcatagtgtgtttgtgaatatccaagggtttcatgaatattaaatcttttagcatagtgcctggtggggacccagcactggttccccagctaatgtgaaaacagacaggccccctacaaacttcccccaacctacccttactgtaggaccttacagtagagactcttctctaaaaagtgctgaaactgagatacaagtaatgtctcacgagagcattggcaaaggttctttcttcaaatatttgaaagttttctggtacaaaagggctttgacattctacaagatatgcgaatttggccaagaccaatgaatgaagacttgtcctacaggcagaggaggccagtgctaaagggggctacctaaatagatggtgagttccccatgactgaagatgctcagagacactacacaacatccttctaagatgttttagataacatctgagcactgtcatgctgaaatatatgacccttgaaagtgaaagtcgctcagccatgtccaactctttgcaaccccgtggactataccatccatgaaattctccaggctagaatactggagtgggtagcctttcctttctccaggggatctttccaacccagggatcaaagccaggtctcccacattgcaggcagattctttaccaagcgagccacaaaggaagtccaagaatactggagtgggtagcctatctcagttgattcaagagggactgtatgaaaagtgctttactaaattacataaaggccaattgtttctatattaacatctcttttttggttgtgccataggctccagcctgaacttatggctaaagaaaatcagactttgcctgaattcctccttctgggattctccgacctcagggcactgcaaggccccctgttctggggggtgttgctggtctacctggtgaccttgctgggtaactctctgatcatcctcctcacacaggccagccccaccctacacgctcccatgtacttctttctgcgccacctctccctggtggagctactctacaccaccgacattgtgcccaggacactggctgacctggccttcccgcacccccgtgccatctccttctggggctgtgcagcccagatgtatgtcttcattgtcctgggcatttcagagtgctgcctgctcacagccatggcctatgaccgctacgctgccatctgccagcccctgcactactccaccctcatgagctggcgggcctgcatggccatggtgggcatctcctggctcatgggcatcatcacagccaccacccattcctccctcatcttcaccctgcctttccccagccgcccagtcatccctcacttcctctgcgacattctgccagtactgagattggcaagtgctgggaagcacaggagcgaggtctctgtgatgatggccactgtggtcttcatcatggtccacttctctctgattgtcacctcttatgcccacatcctgagtgccatcctggcaatggcct

SEQ ID NO: 28916 - DNA, 1590 bp, Bovine  19866880854078
  misc_feature (1)..(1): n is a, c, g, or t
ntccttccccctcacctgtcatctctttagcacccccaggggaatacctggtgggttcccttctccttccttctggatcttccattttctttcctcactctttcttcctcccttcccttctactctagatctgagccccaagcactgggtgagttttaggtgacgtgggtgtgttaaacaacttgatcactaatgcctgctgtgtgtggggcttggggacggtgtattaagctgtttgtgctcctctgttccttaatcagccacttctgcctcttttcctcctgtgataactaccctctccctcagcttgtaattgtgaaggctgtaaacagcagtgacgtttttttgtgaaagtgcaacaggggagtttgctgaggatacttctttgtagcagtaccctctgaaatgaccctgtactggagaggtgagaagtggcaggctgggatgaccccagtcccaggccgctgctcccacttccttataaggacagggcccagacagggcggtggcgaattcctgccctgagtcgtgtaatgaggaggctgggcaggcttgctgcaggcggagagggtatgtaaatggccgttaccactctgctaagggttgaggaaggccaggtctttatgtgagacacctgagttgggaggaagggacactggatccctcttagagggcttgggtttacagtgttgtaaatatctgatttcctcagcatgatcaaagttgaatgggcagtggggactgtggaggagggtttgggttaacacctgtgtgtcccatactgatgtttatctggatcctcagagttcaaggaggccttccagctgtttgaccgaacgggggatggcaagatcctgtacagtcagtgtggggacgtgatgagggccctgggccagaatcccaccaacgccgaggtgctcaaagtcctggggaaccccaagagtgatggtgagggtccttaagaacaactccgcagtgtggtggtgggcctgcagtcttcaaatagcttccttttatcttcctaggccccaaacacaagcgggtcttgtctggcaaatcccacagatttctcctgcctggagtgggagccccttaaccctagtcctaagaacacatatgacttagcttccacctccttttcggcagagatgaacgtgaaggtactggactttgagcacttcctacccatgctgcagactgtggccaagaacaaggaccagggcacctacgaggactatgtcgaaggccttcgggtgtttgacaaggaagggaacggcactgtcatgggtgctgagatccggcacgttctcgtcacactgggtgaggctctgcccttccttcttgagatgccacttgatagacctcagtgtcacccaactccagaacactcgctcttccttcccctctgaaggtgagaagatgacagaggaagaagtagagatgctggtggcagggcatgaggacagcaatggctgtatcaactatgaaggtgagggacgaaccagggtctcggaggaagcagccatacggggcaggtcatgcacagcactgagggcttttcctgtccctggattcaggctcctaaaagtg

SEQ ID NO: 28917 - DNA, 980 bp, Bovine  19866880861701
  misc_feature (1)..(1): n is a, c, g, or t
naactgcaagggtggatgcctgttctgcttctcaaaggacttactattttaggacagaattagtaaaaattgtagggatcctgaaactagtcatgctcagaaagtatatatggaatgattatagcgagacaggaagaggaggatttggtgatcaggcttggaagtgagagacttctgaccaacataagaacagctgctggaataggatgaaaaaggctagtaaaaaacccacacaaacctgatgagcaattctgggcttccctggtagctcagctggtaaagaacccacctgcaatcctggaaacctgagttttatccctgggttgggaagattccctggaaaagggaatggctaccgactccagtattttcgcctggaaaattccatggactgtatagtccatggagttgcaaaaagtcagacatgactgagcgactttcacacacagctgtgtcaaaaatatggggaaagtgagttaagtatggagaagaatgattaggcttcaggaagagaatccaggggacagaggatgggggtgcggagtctgaatacccttctggaacattacagaggataaggaaacaaagtgaagaaaacttctgaaggacttagtgctccactcttctttatgagtgtctgctctattcttttatctcttattttgggtagaaaacccttactgaatctataatctctgtaaagatacaaaactgaactaattctctctctggttccattttcagagtgaaagaggaaaagctagctttaggatcagggcctaaagaaaagggaagcagacagtagagcccaagagagaagaggaggaagtttaatcaaccttcccttttgcacatttctccaaagtcttagaatggggcaaaattcacaacaaatgcgcagtctttgcatctgctccccaagacaccgtttttcctaaagcatctaaacttaggtccccgtcctccaggaactaaagaga

SEQ ID NO: 28918 - DNA, 1471 bp, Bovine  19866880889219
  misc_feature (1)..(1): n is a, c, g, or t
nttttggaaagaccttttttctttgatgggatggtctccttcttcccaaacatgagcagtcagggagagaggaaaggctaaccatgcacgctgagcgcctcctggaccacttcatgcagcaagtgtaccaacccaaccccacatccccttccgtacccacttcctccagcctgtcccaaagatgacacctgctgtgttgactcaggccagccagtctctggatggctctgggaagagattcatcaaagccttcaggtggccagtgttggtcacggtgtgagcctctagctggggcatacagagggctctggaggactcaggacagcatggtcaatatttgtccaggcgcctcggctattcagtcactgtctagaactgaatctcctaattttgtcccaactctgccaatccaacgtctcttacattaaaccttatactcaaaccagctggggctcttttccttaagggcagagaatcccacctacccatcaggtgtttattccaagtgtcaaaagcctttgttcagttcacaaatcaggtctgtttgtttatatttttaactgattatcagttattaaaaaagctgatttaagcatctgcagtggtgacatcaacctcgactcctggctcaatactggcggctctgtcttattaacagtctcagaaaggaccctgcacggccatgagttgcttgtggatcctcatcagaaaaacgattccaagttgtagaaccttgtagttattttccttgtagttactctcagagttttggggggcctcccaaccaggctttgagagtgtttccctttgcatctctgatcaagtcagcatgtactttctccaaagacgttacgctgcagctgcttagaatcggagttagattcctagaacctctggttcctggagtctaaatccaggccgtggggcagcttctgactgacatgttcctccgtgagagtgaggagtggggaggtaggcaggtgggccggagctccctgcagctgagactgtgtcttccttggagatcaaggcagaacccactgtggttgcagccaagattgctggtagtgctgagggtgctcatgtgacctgtgtgaattcactgaatttctggtgagattcattcccagtcacggtgatgatgtctattacacattctaatcttctgagctttccagggaaaggattcctaaggctggtgaacctgggagctctgtgccacggcacagagtcaaagatgttcagccacatccaaaagggcttaaggcccacgtggtgggcagctacaggagaaatattttatacgcattcaaagctgctcacccttggggctcttcctggaatgcaagtacagaagctgtgccctattccctctaactaccatgtgaagggaaagtgaagtggaagaagaaggaattactgaaaactgggtcactaaataggaactggagattccataacgcttcagggg

SEQ ID NO: 28919 - DNA, 1908 bp, Bovine  19866880960195
  misc_feature (1)..(1): n is a, c, g, or t
ntaacaaaatgcttccctgctccctcagaaacccagagtatacacttgactggcagcagggtaaaggccagaaacttaaggtcttcattccctgtacttaccgcactgggtagggagaggaaggtatagggtgacagctcttttccgttccctacctctcatgccaagcccccaaactcaagacacagtcacattcactcacagtcatacgcacaatcatgcacacacagccacacacagcggcgaagagaagggggatggggaggaagggaagtttgcaccaaacagctcatgaatgcaacttgaaagatttcacacggcaaaaggcaaaaaaaaaaaacacacataaatttaaaaataaagaagtacatgcccctccccacagtctctttcttcatccgggggctggctcagcccctccatgtaaacccagaagcttcctactccctctatccggctggagcttttacagggcctgggtcttcagttcaacaggttcccctgtgacctctggttgtccattggactcactgggcctggaacccttgagaatagacagtctctcagaaacactcttgagccgagggaagaggagaaagtcataaaggagactgcccaagcctgctccaatgaccgggcccacccagtacacctgtaggaagaggaaaaaaacaatcaggtttgggcagcagatgaagagtaaggttgctctttttccaatcccgttgttgtaaaacagacatcttgcacttagcacatacaattgggtgctatttaagcagaagtcagtgttcgttttaaaactcctagattgctccatagcctgcacttcagaattcatttcttttctgacttattaagttattcctttatcccataccttcttagcacatgtatattctatttttttgctatcaatttgtactagtttccatattgctttttgttttgtcttttaatatgtatttatttggctgcccaaggtctttgttgcagcgtggaggatctagttccctgacatgggaccaaacctggacccctgcattgggagctcagagtcttagccctgggccgccagggaagtccctccatattgcttttaaaatttctttttaactgtagtaaattacacataacataaaatttaccatcttaaccatttctaattgtacagttcagtagtgttcatatattcatgttgttgtataacccatctccagaaacttttttatcttacaaaactgaaactcaacacctattaaacaacttcccatatcccccactccctagcccctgttacctaccattttgcttgtttcaatgaatgtgaccattctaaatacctcatataggtagaattatatgagtctttttctgattggcttatttgagcataatgtcctgaaggttcctccatgttttatttaccatgtatagaatttccttcttttttaagactgaatactatttcattgtatgtatatactacatttcgtttatcttttcatctgtgtggggcacttggattgcttccaccttttggctattgtgaataatgctaccttgaaaatgagtgtaccagctttgaaaaattttttgaattatttacatatgcttgactggcatagggccagacaatacaagaatagccaatttttattgaggacttactctgtatcagattctgtgctaaatattccatacatatgattttcacatttatttctcataatatcccgttttgtacttaaggaaaccaaggtgcagaaggattgagttatttgtcatggtcacacatgaggctagtgacgtgcagaacagggacgaggctgaggccattcgtgcttgtacacatcccagcctcttggagagtagaagcttttgtcttcctgtttagtagtctgtcct

SEQ ID NO: 28920 - DNA, 1497 bp, Bovine  19866881031360
  misc_feature (1)..(1): n is a, c, g, or t
ngaatatgctcaataaatgtaatctattatctttgttgaaagggacattttaagaggagaagggggagagataaagaccatgagttttatttgcgacatagtccatgtgaatgttcaaatagatatgtcaaatttcatctgagaatcaagttttacaagacaaagatatcgatttagaaatgaccatctgaaagacatagcaaaacataagaattaatgaaaataaaaaggggatattagtatggtgagacatgaaagaagtgaagagaatactaacagacagataaaagccagagaaatacatcatctgtactatcttttgaagtttatttaccagggcatttcatgaaaatataaatgtatattgtgcataagtacaactatattgcactttaagacattctatattttgcatcactgtggattataagtgattacttagggacagagaaaccttgacagaagcagtgtcaggtggggagctgaagaagttttgtgtgtttgtgtgtgtgagtgtgtgtgtgtacacatgatagtttaggggtgttgaggggacttgtatgcaatgaacaaaaacagaaaacaaaattctttaaccatagagctcagagacttcaagtgactacagagtatgtgcacagtgaacccaaatgatcttacacgtcttaatactttaataaagaatgaaatatcaagcaacaacagcaaccagagaactcttgaatatcacaagacatctttgctcctacaaaatgacatacccaccacagtcaaaagtagtcctttacaaaatgaatatttaaattgtaaatattttaaataatgataaataaggaaaaacttgaatatggtaccttccatactgctaaaataatcctaaatgaagcatttcaatgttaacagcatatttaacagaactcagcagtcagcaatgagaaacagtacggtaacaacattcattctgctgggactgacagatgaccctcaactgcagattttgcttcttatctttctctttctcacctacatgctaagcataactgggaatctgaccatcatcttcctcatcttcctggattcccaccttaagacagccatgtattatttcctacaaaatttctcctttttggagatctcattcatatcagcttgtattcccagatacctgtataacattgtgacaggtgacaaggtcattacctacaatgcctgtgccagccaagtattttttactgacctctttggtgtaaccgaattttttctcctagctgctatgtcctatgatcgctatgtggccatctgcaaacccctgcattatgtgaccatcatgagtagcatggtctgcagaagacttgtcttttgttgttgggtagctggtctgtttattataatccccccacttagcctaggcctagaattggaattttgtgattctaataccattgatcattttatctgtgatgcatctcccctccgaaaatttcgtgttcaaatact

SEQ ID NO: 28921 - DNA, 777 bp, Bovine  19866881070097
  misc_feature (1)..(1): n is a, c, g, or t
nggcactaaaggaatggggtagagtaggtgcaggcacttcctttcagctgccttcttttggatatcaagatcttaacaggcagggaggggacttggcttggggagtccctggggctcctctcctcaattcttggaagtctggggaccctattcaaggagagattggggagggggtgttaactactcaccaccctgtcagggctgaggaaaggagggggtagacgtgcttccctagacccccagctgcatccctgcccagagtcttaggcgtccgggtggctgtcaggcgtgggcacccctacagccactctgttctttgctccctaaactcttgcaagtcgtatcgcagcccaagccccagtgagctaaaagcaaccagcttggggggtggaggaaggggacagggtgtgtgtgtgtgtggggggggggtgacatcacggggcgggaccctccaaatcttttccctgtgtgtgtgtgggggggacccaatttgcctactgctctaggctgggatcatgagacccccagccatagccgggaggggtttttggggaaccgcaagagagttggggaatggtctctgaatacctatgtgctgactcagcaactcgaaactttcaaatcccttactggtgtcccagcgcccccctactccggcttggtttcttccacttcccagagaattggagtattgtctcctggagaacttggtggtccggatcggggaccccaagaaggggctcttactgatctggggcgccggcgaggggttcatgg

SEQ ID NO: 28922 - DNA, 1047 bp, Bovine  19866881078763
  misc_feature (1)..(1): n is a, c, g, or t
ngctatactgacgctcagttcacagagctcatgcgcttgtccctcacccatccacaggtgagggagacccagccaccaggttgctggattggtggtgaatattaagagaaactccttgggacttccctgttagtccagtggttaagactccgcacgtccactgcagagggtgtgggttcaatccctggtcagggaattgagatcctgcatgctacacagtgcaccaagagaaaaaaaagaaaaagctccttaacattctcgtcttttgggaacaggtggtaggcagcaaggagatggaagcacagagtatggaatgatacaaagcatgaaaggggtctggtaaaggcacaagaggtctagtgaaattactataaccacacagagtaagctagtgcttctagctaggaaaaggaactagctgttcgcgttaggtgagccctttggctttccaggagctccctcttctggccattgctattaaagcttgagtgaaagtcagggagcatggcacacaggctgggcatcatcaaccagtaacctttccagttctgtggattagtgaacaaaggctgatgatacattgggacatctcttacaagagcttatgtataaatgactggctctaggctggtgtgaacccatagctaggcaagtatgtgacagtaagagaacagcaaggtccctgttagcatagtctcctccttttttcccctttctctgggcctttattctcctttcttccccacagtgaccatgaaggtggcaacgtaagtgcccacaccagccacttggtgggcagtgccctttcagacccctatttgtcctttgcagcagccatgaatgggctggcagggcccctgcatggactggcaaatcaggtaagactcttcttctcctgctccatgtttttctcactggcatgcttttgtttctgatcctggcattctctcctggcatatacattgacactcttattctctaaaccttccccataggaagtgcttgtttggctgacacaacttcagaaggaagttggcaaagatgtgt

SEQ ID NO: 28923 - DNA, 1361 bp, Bovine  19866881120423
  misc_feature (1)..(1): n is a, c, g, or t
ncatccacacaccacacacacacaatgtcccagacccccgaggaattgatttacctgcacaggaggaagtcaaggcaccaagtcccccagccccactcagccaaccattaccgtgttaagtgctaggtttcctcggacggcaggtggggtaacactgtagagcacggcggccccagccacggctcccaggagttgggcgaccatgtagcagatggcacgaagcagggacatctgggagcccacaaggaaggcgaaagtgactgcagggttgacatgggctccactgatgtggcccacagcctgcaccagtgtagccagggccaggccaaaggccagagccacctgcaagacatgcagaggtccaggggcccagcgcagcgaggcccccagtccaaagaagacatagaagaggctggcaaagaactcagcacatatggccctccagaaggaggctgaccgcagttcccacatggcaggggggatgggcacaacgcctgggtccctgacacccccctggcctgatctgggtggacagtcccctttatagaggacttttaatccctgggaggggcaggctgaggtgactggcccagcctcttaaccccttcacagctgcagcgggcaggcctgctctcgtgcctcagataaagctgcagcatttccccctcctcctcaactgggagatgagcagagccacgggtgtgagggtgggaatggggtcagggctagtgtgaggctccaagaagaaaggaccgagaacagggggcctgaggagtctgcctttctcttcacgtcaaagttggggttcatagtcctgactgacatctgtattagagctttcctcaactctgctgggaaggttagtgaagctgagttcacttcacagagcatgaggctatgctcctgggggcctctaggcgcctctgaactggccaggggtaagggtgggggtgggggtcaggagtggagtctggcagggaagctggataactgaagagaattccttagttctctgggattagggggccttctcccattggctggtttgggctggaatctgtggaccctgcagccctgggacagaatagttctgctgcgtctggctttctctgagcccgggctccctacccctgacgcatgccagcacctctctttccaagccctcagcctggccttttacttttattatttatttatttgctatatcacatggcttgcggggttttacttccccgaccagggatcgaacccatgcccccaacagtggcagcacggagttctaacccctggaccaccaggaaagtcccagcctggccttttaaaccacagggaaaaacctattttccatgggataggttggg

SEQ ID NO: 28924 - DNA, 776 bp, Bovine  19866881149856
  misc_feature (1)..(1): n is a, c, g, or t
nagccaacaaaagaggcagcgctgtcatccgaggcgagagagggagccggagagagccgaggaaaagagagggagggagcgaggactcagagagaggcagagacagagatcctggggcgagggagaggaagggagagaaagtcagagtcagagagaccaaggggatcctgagagataatgggagaagtagacaccgaccaggggcacagagatagagagagcaggaggaagagatgagagagacaaaggcaggggtaagagggtcgggggaggagggaagacactgggaggagagacttaactagaaagacagagaaggaaagtgacaggcataaccagtggaggacttagagtgaggggagccagagaagatgggggagagagctaccagggaggagagggggtatggctagaccggggcagatccatgcacagacatgggagcaggaccagaagcccgggaatgaaagagggaatgaaatctggaggaggaatgcggccggggcagagacttccaggagataccaagggagccccacagaggaggcagacacagaggatcagagtaaagcagagatggggagacagcccagcaataagagtcagctttggtgggagcactgagagttcagggggaggaggtggagaatttgagcccagaggagccccagctataagaaggaccccaggaccagaagggggcctggagagaagcttcaagctgtctctcaaggggatcaagagatggagaacggacaggaggttagcaagggagg

SEQ ID NO: 28925 - DNA, 1401 bp, Bovine  19866881174740
  misc_feature (1)..(1): n is a, c, g, or t
ncccatcactccagagtggactggctaagaggggcaggtgagtgctaaggcatccagacaagatcagtgagctaagtgcccgggctgagccagatcacactcgcactggaggagagggtgatactgggggtaggggcttgagaaggccatcagagtcgaaggtgaggtactggcttggtcacatcctggaagaaagggtgaaccagagctgccttggctgaaacccacttgttaggcttgtagtgcagcatttgcaataacaagctccatccatcttcatccggggtggcaccactttgctaaaatcttgcctggccctcttggggaaacttggcttataatccgacatagaaataactcctggccaaaccacctcgtctggggtctccagggaagaaagatctggaagagttggttgatctcagagtctccaggaaatagggcccagtgggtcaccatctcagcaaagatgcaaccgaggctccagatgtccacagctatggagtagtatttgcagcccagaaggatttccagtgctcagtaccacagagtcaccacctcgtcggtataagtatgaacagggaccccaaaagctctggctagtccgaagtctgctagcttgatggacccatctgcgttgataagcagattctgaggtttgaggtctcggtgcaggacccaatgagagtggcagaaagtgaggccctggagcagctggaacaagtagctctttatgaggggaagaggaatgccagtgagcacagaggcatccatgaatttcttgagatcctagtgcagaaactcaaaaaccaggtagagtttgttttctgtgtgaatgacatccagcagtttgacaatattagggtgattaaactccttaagccgagagatctctcatacggcaactgggtgcagcctctgtctcagtgtccaggcggattcttttaagcgccaccacttctcccgtcaacttgtttttggctttgtacacaactctgtacgtgccctctctgatttttttccactttttggaagttttcatgaagcctagcaagtcaggtcagcctggccctggagcaggggcctggaaaccctgcagaaaagggcacccagctcttgggggctgaggagggaaacagggcccagcactgcaactggcgttcgggatggaacgcagtgtatctctcgctcttgtcaatttatccaacttgaaacaatattgcgacctccaacccctcctcccttacccagttccctcctttcaggatgttaatggtagttctatttaattttctgaggaacttccatatcgtttccacagtggcaccatcaatttacgttcccaacaacttttttctccatatccttcccaacacttattaaggtctttttgataatagc

SEQ ID NO: 28926 - DNA, 2968 bp, Bovine  19866881184633
  misc_feature (1)..(1): n is a, c, g, or t
ntggggctgccgctgtattggcttggggggttggtatgaggagtgcaggctcatggcaggagccccagccccttcctccttgttcttccagggcacagtcctcaggatgttccaccagggggaatagaagccggaaccagagcctctaagcctgtccccccagtgatggggcccccaatgagtcatctgctggctggcctgtgtgtgtgggtggccttgggccaggtggagggctcagccccctacctgggccctgctgagcaggaacagaaccattacctcgcccagctgtttggtctgtatggggaaaatgggacgctgactgcagcgggcctagccaggctcctccacagcctgggactaggccgagttcaggcccttcgcctgggacaccacgggcctcctgctggtcggggtgcgcccccagcgggagacaattccacacacaggtactaacccatctccccccacctaaagtgtcacaccccagctcttccctactgagaaaagtctcctctggctgcctagctctgccttcctaacattagattcctggagttacacgttttccagaccctgatttgttgtatcctttcaaggcccctttgtaagagaacacaagggagcctgacttgccatcccatccactctaggccacaggaccccgagctgagtgtggatgtctggacagggctgcctctggacccctcggggtggggtgacctggcggagacagaggccccaggaccaccccatgggccaggcccctcgggcctgggcctctttcacaggcttctgctgctggaccattcactggctgaccatctgaatgaggatgtgagtgatgatccctcaagggaataggagccacgggatttagatggtctgaaatgtttgaagagtcagtaatttaaaatggctacttaaaaaaattccaggtgtgatcttagggtacattattccagtagagaaatatgttcccctgtgctcacagtaggtaaacccatggcccaagctctaagactgggtttaggggccacacttggcaaagcagagaatccagaggagcagcccagggtgggatctggggctggttacctggagaggaggcttgcagcgggtagatggctatcatcatctagaaagtcagtgaacatgttccatgtacaccggagggcagccaaacccagccctgaaacagacctggtgaggctgagcgccccatcatgggaagcactcgatccaaggctggtggaataagtgtcagggctgttgagaggaggtttgcatggcattttagggttcttctcccttctaagattctggaagggagggctctagttatctgaccatcatcaccaaattaatgagacaccagagctccagagggagggagatggtggcagtgctcactagcacccaatttgcactgaattgaattattagctttggtttgaatatttactgataattaaatgctgattataactgtcctgagtccctgatgcacctggcaatgtgagtgaaggggaccctggaagagacccaggagttcatgcaatggaagggccaacatttaagatctgagtcacaggtctcagcaattccctggtgcctaacctccaattctacctccccagtgtctgaatggctcccagctgctggtcaattttggcttgagccctgctgctcctctcactcctcgtcagtttgctctgctgtgtccagccctgctgtatcagattgacagccgtgtctgcatccgggccccagctccgaccccctcaggggatctactatctggtcagtgggtgagagcgggagttgggggtgggacacgtgaatgctgggggaagtgggtctcaagccaaggaagggggttcatttcactggggtcctgcctccccttgcagcatttctctgccccatcccacctttaaggtgtccctccagctccgcctgactccagcccctgattttgtgcagccctgattcatagcaccctggcagtcctgctgctcagcctgcctgcgcccctctccctgctgctgctgcggctcctgggacctcgtctgctgcggcccctgctgggcttcctgggggccgtggctgtgggcactctttgtggggatgcgctgctgcacctgctgccgcacgtacgtgaagccccttccctgccccctgcccgtgtccgcagtcacaggacatcctctctccaccccagcctcagcccacatttgccttctggtagggagtgtgggtgaaggcttgccagccccctccaccacctcaggagaggggtgttgtcgggcgcagggggcttttggagtctgcccttgaccgcctctccatcaggcacaaggagggcagcacactggagctggtgggcagccagaggaggacctgggcccaggactttcggtgcttggaggtctcttcctgctcttcatcctggagaatgtgctagggctcttgcggcgtcgagggcgcaagccagtgagtgacaccctgatgtcctcttcctgccgagcccagagtcctagccgagaactggccactggagccaggaggtgaggggccgagcgctcctggctctgacgtctgcctgactgtgcggggcctgatggccagcagggagcgggtttgggctcctcagcacagacccaggacttctggccaaacgggctcctctcctgagtttggggcaacgagaaacagaggggtgccaacctgggaagagagcagaggccagggaacatccccaagtgccagaggtggaaccagtgtcattttcgcagccggcagcccgggctctccctgccccctggctctgctgcttcctccatcaggaaggatgccctcccatttcagagatgctgcgggcagaaaagaaaggacctcagaactccacacctagacctggaggatggcagtggggtggcccttcagccactgcaggcagctccag

SEQ ID NO: 28927 - DNA, 735 bp, Bovine  19866881195881
  misc_feature (1)..(1): n is a, c, g, or t
nccccattctttggtatttcctcactttgtaggccccggcagcaggatcgctgagcagacgattgaagaggtagaagagggaaagctggaaaagcagggcttccattttgagatcatgggccagccggtgcagcatcttgaccacacagtggttggtgtgggcgctgttctgcttgtagctccgcagcagcagcaggtaggctcggaggacggttgagtttgcgaagctgcaccgagacaaggagcgagaggatgcaggcatgagaaagatatagctcatccgcatggcaccccggtctgcaccctgacaccaactccatcctctgggcgcgcaccgtttcaggtagtccaaaaagttaaattctctctccgacacctggaccacttctaactcttcctcctcctcctcttcttcgtcttcttcctccgccccttgttcctccagaccctgctggcctacagaaagagtgaggattaccgggtatctgtgacgttggcgctagagaagcatgggaaggagagtgatgagaaggaaatggagactcacggggaagcggggccaagaggatttgcttcagtagctggatctcctcctctgggggagatgtcctgagcaccaaacacatctctttctggccacacctccctggaacacagaaagaaaaaaaaaaggctttttgccagagggaatttgggcttctctggtggctcagatggtaaagaatctgcctgcaa

SEQ ID NO: 28928 - DNA, 2107 bp, Bovine  19866881378213
  misc_feature (1)..(1): n is a, c, g, or t
ntagtctcccactgcagagggccagtgttaactctcactatcctgcttgtctgatggcatagagtcagggaaggagatgccgatccttaatacttagaattattagaaaagaccctgatgctgggaaagattgagggcaggaggagaagggggcaacagaggatgagatgattggatggtgtcactaacccaatggacctgagtttgaagatagtgagatagtgaaggacagggaagcctggcatgctgcagtccatggggtcacagagagtgggacatgacttagcaactaaacaatacttagaatcatggttgcaaagacaaggattggagcccgggaagtgattcttactcctgggccagcctcaggactgacacccccgcgtcacccacaggcagtgaccggctgtgaggactgcctggctgccctgctggaccacgatgcatttgtgctgtgccgagacttcaagggccgcacgcccattcacctggcctcagcctgtggccacaccgcagtgctgcggaccctgctgcaggccgccctgtctacagaccccctggataccggggtggattacagcggatactcgcccatgcactgggcctcctacactggtgtggctctggggcctttgtggggacagctgagatgggggtggagggaggcagacaaggactcgtgggttgctctggatctggaagtagaatggggtgtcaagagatgggacagaccaatgaaaggggtcgtggtgttatttctctccatcaccactcttccctcctcgtcctcaggacacgaagattgtctggagttgttacttgaacacagcccgttttcatatctggaaggaaaccccttcactcctttgcactgtgcagtgtaagtcccttcctcagccccagctccacccaagggtctgtgatgtgggcataggacagaccgtctgtttccccatgcccctcctgctgacccttcctcttcctccagtattaataaccaggacagcaccacagagatgctgctgggagctctgggtgccaagattgtgaacagccgagatgccaaaggacggtgagtggcaggagccttgggagacgcctccgctgcccctggcttcctctctgctcaggagaaagggtctcccggttcactctgccctgactcctccccacaggacccctcttcacgccgctgccttcgcggacaacgtctctgggctccggatgctgctgcagcaccaagccgaggtgaacgccacggaccacactggccgcaccgcgctcatgacagcagctgagaacgggcagactgcagctgtgggtgtgtaggggccccatgtggatgggaggtactccccctgggttttcatgagatgagtcaaccctgccggtgggggttaggaggcaggaggcttgtctttggatgtttcactctctgcagaggggatgcaaaacatgtgcagacaagagcaaggagagccagactagcccagctctggaagggagcatcacccctctctgcctcccttcccttgtagaatttctgctgtatcgagggaaggcagaccttactgtgctagatgagaacaagaacactgccctccacttggcctgtagcaaggtaccgtctgtggtgctggtgggggtctctgtatggggcagggcctgatgaaagacctgggtctggtgagagggctcaggggaagtcaggattgtcctgtctgcttggtgggacagctttgtgtacccctgccaccctcctcagctcctgtggtcaggcttccatttctccagccctcactctctgcccccctccctcagggccatgagaagtgtgccctcatgatcctggcagaaacccaagaccttggccttatcaatgctacaaacagcgcgctgcagatgtgagtgcctggggtagggggctcttggctgaggggtgggggctggggaggtggaaaggaggctgctgcccattccaggggctccagctgtctggaactcacagtattcgcccggcagtgtggctgctctggctgagggtggaagggcagcttgccacccccttacttcacactccccttttcttcctttcttccaaggccac

SEQ ID NO: 28929 - DNA, 2203 bp, Bovine  19866881419163
  misc_feature (1)..(1): n is a, c, g, or t
natcctctttatttatagactctataaaagctttttaagtctcctctttcccaagagatctcaggaatgtcagtccactgccctggttctagccctctcctttccccacccccaacaagactaggagtccctgctaccacgtgtctgacctcctaagcctttcctaagcagtgttcaggctccccctgctgttcaaataggaaaacttcatattgtttccccttgagtataaggaatctttacaacttctttggccttgatggcccccaaccacccagtctgttatcttgactttgctttcaaggcaaaatgatcccgaaaatataccaactggatcacaggccagaattgcaagagaatctgtaaaaaagaggtcctctttctccaaagggaggtagtcccagaatagtaaaagcaatcaaggaaaagagtgggaaaagaaaagatacaaacttttactaaaagggaactgacctgctgaataataaatggcatctatccaagcctgacccatgttacaagtcccaccagaagcagatctcttccccacccaactttcccaggattgcgtgatacctgaggtagctcaggtgaagtccggggctcctgtgggtctccacctccacatcactgctgggttctgagcaggagaaaaacagagacttgggtgtgagaaggggtaagaatggagaactacagggtggttgctgctgcaagaatgaagtctgacaaaatggaaagagctctaggcactccaagatttccttcggattcaaattgaacttcccctgtcaaggggagaagctgccagtaagaagagtagtatgggacagaactaatttggagagcctaggagaaagagttggaaaactagctctgagtgaacaaagggtaagggacgcttctggagatgaaggagaatgtagggatcaaagcccggagtcgggttggggttaggaactccgaatagggggccgtgcaagggctgcgactgacagtgcaataggatggcgggttagacttaggggtggtgattatgacgcttctcaacaccccagagtctggggggaaaaaagtcctaagagtttcccggagcaagtctttggcctggcaggttctgtgcagtgccgccggagctctgccggggaccacatgaataggacactagggagcacgaagtgaagcggggaagggaactccaggtgacatcaagcagaggggatgggcaagggtgtgacgtcacggagctggcgtttgctcgcgaagcggggtcagtcagaaaaggggttcggccctacgacgtgaggaacagccaactcggtcctggggggccttgtgtagcccggccgagcccagccgctgggccggccccgaactcctcccctccgggcgcggcctccacctaagtctcccgcctccctcacctgccgccgccgccgtagttgctgctgccgcctgccggtcctctagcttcgacaaagagccgcctaccctaccgcccttccgcttcctgcggaagaaatgacgctctagctaccagacccggaaccacactctgtggtgtgcgaaatacttgcgcgactagcagcaggaagttcccagcaagctttgcgtgtcaccatggcaacccgacccaatggcaaaacgccttaaagcggaattctgtaacgtgaacctagataagagcggacctggttactcctatgcccgcgaaatcaacttgaaaaccgtccgtggcgtttacgccctttccaggaagtaaaggccacccaatactctagcagctcgtaagaccggaacccacacctccccgccccccgacttgtagatataaagcttgactttttctacagcagggagtagagacagactgtactgatagagaatccccagctagtgtaaccataaaaaaccacataacacacaaaatttttcttccgctaagacagcaaaagagatgatttattgtacacgttacattcagccacaactgagaagagaactagtccatagttatcacaggtccagggcaatggaccaaaagggacggctttgatatgagcaaggtaggtctcgcaaaggtggtcaaggtgatcagaatggccatagatgttccagatccattgataagttctagatagtaggcatgcagtccacactttgtaccagcgtccctggcctctggcttcccttgtttctgctt

SEQ ID NO: 28930 - DNA, 1247 bp, Bovine  19866881661732
  misc_feature (1)..(1): n is a, c, g, or t
ntccaagattcctctacaatatatcaactggggacagagtgattacctataaggcatgtttcatacaactatttttaaccgatctctggggtagctgaactttttctcttggcacccatgtcatatgatcattacgtggccatctgcaaacccttgcattatatgacgatcatgagcaacaaactgtgcaaaacaatggtcatctgctgctggatggcagcacttatgactatcctcccaccattcagcttagattttcatctggaattctgtgattcaaacatcattgaccattttgcctgtgatgtatcacctctcctgaagatctcatgctcagacacatggttaattgagcagatagttatagcctgttccgtactcatcctcatcatcactcttctttgtgtagttctctcctacatttacatcataaggacaattctaaaattcccttctcttcaacaaagaaaaaaagctttttttacatgttcttcccacatgattgtactttccatatcttatggcagttgcatcttcatctatatcaaatcatctgcaaaagaagaggtaagcattagcaaaggtgtatcactgcttatttcttccatatcaccaatgttgaatctttttatatatactctgaggaataagcaagttaaacaagcctttgatggctcactcaaaaaaattgcatttctcttaagatagtaaaaagtatctgtcaataggccagctcaaaaagtgcatatctatctcattttcacaaatttaagatagaacttcatattttttttagcttgtagaccaatcaggttgacttcagagccacttaatcattaattttcccttccattcacatactgaataactaattattgaacactgctctatgaagaacaaaatatatcacttttaattctttaaccgacctaccatgtttaagtcattccttttgcttctttaaaatcatattcccaggtattttatattattggcatagagaagtctttcctgttttagaattataattgatatactctatttatttccttcaaatgcacagtgactccatatttttatacatgataaaatcatcaccacaatatgtctagttattgtcagtctgttgagcttccacatattaacatatcaataagagatgattattggcaatgttaaaccaatatttttaacatcttagatgaaatataaaagttacttgaaagataaatattacaaacctaact

SEQ ID NO: 28931 - DNA, 942 bp, Bovine  19866880683061
  misc_feature (1)..(1): n is a, c, g, or t
nttcactcagactcacgtccgtcgagtcagtgatgccatccagccatctcatcctctgtcgtccccttctcctcctgcccccaatccctcccagcatcagagtcttttccaatgagtcaactcttggcatgagtggccaaagtactggagtttcagctttagcatcattccttccaaagaaatcccagggctgatctccctcagaaggactgttggatctccttgcagtccaagggactctcaagagtcttctcccaacaccacagttcaaaagcatcaattcttcggcgctcagctttcttcacagtccaactctcacattcatacatgaccactggaaaaaccatagccttggctagacgaacctttgttggtaaagtaatgtctctgcttttcaatatgctattagacaatataaaattgatttgaaatatgctaggatctagtgcttattcttcctgtgaaaacaaaagaaaatttcttttgttctcttgtggttataatgagtagaatttattatactcagaaagaacacatgttcacagaaattatgccctttataattttgttgcacattttattaccatgccttcagtggtatttatcatttcatggacaattggcagcttaaaaggttcaaacactaatattttaattcatctacagacttatttcagaaatgagctatatacaatgtgggttccctattacatcttcccctgagcaaatatcagtgtcaacatgtaactatcttttacagttttacctcttcttgagaatggatatttggcatttgattatttcaacagagagattttatttgaaaaattagagctgtcggtattgacatcatcaaaggagtgaattaaattaggttttgaacatgagtttagtcacactaattttaggatgtcaaaaattttattcactattgcatttaaa

SEQ ID NO: 28932 - DNA, 2753 bp, Bovine  19866880733527
  misc_feature (1)..(1): n is a, c, g, or t
ntcagtgatgccatccagacatctcatctctggcgtcccctcctcctcctgccctcaatccctcccagcatcagagtcttttccaatgagtcaactcttcgcacgaggtggccaaagtactggagtttcagcttcaacatcattccttccaaagaaatcccagggctgatctccttcagaatggactggttggatctccttgcagtccaagggactctcaagagtcttctcccaacaccgcagttcaaaagcatcaattcttcagcactcagccttcttcacagtccaactctcacatccaaacatgaccacaggaaaaaccatagacggttttcttgactagatggacctttgctggcaaagtaatgtctctgcttttgaatatgctctctaggttggtcataactttccttccaaggagtaagtgtcttttaatttcatggctgcagtcaccatctgcagtgattttggagcccaaaaaaataaggtctgacactgggctcatagaaatcagaaacttgctcaaggtcaccagaaagcagcagattcccttcaacgcctaaacgcttcctctaagacccagctgaaacacagaaggaactaaaatgtttgctctggcgtttctttacataacaaaggtgatttattcctatcttatcttgcgtttgtctcctttctcacctttagcacagtactaagtgtaaaggtctttccccacaaataaggcatttctttccaggtgagtgcagcagttgggactgttttcagtatgcttttatttgcagtttgtctttggttagatcaaatttaaacttgtgtctcaccttacctgccttcttctgcatcaccactggaatagaccaggagctgcaatcagtgccacagtgatgggagtgttgggggtggagaccagggggcattgtgggagggtgaaaacaacttcctgggtggggtttcaaggcactgatgagtgtttttagttataaggaaaaagaaaagggagtcctcccctttcctctggttttccttggatcacctcttcagtgaagcctgtaagccgttgttcctgcaaattttgtttaaataggcactcaggtcaaaattgctctgtggtgcttgtgccttgatctagttgtgtcatgaagaggaatctgtattctgctgtcatatagcattgctagatatgaataagactatatggttcttcccttgaattgcatttataaactaaagggtactagagattacctagtccagtgattttctcacattttttttttaaatagcacaaaaaccttttcaaacttatttgtaagcctacaaacaaaacaaagaagaggtgctgctctgatgtagctcttaggcttactcaattctctctttttttaaattttattttaggtatgactgacaaatatatttctttttattgttttctctaatgtatttcagaaacggaagtgttttattttgttccactgttggccatagtttgagccctacacactctcttttatttcacctcaaagggagtgcctttgtatgtagccactcattcatcattagtgtaaagatcaggctggatctgctccgaaatcttcttcttaggattcagctccttgtcatggtaggcaaccgccgccctgaagctgaccaacagagttctgcggagcttccgcatcgccaaggtgttctgtgaaaactcttcgacttcagccccagcggcgagatggtcatctcgaggagtggcgacgactccatcgtgctctatgactgtcatgagggcaaaccaaagagaaccctgtacagtaagaaatacggcgtggatctcatcagatacactcgtgcagcaaatacagtagtctacagctctaacaaaagagacgatattgttattacctgtccttgcatgacaacaaatatatcaggtgctttcctagacatagcaaaagggtggtggccttgtccacgtcacctgtggatgacactttcatttctaggtctcttgataagaccattcggctctgggatctctgctctcctaacttccagggtctcatgcatctacagggcaagccagtttgttcttttgatccagaaggattaatttttgctgcaggtgtcaattctggaatggtcaaactttatgatcttcgctcttttgataaggggccatttgcaacatttaagatgcagtatgattggatttgtgagtggacagggcttaagttcagcagtgatggcaagctcatcctcatctccaccaaggcagcttcatccatctgattgatgcattcaagggagtggtgatacatgtttgggggttatgctaacagcaaggaggtctcgtttaccccagactcccagtttattatgatttgttcagaggatggcaagatccatgctggaatagagagagtggtataaaagtagctgtattggatggcaaacacacaggccccattatctgtttgcagttcaaccccaagttcatgacctttgccagcgcttgttctaacatagccttctggttccccaccattgatgactgacctgcatggtgcttggctgttttctgtacagcgaggggtagaaagtaggaaaaaactcagaggggactaagataatagtgggattggatcatttgactggactagagagcatccttccacatgggcttcccaagcatgtgctatacatctgctcaaaagaaaagttactttgctgagcttcttacaaaagtaattctgtct

SEQ ID NO: 28933 - DNA, 858 bp, Bovine  19866880774697
  misc_feature (1)..(1): n is a, c, g, or t
naaaagcttcaagagcatcttttctatttatcttataatcaggcacccctttctctactatgacccattaggaatccaagaccttgtatttgaatggatattctctttggaacgggcatagtcatgcaagtgacttacaatgaggtacttgtgggaataattcctgtaaaagaatgaacaaagcaagattggtcagagaaagaagttaaactgtagtgaagttacaaaagtgaactcagctaacctctcagggatgtctgaggctgagatttttagagatattccaaattaaagagagggcttttttctttgtacctatacatcaatccattattggaagctgaattcccctaaggaagggagggctttatccttggacaaagtagtcatggagagtgcctcagttatggaattgggggaaatgagttccaggatctgagggagcgatctggattgtgtaccaaaacgtttgcttctaaataggtgtagaataaacatcatcatctatatttggtatttttctcttctttctattgaatttttaaagttctgcatagtgaagcctatgtaaaggcttcagtagtttcatctttcaaatatccaaacttttgaccacacttttaaagaaatttcttcctagagaaaatagaggagaatatagcaagcaggacaagaaagggaaagaagcccagcaagactgtgggtcaggcacagttccacagaggtttgcttctcctgatcctggagggtgactctagtgtgaattacacttcagatgatggaattgcagtttcaaagttccaaacccctgaagtcattggttaactgggtcataactcccaggcttctagctctgta

SEQ ID NO: 28934 - DNA, 683 bp, Bovine  19866881124598
  misc_feature (1)..(1): n is a, c, g, or t
nttataatatctaagggagaattacacattttataggctgtattctcaaactggttaggtggcatcctgttgctaatgtcattaacatttattattttctttctaatatcctacaaatctcttaggttccagtattgtttatttttctagtaactgctttagcagaaactagcttatatgtacttaatttattttaaccaaagattattcaaaatgagatactttctcagaatcagtattttcagttataaatttttatcaggaaataagaatgtctttacagtttaatgaaagtatcgagttagtttcatttgcaaaagcaaatcaaacggtagttataatcttaggaacatagtacttttcttagtgtatacttcttctagaagacccgtgctttctatatattatataactatcagtagcctcattagagctaacatagttccattactgaaataatttacattttcctttttcagtctatttccatcattcacacaacctttagaagtaaagtatctcatagcatcatctggctcattttccaaattcccacactctggcaatgaaattacccaagactctgactcctcatctcattttagagtcatccaaaagcaaggatttcccaagcttgataagattgtatatcatccagcttaaagccctacaaatctttacag

SEQ ID NO: 28935 - DNA, 1492 bp, Bovine  19866881568018
  misc_feature (1)..(1): n is a, c, g, or t
nttagaatgaaaccttatggcatatcttgacaatagatgcttacttacacctaacaggttcttgaattttttttactcccttgtttccatcattaagtattcccagctctgttttctgtgagtatcacaagatacaagaactagggcattttttttttcagtgaacagcatagactactccctgtctcttgacctttccctgcattaaactgtcaaccttctgaacagagagtgacttgggttttcacaagtgtagtcaagaaaactcctgtgatggataagggattagcactagtgacaagttgatggtaacatactccttgtcctggaatattatgtttagtgcctcactgagtcataataagctgaaaatctccttcaacccttcccccatcatctgccaaaactgaggtataatcactcacccattgcttaggctgctgctgctgctgctaagttgcatcagtcgtgtctgactctgtgcgaccccatagacagcagcccaccaggctcccccatccttgggggagcctgggtgttctccagcaagaacactggagtgggttgccatttctttctccaatgcatgaaagtgaaaagtgaaagggaagttgctcagtcctgtccaactcttcgcgaccccatggactgcagcctaccaggctcctccatccatgggattttccaggcaagagtattggagtggggtgccattgccttctcccattgcttaggcagtgacaggtaattaaaatggtatcatacaaataggatgagaaagtgtgaattcctgtcaaagaaaaacaacttgcaaaatacttcagagcacatcttgttttaaatttcaatcaagcttgatagaacaaatgtttacaagagaactaagctatccatgttaaaagacgaatatcagcaaatgtttataagcaaatatataacctatttatattcattagtgttcaaatacagaaaatgtattttgaatgtttactgagcaataagcactgaatagggtttctgtggtggcttaggagtaaagaatctgcctgccaatgcaggagacatgagttcaatccctgggtcaggaagatcccctggagaaggaaatggcaacccacttcagcattcttgcctgggaaatccccatgaatagaggagcgtagcaggctaaagtccacgggctagcaaagaatcagacacgacttagggactaaaaaacaacaaagcactgtatacatcctatcagttcagttcagtcactcagtcctgtccgactcttcttgaccctataaatcgcagcgcaccaggcctccctgtccatcaccaactcccggagttcacccaaacccgtgtccatcgagtcagtgatgccatccaaccatctcatcctctgtcgtccccttctcctcctgccctcatctttcctagcaacagggtcttttccattgagtcagatcttcccatcaggggccaaagtatggagtttcagctt

SEQ ID NO: 28936 - DNA, 3149 bp, Bovine  19866880433916
  misc_feature (1)..(1): n is a, c, g, or t
nttagactttgtcacaactaccctttaaagctaggaaatagtggagttatgtctatctgcttttgagggataaagttatggtccaagaaatatatattaaaccaacttctaggtcatagaagaacattttaatgcatacatagccaatatcctaggatcctagggtaatgcaattgaaaagatttctttataaaaaattaaagtcttaataaatacacaaaacctacattgtttgccttagacataatgtaaaggatggttcagaatttgaaaagatgcattttttgtttattgtattttaaaccaaccacttgtcttcagcgaaatggcaagcaacatttagatactatcagtactgctatcagtcctctatcaaatgagagactttcaaatatttttggcaaccaactatctgagatcattttaataaataagtgaacaaagagagatttatttgtaattgatagataaggtctgagctaaggctgggaacctgtttcaaattggatagtattttgatcaatttttgtgttaattcttgagacagaaatggtagtctccaggcatcacatacttctaattggattggatttattgttaatgtcttattacaacctacctgtctcatatagaaaattaagtgaagcattgtactctacttctaattttatatatatatatatgcatactatacacacatgcatgctatatatatatagaacatatacacatataggtatatatatgaaaatcttaacttcagaattttaacattattattattcttttctttgtaataatatttgaaagaaacatagatatttgtgtattttatgtaacacttactcctagtttatgaatcatacatttccccaaggacaaaaataaaagtcattatttggatggcaagtgataagagacatccaggcccatagagagaaatttgaccatctccattaatacaaattccaagtctagactgttttctgagcttcatctgtaaatatcaaaccagctattcaaaatctccacttacatacctgaaactgaacatgttaaactggatttactatcttcttctaaatcttccccacatccaaagttcagtttaaattaaatgtcatcatcacttacccagttgctcaagcttgagtcatgcatgatttctcctactacatcagtccaagagctcacaaaactgcttattacagtccatctttattgccacaactcttgtccaagttaccatcattcttgatttattgttaatcttctaacatccatttgctgagactggtccttcaatctagtctctacagtgcagagaataaccatttaaatatttgataatgctatgtctttactaagaaacttgcttcccactttctcctgaataaaagatagctttcttcaggtggtagaagaccctgcctaaacaaggccacctatctttccaggatcaccttaagttacactgtcaaagtcatctccattctaatactggggctttacagtttttcaaatgctcattgttccagttttgcatcttagctaaagctactgtctgttcaaaatgatcttttattctgctttatatctattctattgatccttcctatctcagctcatttttttctctgagaagttttcacaaatcagacccttcttttcatatatgggtaggtacatttgttataagttctcctgtacttgaactattgataatattgataatattttgaatacttaaaatattttaataccataaattaaaaaaaaaagctcaccatagtgcattacctctactgttctcataatgtcagttatacaattcacataaactgaattcacataaaatatactttacttattatacaagtcattgactggtcaaactctcttctacaattaagtttctaaaacaggaccaagtgttacactttttgttgatgtttgtcatagaaaattttaagaactagaaataaatatgtaaagaaggagataaaggaaaacacctacttatattctcatctcagaaataacccatcattaacattcttccttacatatatgccagtaacgaattttgtatatatgttcatgcatttgcattttgcacttgagtgggagctgatattttataaatgtaataaaaaagttgtcattttatttctcattataatataagcaatttctccatgtagttaacagtcccttctacctaggtgacatgtggtaaagaatctgcctgtcaagcaggatatacaagagacttgggttcgatccttcggttgggaagatactctggaggaggaaatggcaacccactccagtattctcacctggaaaattccatggtcagaggtgcctgatgggctacagtccatggggtagaaaagagttgcacatgactaagcatgcatgcatgcaaaacatgaatacttacagctgcatggttccttatatgaatacactgtatttaatcattccactatcattgtatatttagcaatatatacataaatacatccatttttcactttagaaatactactgatatgtagctgaccatattggcacataaattttcttatacatctctgatcctatccttgatataagattctaagaattgactacccacatcaaagaacatgattttattttttaggttacaagtttatttataaatggactaaatttcatctcaataatttcaaagagattttacacaaaatgtaagcattctaagagaattctaaacacatgtagcaataaaattctccacaaaattaatattggtaatcatatgaatgtatgaaagaaaaaccattaattattagaatattacttagagatataattttgagataaatttttaaagaaacagcctttgtaagtagatctggaataacacacacaaatataaggtatttataactctataaagtatttgtgattatcattattgtctacaagttatatttacaacttaatatatgatggcaatgctctaataggttttgaaatgtttcctatattgtaccactgatctagagtggacattgaaaatgaatcttttctaaaagggtatggattctaaaaagagcatgcaaatgtctgaattttcgaaggaagcaaaatgatct

SEQ ID NO: 28937 - DNA, 1049 bp, Bovine  19866880465955
  misc_feature (1)..(1): n is a, c, g, or t
nagatttgccttagttactttgcactttggcttccctggtggttcagacagtaaagaatttgcctgcaatgcaggagacccgggttcagtccctggctctggaagatcccctggagaagggaagggcaacccactccagtattcttgcctggagaatttcatggacagaagaaccaggtgggctacatacagtccatggggttgcaaagagttggccatgactgagcaagtaacacaaacacacactttgcaacttagtggatttaacttttgcttgaactacttgctgatgatattgataggtgagaatgccaacactcactcatgttgttttcttgcatactcactcccattctatcaggttatggatgaaaataatgaagtcaaagaactattgataatttgtggcctgaaatatctgtgtaaatgaaaaaaaaagtcttttcctctacattttaataagatgatttaaaaatcatctcatctctgctctttggaaacctcaccttcattaattagcattccaggcagtgctattcccatcttctccatgtacatgagggaatcagattgccatttgcttttattctgtttaaacatctatgaggaacaagagtaaaatgataaatatgctaaacttatttgaactgtgtttagtacaatgcctagattttgttatttgaagactattcctccagcaataaaattattttttttaaaagtgtggaaataatacatcattttcagcatttctctcttctggtttctaagagctgcttttcttcttccttctgggcatgaagagaagataagccactctgactttctccttctgctcacttttcgcttctggttatgtttgttcctcaagggaatagaaagtgtcagtaggcttaggaagcagcttaagggttatctaggctggtttgtccattctctgcctgcttagtaaggaactaaggtgtatttgttagcctcctcagtattgttagggacttctggacaaaggagaaaaggtaaggtaatagagagtataattaaaaaaaaaa

SEQ ID NO: 28938 - DNA, 2704 bp, Bovine  19866880601952
  misc_feature (1)..(1): n is a, c, g, or t
nttgggtgtctgaagttccatctatctataacatttaaagttacatagatctaagacaatttacatagatctaagacaatttactcaggacaaataactttgtgttttatagcatttgttttggtggaatctttaagttatatttataagctatcattataattaataataataaagttcatcatatttggtaatgcttaggcatatgtgagacaaagaaaacacttcagatttttctttgtttacctatatttaactactaaaatcaatattaatataccaaagtgttctggataatagtttttttccttgcctatcacaacacgcctacaatttctgctattttccttcctaaagattaaaagttctaaaggcctcagcgtctctggtgtgtccactcactgtctcagtatctatagcaaataatcaacaataaattgtgtatactgcaacaggagaatagtagatgcatccttttcctttaagaccttcattaaccagctgaaacttagtattgtacatctgttgagctaccactctggggttatttaatataaaatataaaattatatttaactttaggacaaaagagcatacataatgatatattcacccctatgtgtgtgtgtttagttgctcagtcgtgtctgactctgcaaccggatggacttagcccaccaggctcctctgtccatggggattcttcaggcaagaatactggaatgggttgccatccccttctccaggagatcttcccaacccagagatcgaacccaggtcttctgcattgcaggcacattctttaccatctgagccacaagggaagcccattcagccctgtatcttgtgtattatcattactatacaatttactataataaagtaaatattgaaatttagttctttgtgtttataaaacattgttatgcacataacaagaagaataagaattgaaagctgatggaggttaaactatatctcttaaatagatgtttaaaaagactgaaaaaataaatcttcaaagctgtaatgtctaaattgagagctggaatttctatactttccctctattactcagaaccatgcagtaaaggatccttgtccctgtgacctttcatctaatgaaaaactgtgtaagtgaagtactgctatgtgtttgtttgtgtttaatataacggcctactcagagcagcaagggaaatacgttgttcagttgctaagccgtgtccattctttgtgatcccatggactgttgtctgccaggctcctctgcccatgaactttacaggcaagaatactggagtgagttacgttttcttactccatgggatcttctcaacccagggattggccctgcatctcttgcattggcaggcagattttttacctctgcacaacgtgggaagctcacaggagaaaggatagacctatccatagaagtgctatgggattcagccttctcacatcatcccagaaagcttattaatgggtgaactccagcggccagttgtatgaaaaattgctcatcaatcatttataaaacttaaaattaggctgctttaaaaaaagacatggttttgcatcaaccaatttgctactgctttgttttactttgaaaatacatcaaagggagaaggtaaaattattttatcttctatgatatgaataaaaaaaaatctgatcctagtgccaatagaaaaatcaaatagaatattctttgtattcttcacaaatatctttaaatatgagactttggggctgataatgatgaattagatattattacaataagaaaataagtacagagagtaaatgctggttagttttaaaaccctgatggaactggctttttatattctttctgtgtaagtgaaatcattattaaacaaacagagcatgcatagctcttattgtttagatggctgagccaggtttaaatgtcatttaggagtgcttacaacatatggcattgatagatgaaaaagaaaattgccatttcaagttgacctcttttatccaaaccagagttatcttaagtgagtttagataactacctaaattagtcatcattaaagactcacaagctctaaaaaatttgactttaagtcgtcttacttttagaaactttgttttgtaagaaaatgtaaaattcaccaaaatatagaaaaatgattttaatattttttcagttttcttttttagatgcgattcaaatttattcataaattttatttaaataatctgctctatctaatcactaataatagaaaagaatacctctctggcagcttgtattcatcattgctgaaaacccataggacatatttaacagtagaatgatcttgtgtttccccactatttatgagatgaaattctgccaaaagaaaaattatggttgtaataagagagatcctatattttcataatatatatacaacttattttagcaagttgaactaacagttaaatcttatactggattcactttttaaaaaataaaaaaagaagcaaaccagtatttctactctttcatgtttaggtatttgttatattctttgatacatttaattttgtccaagttgataattttctttatagtcttgtaatatctactacatttttaaacattttgcactatattgagaaagaaataaggagggaatgtagaaaaacatatctacgaacatcaactatgtgccagtat

SEQ ID NO: 28939 - DNA, 2205 bp, Bovine  19866880684723
  misc_feature (1)..(1): n is a, c, g, or t
ntcatcctctgtcattccctatgtcaggcttccatgacaaattattataccatagacgaggtggattaaataacagaagtttttttcttacagttctagaggctactaagaaagccaagatttggaaacccaagatctccaacccaaacttggacacccaagatcaagatacagcaaataggtttcatctgaggactcttctcttggtttgtcggtggctaccatcttgcactgtgttcacataacctctactttctgcactgggtaaagagaaagagatggttctgttcttcttcctataagattatctatctgattagagtttctaagattacagtttcacttttaagatctcatttaacctcacttaaaaaaccttttattttcaaatacaaccccattgggggtggtgatttcaatctaatttgagaggaaaaccatctatttcttagcatttaaattgggcttttactgcgaatatgtagtggaagattcagtcattgcaacagtaagagtctattttaatacttcatatccttgaaaatgtttattggtgagatttcttagtcctgatgtagtttaatacttgacctctctttccttatagaatggttgccaaatggtctataacctctgctatgactaattttatagtcactttcatagcaaagccattatcttttagcagtttctgaatgattttgcaagcatatttcacgtgtgaaacctgtaaacattccaatgtgatatttgcttccaatttcattgtagcattttcaaatatgccataaaatagattgacaaagattgaatttaatatagagcttcaatttttgcttgggtaatagatcacaaataatcagaaattattattaaaatgacctggattaaaatatttaacttgattctaacataatttacatgtgcaaaatgtcaaatattttaatgatgatactaaatgcaagttgaattgttactcttttcctctaaactactacaactgatattcactagaaatatcaacatgaaattttagctaactgtttcattaagagggttttattaccactgctaggatagaaataaaactaagcaataaaaagacagcatggtaaaaagatgcaaggagatcaaacagtttcaagagagtttgggggtaaactaatttatagataaagataatttacagattaagataataaatctgagttttgatcactgtaattagtaaattttttcattaaagattgactacatttcttgggtattaaatagtcacaactgaaatatttagtagtatctataaatttaagattttaatacataagagtttttccttaactaaatttatgatcgtaattaagaagttattatttttcaagtgcgttatcttgaattacaaatatttttgacaatataattagtgttacttatctaagataagtgacagctctttagttttgccatttattatatcaaaatgcattcagcttcataaaagatatctattttaactttactttgcaattacaacttaaaaccttcacggcaacaaatcaaatgtatattttaatgttagaagtagaaacattttcacataatttgatgtttctatgcattaatatttttagtgttctttttttgtatactatttcttcttaatttggctagtgaatatgacaagcataagtagaatttgttctgtattggaatattcaaagaagcatagataacctgttcttattaaactaaattgaaggagttgatgatggacagggaggcctggtgtgctgtggcccatggggtcacaaagagttggacatgactgagcaattgaactgaactgaactgaaattgaaggaaaacatttctgcttactctaaatcatgtatctccagaagttccctttcattcaaactgtataatttcttatttttaccttcaatgaaagagaaacgtgaatcgggacctagttgctaacacttactttttgtggtccacattctacctacctacccaggttaagggtaggaggcacataaagtctatcttgagacatatccctgactcttgggtcttgattgaaactgctacagttgattcagaataagagaaaaacataaaggagataaaactaactcatataggaaggaaaattaaaggtctaaccctcctatttcttcatatatggaagaagtcagcaag

SEQ ID NO: 28940 - DNA, 1541 bp, Bovine  19866880732242
  misc_feature (1)..(1): n is a, c, g, or t
ntccaaaaaaaatgttccatctttaggcaagaaatgacccaataacaactgtaagcaccagataagcataaataataattacccagttgaatgttatcagtccattggttggacagtattatttatttctttttttggcagactcatgcttttactgctgtagggctgagaaatcttcccactgtctgagtcccagtctttaaatttccttcaattcatcatggcttctagaatctgaactctgccatccctaattagcatgcatgtcaaaagccaatgtgcactacaggctatctcaattgaaagtgagaataccaggagggaaaagtgaaaaccctagcagctaccatcaaaacagcttaatgtttttaagaagaggcaatactaaagatgactggcttgttaggatcaaagagtactgatgagagtctccacctgagcttatacagtgttctctcgcctgggaagcaaacctgcttgtgacatctcaagacattataaaggcactttcacatgaacatgctggattgaaaataaataactatcataatctggagcttttgttttaaagaaacaacaaaatagtgcagcaggcatatagagcatgcctattgaggtagaattgttaccttaatttttaataaattatgtttattatttaccttttatttttttttcaaaattcaagtgcattctgaggcaaactacaaagttattcttttattttgttttgaaaatctactaaggaaaggcatgctttttaatgcctgattctcacacaaccacacaaacacacagacacacacacatccctttactacactactgcaggcacaatcatcacactcttcgctgctgcaaactgtgtttacctctttgcagaagaataacttcagagaacttacctaatattcaaaaaatctaagttttattggccttaattaccattctagagagtttttgtttttaattgatgtctatagaaaatctcccagaatttggaaaggtgagaagaatatctttctctctgaaatgtagtattcaaccacccgaaactgtaactgacagtgcagcagattgaaacgaactgtcaagaaaaaaggactagagttctgctggttgtgctgttcaccaacatttcaggaaggatgcttctgtcagagcaaaatggatttaaaggagggcttggcttagtgattatcattcattttattaaagaaaaaaaaaaaaaaactggtatgctatttaattcttacacttgactgatcagtttagattggagatctgggttgttactgtctttctactggaatttgtattttagccattaaatatttcattagcttaattcacaagtgaaagaagaaagagggaagaaaagaaaagccaaagctccaatcaatcaaatgtgccatttcaccgctcttccagtaaatggtttgatgggaagggagactgcacttattagctaatctccaaactgcatttcatttctgaatctaatttattatccccttacatgaataatcaagatttgacta

SEQ ID NO: 28941 - DNA, 1094 bp, Bovine  19866880769306
  misc_feature (1)..(1): n is a, c, g, or t
ncagtcatctgtatttgtcaaaataaattatttagtttatacaaacctatatatttggaatgatcacaaaaactacttttctggcaagagatagtgtttagaattaattatgtacctaaagtggcctatttgctagtaaggattcagaaagcaaaaagcaattgaataaattaaaaaaaaaaaactgaaaggtaaaatgatactcctcgaatataagtagatcatgccctttaagcaattggtcagaatcagttttgattgttggtggagcctactactaagatactgctgttttgtttgctgtggagtaaaactgttagtgtttgaggaaactgtctctatcttagactttcaggaccataaaagataatgggcaggttgaattttaggatgacatgtgcatttttacagaagtttcttgtcaggaagccctgtgttttctacagatgtcagaaagagaacctaacagcactgttggatgcaatattttcccaaagtcatatggcattatctgatcgtaatgccataatgattgataatatgcacacaaaaatattttaagtttacttcttgacattttcttttccaaaatcaaagttaattaaaaataaattattttgaaaaataagcatctaccctagaacatttttttcctcttccaatatgctaaattaaattcccttaacttgatttatgtcatctcaaagatactgtgatggttcacaaaaattgctgaggctcctgtttttagtgttttttcatggattcaaaaatataactttccctgacagtgtaagacaagcaatattatatttcgtgttcaaaatagctagaattcaagtggtgatggtaaaattatagagaaaagatagtattgtaaaagtactttaaatttaggtgaatttcaactttccttaaggatttcatatttatgcacatattattacattttaacatttacagtgtattatcaggcttagttgggtggcaaatttaaaaactgacattctttcttcaatatttctgaatagaaatcagagagtagttaatgcctctgttaatcaaaatgtgatcttttgttgaaaaatttggga

SEQ ID NO: 28942 - DNA, 1567 bp, Bovine  19866880831088
  misc_feature (1)..(1): n is a, c, g, or t
ncttgccgtgtgtttgtcttggactggatttatatatatatatattttttaatctcttgattttttaagttaaaaattaaatttatttaataggtatagggctagtcaggttatttacttctttggtgagttttggaagtttgcccttatcaaggaattggctcactgtagctaaattgtcaaatttactagaatagatttgttaacagtatttcctgtctttctttgaagttgtatagtcatctggttgttgacattgattatatataatctaaaattgatgagtagtcataaattgatgggatgctgctaaactaaaggttagtgaagtcattgtgaaggggctatgtgaccagcaaaggaatgccagtgatgatcattccctaaagagaggaatgtctggtccacttggctgcgcctctcttgatcacatatgtctaggtgccaagtgagagccagaagtttgttattctgctttgtataccctattggctgtcttttctcttttattaaactaaatgaacttgttttattgtgtcccaggagtgtgttcatctactcgagcccaagactacttctgctggcagacaacagtgggtatctcaacacacatatcttttaatcctgaaggtgtttatagtaaattttagacaaaatatacattgaaaaaatgctccctcatctctaaatctattgtcttttattatatactataaactctaaaattaattaaaactacacatacaataaagtccccaaactacaagcatttgtttcaacaccaatctgctagactaatatagaattttataatatatttttgaagatgaaaataacttctctggtacactttcattggagctttatataggcctttttaaaaaataaaaatatatattatttatagaagtattatgtgtaaaatagttcagaaaatattctatacatttaaagactataactttccattttaaaatggctagttccagttttttctattttgtggatggttaaaatggacaagcattttaaaagactatggaaaatagcatattaattcttgatttatttgcagcatttttctctttcagtataagagtcataaaaataacaagtaacatataaatatttgtatagctgttccatctatctcttcaggagtataataattgacagtggtgctagcatcctagcagttgcctggggccctgtcaaagattaaggtgttgaaggataaactatctttaatacattgctctttcataatctcttagatttctgtgatattacattgtattataacccctacttcaaagatctcagagtgcttcacagattttatatattttattctcaaactccctccaaggtcaaactgacaaaggattactccctccctccctcctttttttttttagttatggaactactctaaacatacagcaatcataatgacgtgttcagtgcaagtaaccctcaatccacagtaacagttatgtggaggacaagaaaagtaaaataatcacacctggatttctagttacagtgaatttttcattttaaatca

SEQ ID NO: 28943 - DNA, 628 bp, Bovine  19866880878378
  misc_feature (1)..(1): n is a, c, g, or t
nctgaaatacactgatagaaaaaatgaattagaatgaagaactaatactaattgggtttctacccttatcctatccaaagttgatcaaatactggcaaacctttcaatgtttctgaatatgcatgcaaaacatgtacaataaggattaatcatcagtgattaacagtagttagcattcatctgctgaaagttattctttacacaataaacagtgagtataactttcagctgctgccttttgtaatcaataaaatcaataaatgtttattgagtatccatcatttaaaagaaaataccctgatttaggaaaatggtgcatctcctaagcaccttttaatctaattgaaaatacagaacttgtacaggaaaatgcaaactaataatacaaattttcatggaagtgcctaagaaataagttgtacagataaaaggaccattaggtgtgcccattaaagggacataaaaatgtctcaaagtagtcagataaatcatcctagagaaaagggcagcagaaaaatggactgtacaatgagtataaattagataaatgtggagaagaaaaagttgttctcaggtggtgcagtggtaaataattctcctgccaatgcaagcaacacaagagacacag

SEQ ID NO: 28944 - DNA, 1738 bp, Bovine  19866880905898
  misc_feature (1)..(1): n is a, c, g, or t
nataaagaagaattcacctgcaatgctgggaatgtgtgtttgttgttaggtcagaaagatcccctggagaaggaaatagcaacccactccagtattcctacctggaaaatcccatggacagaggaccttggcgggctacaatctgtggttttgcaaagtcggatatgatttagcaactaaacaacaacaacaatgagatatttgcaatcggtgtgtcttgtcagcattgtccaacattaggattgaccttgtgaattcatctttggatatgagccacacaggaaaagcatggtcttgggtgaagtgcacctccattaaaccctaattcagattccaagaggagtaagtactccttattcaaagaagaatctgggtggtgcttcacacctatacctgtatattgaatatgagataaagctaaaaactcagttgctgagtcctgtctgatgctttgagaccccatggactatcccccaccaggctactcctcctacacatggaattttccaagcaataatactgggatgggttgtcatttcctattccaggagatattcccaaaccaggggttgaacctgcatctcttatgtctcctgcattggtaggtggatcctttaccactagtgccacctgggaaaacccctaaaattagaatattaatttctaactctcagtctaactgtgattcaccatggtgttccaggtagagaaatagagcaatatctgcctgcagttgagaactagttaaaatatgcttattatttttttctgtgacttttttcttaaactgatactattctcagtaatacctttcctctgtgttttgtttttttttttttttaagtgttactgctgctcaatttgcaatgtgcacatgtgtgtttttcttttccacttgtgtgtgttttatattcctaatgtttaactgtttacatcggatttcctattatagtgtctatacaaatcatccatactaaactataaagtaacccaggaagaagaaaaacattaaagtaggactgtaattttttccctctgtggtatataagatatattcattctgaataattcgagaaataactttcaaatatattttaaaaataaacctgctctttagaaataatttatttttcataggtatcactggcttttctgtttatgtgcttgtctctttccttaggttcgtatctatttttccttatgtgtcaaactgaattttggatttggagaagttggcattgcaattttatggttaagaaataggacagtttgcagagaatttgtttctagtcagtaagatatgtagagactaaggagtaaaaaaataaaagacctctatcaaaaatgcagaatagtgttgtaaaagaaataacatgcaattctgattttcttgcaatttccaatatctatatcatgaaataccaaaataagactaaaatatgtgggatgtatacaaatttagatttaaacaggtgacaaatgttttttttttttttttaacatggatacatttatcaacataaatgtccttaaatatatgcaatccatctgatagtcatttattatttattgttttacagcctttataatgtcactttgatgcatgtagtaaatttttctccaggttgaataatatctccatgtatatatatatcagatgcttttctatagcaagtaatttttaatatttgcacatgaaacaaatagtcattttggaattggatgcatgcaattggaa

SEQ ID NO: 28945 - DNA, 953 bp, Bovine  19866880914902
  misc_feature (1)..(1): n is a, c, g, or t
ncagaattgttccatatattcatgactgttcctataaatcttaacttaatttctggtcatagacaacaagggaataagtgcgatatgagtctcatgtttgagaagaaattcaaaattggtaagttacaattggggaagtaggtagtgctgtgcagcttaaaaggggatgagggtctggacctagttttacagttagaaatgatatcccttatgatatgatatttaggatgagttaaaagagtgaataggaataaaacatggaacagcaaaattcatgttacccttaaaaggtacacagtgattgcagaattgaactttacattaacgtataattataaaccaaataggggtatgacggatatcctttagaaagtctaagcaaatactatttccagagtgtggtactttatttcatctcttaatatctcttgaatcaagatctttagtttttaaataatgttttataaagcttgaaaaaatatatacaattcaaattcctcaagtagtttacaaatgcatgaagaaggttaagttagctaggctataattaaacaagacagaatgtgatggccaggtcctgtctagttttttctatgtttagatttcatcttgcaaaccatgttgaaaaacatgttcaatttgttttagcaaagaaaaagaataaagaatataatcattgagtgtggaattataatacaaaatcttttaaagaaaatagctcctataactaagattcacacatctctgttgacttggcagtttgtataataaaatgaaaatagtttaccaaaattcatgtttacattatgcaagtgaattaacactgtgaaatgactgaattcatttttctgccaacttaaaatacagctgttataatacttacccagaactcattgaaagcttttatgcaaggagttgagtacatatatctagatttccagaaataggcagag

SEQ ID NO: 28946 - DNA, 1535 bp, Bovine  19866881064113
  misc_feature (1)..(1): n is a, c, g, or t
ntagttgtttaaggtcttttcctgctttctgaactcaaaatattcactgttgttacagaagcccataacaactttactcttctgtgttaaaggaccgtattctaatatgcagtatatttatttaaaaaaagcatcatatattcctaagcatattaccaattatttgagaatagattttttttttttttttttttttgcatcacagcatccaaaccaaggcattggtataaaatacttgctgagctgagtgcattcaaaaaggaacaaagtgtactccagttgtatggtaaagtaagcaaaatgaacctgttcatttttaaaattgtgatcatgatggtctgttttttgcaccatctccctcaaccaacagaaaagacaatctgacataagtaagaaattctatgaggtgctaatactgaatataatcaaatacttgaaggaagatttgtgtcccgcttgttacaagatgagaattataaatgagctatgtgataccctgggtttatttcagaatttcagtgttcatttggttgtttcagaaaagcttaagaaatctctctctgtgtcagaaatctttaaaatcccatgtatttttggtgttttcacaccatggatatagtaggattttcagagatgtaacaaataacatttcaatatcattaggcttgaaagcaactgaacccttctttgcaagattactgaagtacatttatatatatatatatatatatatgtatgtaaataaagaacttattataaactttggaagttggtcaaagaaaatacttaagtttttgaaatttatactgcttcatttgctggactattagccttagagccttataaatttttgtgagagtctgtttttcaagctctgcattagaaaattcttagaatattacattcaaaatgttcagctacattattaacatttctccctcaagtactaatgttaattcagatgtatatatcagcttacaaaagtgatacattatgcttttaaccaacagtttcccataatcactcatatgccaactaccaggagcatttgtttttgtctgatggcttggtacctcaaatgtgaatgccacagacatgcgcctggtgtctgttttctatgattcctttaatcttgctggtcatagactatcagaactctgaaacattcctaaagtgaagaaagaacaataatgaaatagagaattaaatgcaagagaaatgtcaactattggcttcaataaaaggtttcactaattttaaggatatgttaagtactaaacatttaaagaatatttctattactcattttctgctcataattttacatgtaattttatctccacatgcatcttctccacagcattcaatcttttcctgtttctttgagttagtattatacatttgaaagcctaaaggctttttagaactgaaaacagaatgttcaagttaaaaagtttactagaaatagatgaaaacaagaggattcaggcttctgcatgacaaaatgctcaatgctggaaaggtgctgtataagc

SEQ ID NO: 28947 - DNA, 743 bp, Bovine  19866881520724
  misc_feature (1)..(1): n is a, c, g, or t
naaaaaataatttgaaatatttttgcttaataatgcctgttaaaaccaatatattccaatggtaatcagaatcaactaaggatcctgaaatttagttttgtaatgaagtaactgtgtgactttgccagtatctctaatctctcaggatttgttttctcatctgcaaaatttctgcttgaactagacaaccttagtctctaaagtggaaaggaacagtgaggaaactcccactttttaaatatatatagtgttaaatagatttaaaaaaacacaacttctttttattaagaatagtagatatttgaaagggcataaatattcagcaaaaatggtggccagattcctgacaagcaaactctggtgtgttttctcattaacctaaattaaactatgatcgtaccccaaacagccttatatgtctgtgggttcctgccaatatgcagttggatttctcctctgcagctgtctgtgatgctccaaagagacaagtgaatactgttgtaaaataaaaagtggagaaatggaatcattaaagcagaatgaataaattacaatgaccttatacaagcagctttaacaaatgaacatgaataagagttaaagtatacacttttgattttgcaggagttcagcatcgaagatttttagaagtagacattttaattagataatatataattttattttgagtcttcccagttggcacttgtagtaaagaaccgatgcgggagccggcatatgca

SEQ ID NO: 28948 - DNA, 3327 bp, Bovine  19866880378854
  misc_feature (1)..(1): n is a, c, g, or t
nattgtgaggggctgatgtggagttatttatgataaaggagactggaaaaggccctctctgtaattgctttgtttaggttttgggggtcagaccacaattctgcagattgtagagggagttttgcctaaagaaaaagttgttccccaaactttggacccagagagaggatgaaatcctcccttccagcccagggtccctgccccaggatgaccagcactggggctccatggtaggaaggtacctggcgattcctaatgacaagactcactatgatgccggctcctggaatgcccaagagccgttgtactgcaggcctcttggctacccttggaaaccactgtgaggccatctctgcattatacttctgtcatcccaatatcttcaaaaatgcatcagtaaaattacttccattctttgagaaactaagggagaatcctggggggatatagtgaaagcaagtgggatatcttggagaaactagttaagagaatgttagaggtggtaagccaagctctagagcagcctggccaagatgactgctggtgatgatgggggtgtggtgatgggggtgctgtctgtggaacaaaacgttatactgtagggattcctagggaaatacagacttttgacaacaacttacacatagataatcatatgttttttagtagacctccgtggctttaaaaaatttgttattagagttacattgtatccacattcctctgtattttgttgtggatcagaaagaatgctgagaaatacctctctttaagcaattcatactttgctcaataacagttactctttttttttttttaatagtgaaagcttttatatttggaattagccagctggactcagtttaaatgatcccaattttgttggcaacatgcaaagcagcatgtcaggagccagtcaaacatgcaccttctcctctccatcaggcctgcgtagggtatcgtgcttagccatgtcaatgtcatagagctcctgtttagtttgtcacagtctgtttagtttggtgctgggtggcctcgacagccgcagtgaactccagcgtgttgctgtcctctcttttcttcacagctgactgggtggtgagtggtcagcgttgtttctcctgggggcgctcttccaaggatatttgggctgcctcctgagccgcagtgttttgggccgttggaagcggggtgacctccagatcttcttttgtttgtggctgtggacgcctttcaacactgctttcctggcctttgctttggcttcagctttgagaggggcaggggcgtccttctttgccttcggcaccatttttgggaaaaggcaacagttatctttgaattgtgttctgtggaatactagttctgtagcatgttaagtattatataaaagaggtttccatagttaaatagatttgacaaataaaaagataagcaagttaaacaagtttaccacaggatttcccagaacctttatctactgatgtgaattgtgaagctctcagaagggtatataaaaatacagcttttccacagcatatttgagtgtgaagctttattttgttgagcacatagccaaaggttagtgctccaaaaaatacaatttgtaaaacactgacctagtataattgtctttgaaatatcaatatttaccaataattaaaacaataagacaaccaagttagttttcattggaactaacagagctgaaacttgtttttactttttctaatatcaccaatttgatgtccctatgtagaactatataatttattatttaatttaaaaatcttgcaaataagtaaagtcaaccaatctggtatgctaaagacattttcttaaaaaaatacataacagatatatgtcaatttaaatatttaggtaactttattttctttattcattttaaagccattattactataaaccagttaatttttaaaaaccaacgtaaactttatttatctatttatcttattatttatttcacattcacacacagggctatggtgtgctgtttcatgacatgagtagttgatgttatctgtgtaaagagagcttgtgaaaagcaatctccactgaaatgttaaattaaatcaaaactacacctaaccttccctggagtaggaaatggcaacccactgcagtgttcttgcctggaaaattccatggacagaggagcctggtgggctacaggtccatggcgtcacagagtcagacatgactgagtatgcatgcacactactcaatatgaaacaaatatttaccacgtgaatagaaacaaaggtcaggtaggcagacagacaagctgtaagcatcacatggtcaaaagtccagtcctcattcacttgatttgagatggagagtgaagaaccaggttcctctccgccaagaagaagaatgaacaggtaggtgaacgatagtatcgaaaggtcttggattcactatattcatcctttcgctactgcagtcccccattcattattaagggaaatggaagaaaatgggcaagtacaggtcacgcaaatagaaacaaaggtcaagcaggcagagagagaagccttcagcatcacgtggtcgtaagtccagtcttcattcataataattctgaatctgtgctgcccattctacctcttgcctactgatctaaaaccagtaagaagtcatctatgtgtcactgaagttaactttcaaacttcactcaatgtcactgatgaaaaaatgtttaaaaatgatttcttcatctacaacagtgataggttctatctgagatgaactcccaaatgtaacacatactgatttagattaaaaagaacacaaccacaatgctatgctctgccacagagactactcactaaatattaatcgcattaaaatgactactcaggagaaaagcactcttaataacttgatttgggaataaacatacttctgttcaaacaatgatagaaaactatcctctcattatttattcactaactattgttagttaacaattttattgttcatttattttcgatcccaggcctattttttaaaactatatctgattaataattaaaatactgtattatgtagtagcatttggatattatattaaagcattaaggaaagctctagaggtaaaatagcaatgttctcatttctaccacccccgtgctatattctagtattttgatcacagtatgagcaaagggatgcactgaaaacacctagatgagaattttatagttattgcaaggatgttataaacaaccttgtcatctgtatcactgtctatgagaatacaaaggaataaagtctcttggatcacaaggaggaaggact

SEQ ID NO: 28949 - DNA, 687 bp, Bovine  19866880459425
  misc_feature (1)..(1): n is a, c, g, or t
ncttctccctggcaagctttctgaatggcactttccgtataaacaggaagagtgcatgtggtcaccactgaagtgtgcaggtgttgatagaggatgtgaaagtgtggaggcgagtgactaaaccagccaatggcgtttccccaccaggcatgcagccagcctcctctcacccacagcagagcaagggcaaccagaaggctggaaccagcagcccgggcccccttctggggggccatttgacacacagcagaagaacatggtcagggaggccaagggagaagttctcagttgctctgctcctctccctaactctaaataaaccctttaaaagaatcccaggaacagctttgaatcccttaaatataatatattcttatcaggtatgctgacttagatgggctacttaacacaaagtctgctggtttccctaaacttcctgggcatccaagagaccacaccaaaagctgtatcctgcctctggactggaataagccttctagaactttctagggcccagatgcactggcagaggagaaagaaccctggatgaggaatcagacaccccgaggctgtgtgcgtggagggcttgtgcctcctcacctcccccaggagggctccctgctctgtgcccttgcctctctccctgcccccgccccatctctaaagtcactttcactaatgtcacca

SEQ ID NO: 28950 - DNA, 1515 bp, Bovine  19866880480243
  misc_feature (1)..(1): n is a, c, g, or t
nggcggaggaagggaggagagcttttggaccttgctcagcaacgcctatcactgtcatagataattggagagcgtttctcacatgctgggagatcgtctgtcctacacacctgggaagtaccagtgtcattttaaggcctgccctttgcaactcacctctgaattatgtgaaatatacagttatagacatctctggaccatgaagggattattcattttttgagtttacaaacgcagttgtaaagagataacaaagggctctttttaagcacattcttcattccacatttcgtctttctcctctcaatactcaagcaatcgaaaaacgttcggatgattaatttgatgcccagtttatgtgccaaagtttacataacttacgcgctaacaaattattttggctgaataggaattaataacaggttttttccttaaaaatcattatttttatcatttctgaagagttaaatgtgatttcttattataagacagttttgtggatatatctatatttggaccagtgctcttcttactaagcatttaaagtgctttctagccatcagaaatgacagcttgtgatataacattattgagtgtatttgtccaagatgtgtttctcagtctaggaagagtctttggcttgcataggatgactatttatttcataaagattgtgattatttgctggtctttcttaagatattatcctaaaagttgtaagtggttctattatcatgatttctaatgatataatgattgtgactggtttcaaattgttaaagtattactaatttttaaattttttactatataaaataggaaaagggttttaatgccatctggaggcattctagagaactgaaaagggtagagtcacttttaaagatttagttcttttgagcaacgtttgagactagagaagaatttacgcaactaaaatattaactatttgagagtaagttttatttttataattaattttataaaagtgttaattattatagaagtaaccatttttcaacaaaatcattttaaaagcatacaaaatatgttggaaagcagctagcatcctacatttaattttttcaaatttaaaatcacatacaatgggaattccctggctgtccagcgggtaagacaccatactttcactgcccagagcccaggttcagctcctggttgggcaactaagatcccacaaacctcacagaacaaccgaaaaagaaaaatcacattcaatagactcaaattttgttaatacagtttgatgtgccactaaagctctccttcccttatacgtttctgaaaagccttagtttctataactcaataccttaacaaaatcaatatgttgtctgagaagttactttaaaaccctccagagatttgtgaatagtgaaagcttgaagcatgaccccacattcctgaacaaagcagttccttattcatctgctcacatcctgcctcttgaactagaaagtagcagaaatcaagtctgaggttggacctgtatta

SEQ ID NO: 28951 - DNA, 1591 bp, Bovine  19866880513254
  misc_feature (1)..(1): n is a, c, g, or t
ngcccgctgagtatttccttctgcttctgaaccctcccactcacccccatacagcaggcaatgctgactatctcttctggaggaagctcactgctcttggattgttggggcttaatagcagaatctgctatcacaggacccacaaaaagatccgtcattccacagcccatctcagtcctccctgttcagaaagaggagcacacgcgttccctcttactccttgcatgtgcgtcctcagtcgctcagttatgtctgcgggactccatggactatgcagcctgctacgcctctctgtccatggatgagggaggtcataagatgtttcaagaaagagcaggaaaatccaggcagagcccatgtgatgcctctgaggcaggtgcagaaggctgctagtgaagagctagtgaggtcgccgacacctgggtaaacccgcagctgggcagcctgtaacgatggcctccaaacccactgcacttgcacatccccaaatggacaagtttctggggtcttccgcctccagaaaaggaaagaactgggatgaggcaaggcttgtaggagagacaagagaccagtagtgaccctgtctgggcagcagcatctccccaccccctctctgccaggctgttaagaagtgaaaaactaacctgactcctgatctgttgtttatatagagtcaaagttgaaacccagggtgctggacaggcacagactgcacgcgtgtgtctgcatgtgtgttcacttccaagttcacgcatgtactacatacgctgcactgtgtacttcaggaagtaacaaccccttaaggagaggctgctcaagcaggtaagcttcagtcagacgtaaccttcaccttagaaaccaggaactggagtaattagattaccatctttccaacactgtgggagagatgtgatcaattggagccaagatcagttacattatttggtttacctaagtaatggacccttaaatgcaatcaatacttctccaggctgtgaggcttcaagacctgagatgcattcaagaggaatgctgatgcattttcaaagagccttaggaagttcagtcatgtgggaggggactgcagagactagggcgagagaaggaaaaggtcatctaaatgtagggtctgcctctctttccctcgttcatgtgctcttttcatgtctgtttgtatggacagttcacatatgagctatgtgaattacattagatataattatatcacatcttttactgatgatcctaatcttgggaagagcagccatttcactcagtttcttctgaaagtttcagcattgaaacttctttacaggatcaagaataaaattaagatcgctactgatgttcaaagaaattcgcaaactttagtaaactgtgaagttatgaagaaaatggcagatgcagcttcacatcttccatctcaccccaccttccctccatgaatggatcaagggacaggcagtgtggatatcacaccaagtttgtgtggggaccacccagggcctgttgtcctgccttccaggacaactcttgcttgggctggatctgtaatgtccgtgtgtgtgtgtgtgtgtgtgtgtgtgtgtgt

SEQ ID NO: 28952 - DNA, 793 bp, Bovine  19866880532990
  misc_feature (1)..(1): n is a, c, g, or t
ntttttttttaataaaagtaatctttaactggacactactttaattctctaaacaatgttatagtagttgtccacattttgaaattgtcttgtttggtacttgaatggcatgaaaaatttccctctgcttccctcccttctcccaagggtcattttccccactcttttctcttccctgcctggcctctgacctgcccagctctgctgtttccacagacttctgaatctaattaatgtcttagtagatatataagtgaattatgtaggcaggaggatgttggaaactttgaggaaggtacgttccttagggaaaacatggtttgttaaaaaaaagtccagaaggctgctcagggagggggtagaatgtcagttaaaggtaaactatcagtaacattgttacactcattacgtatctgctgcctgatgagcagagacaagcttaggcgcatctcttttgacatctgggcaataatcagcccttatggaatccagctaaagggacagatagtctgaatatgcccccattgcaaactggcttcagccacacaactggggaactggcctcccctctcctcccgtcccttttctagccagttcttaaccattcctgggggagtatgtccttacatgatctcagaaatgaccctggcagaaggttctcaaactctccagaacgtgggcaggcaagggggaggggccagaggatactgccagagagcccaaggcagagatggtccctatgccccaggtttccatggaaacataggaggagtgatgacagccagcacagcca

SEQ ID NO: 28953 - DNA, 1592 bp, Bovine  19866880536383
  misc_feature (1)..(1): n is a, c, g, or t
nctctgcatgtaaatgctcactgctagtggtccccaacctcgttggcaccagggaccggtttcgtggaagacagtctttccttaaaccagaaggtgatggttttggcatgagtcaagggcatttcatttcttgtgcacttcatttctgttattattacatcagttccacctcagatcatcaggcatcagaccctggaggttggggacccctgatttactggatgctggaagacagaaggaccatggtgggagcctggggtcggggaaggcacatgccttatgctgatcgtcttctcagaaggacacacgaggaagccagctgcaggcgccgacccaagagctcgcatggaccccagggtctgggtggctgcttggcgggggggccgacatggaggggtttggaggatgtgtacagtggtggggcacgcagatggaaacatgagtttcctagggtgaaagtgcaggacacggagaccccagcgataagcttccattaaaaaaaaatgttttgctaacatctcactgtaatggagaagaagctttgagagtcacctggtcctgcaagtctagccccacaatactctcacaggtcaagatttatctgaaatgctcagaggaggccgtcatagatgttgatgcatgtttcatcgtgtctggcacactgctaatctcacaaacagatttatgaaagcataatatttgttgtatcatatccatgcatgcctgctgtcacttcagtcgtgtctgactctttgtgactccatggactgtagcctgccaggctcctgtgtccatggggattctctaggcaagaaaaccgtagtgggtagccaggggatctttcctcctccaggggatcttcccaatccagggatcgaacccaggtctcttatgtctcctgcattggcgagaaggttctttaccactagcgccacctgggaagcctttgtgccatatccatgtcttagtaaatgtggttacactgcgaggtagagggaggtcatggccacagcctcacttttgggatgaagccgaattcccgagatgcagggaccagacgaggttggcctggccccgtcaataaccaccctccttggtctgtaaccttgaggtcccccttgctggggaagcccctgcctgttctgactctgcagggagagaatagctatctctcctttccgcctgggcaggcagcagagcaagccgagtattaataacatggttggagacggcggcctcaatcttatctgagcacgagaggagtctggctcgttatcctgtctgccgccctcaacttatctgaggaaccacacagtgcggattcatccttcagccccagcgacccttccctccttggaaacctgagagtcttcgcttcaaacacggccctccgggccaggcatccgatgggcctggctcccctctgatctcccggagcctgggagccgggggtcccggcagctggagtaattctatgcctgcaatctggcttcttttcttttcctggacaagatttataaggcagggtatagtcttaccgcagtcattcccaggagagggccctgaacccctagtctccacagccccttcag

SEQ ID NO: 28954 - DNA, 1237 bp, Bovine  19866880548022
  misc_feature (1)..(1): n is a, c, g, or t
nctgacattgcggttgtgtgtgtggacagctttcaaaatcagaacaaaacaacatgtagataaatatgggcgcatgttctaaaagtcatgaaaaatgtcctgagtctcaatccctatgtttttaaaatacttatatctcactgcctccaacgattattaaaaaaaacaagaactgcacaactataaatcaaatatgtcagaatttacaagacaacatatacatgaaattgcaaaaaaaaaatcagggtttttttttttttaatgttataatgtctacatgggcttcccaagtggcacagtggtagagaatctgcatgccaagcaggggactcaggttcaacccctgagttgggaagatcccctggaggagggaatggcaacctgttacagtatccctgcatgaaaaatcctgtggacagaggaacctcgtgggttacagtccatggggtcacaaagaataggacatgactgagtgactgagcacacacagcaatgtctaaataattacgagtgtaagaactacaggtaattatctcttatttaaaagacgatggacttgaaaacactttgtaagagaaagaagccagccacaaaagaccacatactgtgtgattccatttctatgcaatgtccagaataagcaaatttatagagacaaaaggcgggtcaatggttgcctagggctggagcggatgggcaaggaagagaggtgatggctgagaggtgggggttatttttttgggggtaatgaaaagtcctaaagttaactgtggtgaaggacacacaattatatgaatgtactaaaagccactggattgtaaaagttcaatgggtatgtgaattattctcaaaaatttgtttaaaaaacaaactatgattaatatctagatagatgttctaattttccaggcctgtatcctgtcaatcctcgaatgatcatttttgatcttagaaattactcaaaactgtcctgtgagcacgtaatagtaacgtgcagcacatcagtgtaatatcacaacactccaggcgaaaaaaacaaagaaacctgcgtgtgattttcccgatagtaagtacagtcttaaaatgtacttcttgagttgataactttgggtagatgtgctttaattgttccaagaatggctttagacagagcatattagtcatggaaatagctttgacttctctctcccaattccatgatcaacatcgtaattgaattatccctgcaaatttaaca

SEQ ID NO: 28955 - DNA, 1851 bp, Bovine  19866880602310
  misc_feature (1)..(1): n is a, c, g, or t
ngcgtgggtagccattccctcctccagggtatattctcaacccagggaatgaacccaggtctcctgcattgcaggtgggttctttattgtctgagccacccggacattaaggcttccaaggaattttgactcaagtccaggaaaagtgggaaccccacaaagtgcgtataacataccatgagaacttaaactggcaagatactactgcagttgtatgaaggcagcattaccatcatgtgatggaacaagctgatgatgatcaaagtacacaagttgacgcagtcatttcagcccagtcacgacttcggtcaaacccatcccccagggagatgcgcagctcttagaatgcggagactgattacgaacctggtttcagtgtcctcagaaaaggctctcccaactcaactttccaatccaaatctctcagatttgagcctgctctgcttctcttcttattagtactgagaccccttcaagaatgcctgatttttttcctttccttcacacagaccgtggctgtcttcaaagactcctgcctagaaagaggcttttcagggtcccattagagaaaagcccattcagcattgggcgaggtagctaaaaacagggtccctcccctggggggctggtgtgatgcccaacagcacacagtgggcgctgcatacaatgctatttcctgagggcgagtgtctcgatggccagaccaggcctgggattccctgagggccacaggatgttggcaagctggttctaacagctgcgcaagccaccgcaggcaaggacagagtgggggccatgggtacagtcaaaggggggaaaggccctcacccagaggctgtctggaggcctggatgctctccatgaaataggcctggcacattctcatgatggcaggtcactagaaagagtccatggagtgtacagcgctgctcagtttccatctcctaaacagttgaaagtataggatcagcgccagacttgcagaaatgcacatctctgtccaacagcagcatcgctcctggtcatttgaaggaacaggatatgtgtgtgcatgtgtgtgtacctgcgcaagcatgcttgggtgtacacgcacacatgccatccagctataaatttactgcagtaaatctccctggtatgacggcactaaagaaataaggaagatattctttagtggcagatttcttctctcttctcctccttcccaagtccctctgaggcatactggacatgtcttcccaatgcattacagcaagaccccgacatttgaaccttcaaagatgcaaatgtacgtttgcatgtccaatcacataagttagctcacaagttcacatctggcgtacactattacatacctggagaaggcaatggcaccccactccagtactcttgcctggaaaatcccatgggcggaggagcctgggaggctacagtccatggggtcactaagagtcggacacgactgagcgacttcactttcacttttcactttcatgcattggagaaggagatggcagcccactccagtgttcttgcctggagaatcccagggacgggggagcctggtgggctgtcgtctatggggtcgcacagagtcggacacgactgaagcgacttagcagcagcagcagcagcagcacgagcctgcatcctccacaagccgttgtgcttttgtgcactttactgtacagtacagtgtggaggacagtgctacggtgtctttatttcaagtccaggatgtccagaagcaagcacaaaatccgcagtgatgtagctggcactgctaagaagtgccaagtgataacaatggaaacaaaagtgaacccaatgaaagagtaaaggaggaaaaaa

SEQ ID NO: 28956 - DNA, 1585 bp, Bovine  19866880657939
  misc_feature (1)..(1): n is a, c, g, or t
nggctctgtggccaatggggctgtccactttgtccgtcttggtcccctgccttcatctgcttttcttcgtgtatttagttcctcaacgaatgacacccgcccacccttctgactgctcaagctggagccccggaagtcagcctcaacttctgtcctcatttcacccacaactgatacgttacaaactcttcctgaggcctctgtcctctgcacgttcctctccatttctgcagtatttagtctgttcctgcttccaatctttttagtctggctgcacagctgcctcccgacacatcttctggggtcctgtcccactccagtggcttctcctactgcagctgtagtgatctttctaaagcagcaccagagccaagtcactgggaaagaccctgatgctgggaaagattgaggggaggaggagaagggggtgacagaggatgagatggttggactcatcaccgactcaatggacatgagtctgagatagtgaaggagacagtaatggacagggaagcctggcgggctgcagtccatgaagccacagagttggacacgactgagtgactgaacaacgtctgcctgagacactttgatggttgtgcccttagaagcgaaggccaactgctcatcccagctgggagggcatttcacgatctggcatacaagcatctgctcaatttcttccgcagttcctccttccggcctcgctcagcctcacctacacgtgtaggctttgcaaatctgtttcccccatccctctgcatcacccacttctcggcttggatgtaattttctcctcaaaccggaaagggaggtccctcctgggcgttcccacaaaactctgtgtgtggtggccattaatattgctcatgaaatcaagattttacacatatatggaactgtatttgcacatgactgtttaaactgtaagctcatgcactaaaaaagtataaactttaataaacagtataagtaatttatagtcccataaatttttaaaatctgaaagtcacgtgctgtaattaatactgacttgttctgcatatacaatgaaggaaatatttctctttctacagtcagagaaatcaaacatttatttaaaatcagtaagcaataaattctaattcccagtgggggacttttctgaataatggttaactacacacatatgcaacatactatgtgtctgagtatagttagctgaattctgttgactcagctcaacaacgcaggtgtagctcattttacatgatggggcatcctttgataactgtgtgcaaactgaacttctgtgaatcaaagtttattttaaatgttccaatgagcaaattctatgtaattccatgttcaaagggaagaatcatgtcctaatttaactttcttgaataatccagacttttataaattggatctacttatagcaatattataaagtaattaaactgattatcatcacagaataaaacacgaagaataaacccagtaatataagatatgaggctacctattaccaacatcctacataataccaacactgagatgattaagctgtcttaaaagcctctcatgcataatgaaggaagaa

SEQ ID NO: 28957 - DNA, 1040 bp, Bovine  19866880669111
  misc_feature (1)..(1): n is a, c, g, or t
ncactcccccgcacctacctgccactccttggcttcaatttaaccttgcctaatgaggcctggaaaagagccagttccagaactagccagagacctgacttgtccaggtggccctcagaccaccccccaaagccaacctggacctctgcccccaagtgaaacttgtcataaagcaagagccatgtttctcctctcagacacatactcctgaaattaacttgtcaccaccctcgccagggtccctgcctgatggaaggcaaagctatgtcgactcatgtacttatatctgatttttttaaaagaagaaaaatgcttccacttgtagcactgcgtgtatttctttataatttctgaagattagtgtttgagtaccatgttgctctcatagcacttggccgaaacgtcattaagcctgcttttgctaagcttcacacttccaagtgtgaataacgtaactcgttcaaccccacttttagaaaaagaggaaacatgcaaagctcattagaggttttcaggcattctttcaggatttaattgccagattttataccccattagagcctttccagctctctttaggagccattcctaaaatcaagactttattaacacttttgaacacatttgctctgtgacagcatctatgagaggaaaaattccttcccttaaattttcctacctgcagaagaatattgtggactatatagtatgaatggaaacttggagagggctgtgatcggtgaggagagattgtgttgcaagtgactgaaaattcattgaggagtcaggaaatggtatggttagatacactggaataactcagccaggggaggaaagagcctgatgagtgacttaaaagaagaaagctaaattctttcttttataaacctttcaaacttttaataattggtgagcatttccttgcagttctgtgtacatttaaaatttccctttgaaactccatttttgaccagtagatttttaaaaataaggatttgttgatttatttctttttggctgtgctgggtctttgttgctgt

SEQ ID NO: 28958 - DNA, 952 bp, Bovine  19866880714069
  misc_feature (1)..(1): n is a, c, g, or t
naggagaagagagctctaactgggtttaaagtgcgtttgtgtgtgctgtgtatgtgtgtgtacacatgagagtgtgtgagcatgtgagacctctgtgtgtgtgtagattgtgagtgtgtgagaccaggtatatatgtgtgattgctagtggtgtgctgtgtgtgtgtccatgagtgtgtggaagcgtgtgagagccgtgtgtgtgcgagtgtgtgagaccaggtgtatgtgtctgctctatgtatacatgagtgtgtgagcatgtgagagctgtgtgtgtgtagactgtttggggaccaggtgtacgtgtgtgattgtgagtgtatatgtgagtgaattgtgagaatgtgtatgtaaacctgagattatgtatccgagtgtgtgaggctggtatgtgaacatgagtatgtgtgtaagtgtgtgagctcggggcagtcagccagggcccaagcgcagccctccaaggggctcctcacagctccttggacttgccagcccaggacacccacaccatgcccaggacctagcggagtcctgcgcccaggggctccgagcctggctcagtgccaagcctcgcctcgcctcacgcctcctccacagagcccaggcacagcaccaaacagtcaaatattttccttttctgtcatcgctaacgatagctccataagttcccagatcactgccttctctcattgccataattagcaattttctgatatcatacaagcactggttaattatttcctaggagacaaagcaaagtcgtgggatgttgctgcgcagtggatacattctgctcccgagagaagcccagcacttatgtgtcagtcacaccgcagggtgggccccagaagggcaccgtgaccccagggggtcccagccctgctgctcaccgatgtgtcacgtgggtccacaacatcccggccagggtcccagtaggacgagaggacat

SEQ ID NO: 28959 - DNA, 1797 bp, Bovine  19866880719070
  misc_feature (1)..(1): n is a, c, g, or t
natctcagcagccagctgtgcctggcggctcctggactgggcagtgcagccctagattccccaggggcctccgggttgggcggggggcccgggccctactcccagctctgtgctgggtgagtctccctggtggggctctcacagactcaatgcttctagcgctggacaatctgactccagtaattcatcagcctcccatcaaccaggggatttaggccaggtaccctatctataagcacaaacatgttcttctctagttagatcttttgagaaaggctggaagcgtgccctgaaactgcaagggaaaatcgggagtacgactttctccgtaaaaactctgattttacatgcgtgcccatagcttcaaggcatggagcaggtgggactatccctgccccactcttttaattatcaatgaacacgtgtagttttgacaactgtaataaagagatttctcacactaacaatacagccctacattttgacttgtttttactggtcagagattggatttcatttgtaatgattaatcctgagactccatgaaacttatacacacttgaatgccataaaataagggagctgatgaagaagccaaaataaagtatctgcaaaaataaacatcacagggtcatttttctctggctaaagaacgctccagaatctctgaaaagatgacttatgtgtgtggggacagcccaaaccatgccaacaaggcactcactaaacatgagtcatccagaacttagccccgccgtggatgcacccactcctcacagcctggtgccccctgcacccaccccagcagtgagccatccaagcccatttaaacaaaactgattgttttttgtagtgaggggtgtggataaaattctgaaatggattgcctgagaagtcaatttgacatatgatcacctaaaatctcactttctcagaagaactataaaaaatttcattaacatcacaccaacctccaaggtcctcctaccagcatcccgtcatttaacagcatcgagtctcaggtggtttatacacaggaagctaaaatgactgcatcgcagccaaatagtgagcaattacacgccaagtgtatcgtgtgctgctgtcatttaaacttaagctgcgttccacaggaaaggtattatgcattgcataatccaggggagtgccagcaacatgcagttatatctacccccactttgttttctacaaaagaaagagaatcaagtttgcttgttactcttctacactgttctcccttacgcaccacacacgtggtctctggaagcccagagcttggactaacggaaggtctgcgcatggtatgacacagcgtgtaatttctatgttctggtgggattactgatggccacggagagggaggcggccagcctctctgctctctttgctcttctcttccaccgtctatttcttctgagatccctgccctgccgtggagatttgaaggtgttaggtctctcaactcaattttccttcccacctctaggaaataaagcccacccggctctttctaagtagagactggaaaaaggaggggaaagcgggtgaggggcacgtttcacaagagttcaggtcaggttcctgcagatctgcgaattcttagtgctacatggggtcctgccgcacatacagctaagcagacctgtctgtggcacgagatggccttctgcccatccctgacctgggagtgggggtcgtgtgtgtgtgtgtgtgtttggaattgtggatattctaccttgaaacagactctccaactcaaagaccaactgttaagag

SEQ ID NO: 28960 - DNA, 1253 bp, Bovine  19866880726766
  misc_feature (1)..(1): n is a, c, g, or t
natttaataacatgaagtcaaacataactattttagatttaagatggttacaattatgggaatttttttttcctctggtattgtatttcagaaagaaactcttaggtcatgtctctggggtcctggaaatacttgctttgtaattttttcatactcaaatctcagcagtgtttatgctgcagaactcgggaacccggtggaatacttctttgcattgtggggtcaattacaagctccaattaaagcaaatctggctttgcctacatgtaaggttcaaaagtatacctgcacgcagagatgtatgagctttctgcttatgtgtctacgtttctacaactgctccaattgtttttatgcctctaccagttagttccctcttcacccacaggtaaggccaaaggcacattagcaaaaagtccctatgatgaccctctggggccctgttgttctagccctacttttcaaccacttggccttgttttatatgtctagagattagctactcttcgggagactattcctgccaattctgcctgttgggcacttgaaagcaggttcatttaaacatcaataactaggagtcctcattgacctcatgctgcttaattcctaacctagtcttgacccccagaacaaaatcttgtgaaaagtcaataaaagtagcaaacagtgttatgttatccttggcagactttgcaaaacaatgatagggtttaacaatagttcatcacaggcttaatagttgccagcaagtattgagtgtttacatgcacatatgcgcttgcggatgcacagaacaaccaaatgaggtaggcactgtcattatccctgttttacaggggaggaactatggtaaggagatccaactggtccatcctagaggaaatcagtcctgaatagtcattggaaggactgatgctgaagctgaaactccagtactttggccacctggtgcaaaaaactgactcaccggaaaagaccctgatgctgggaaagattgagggcaggaggagaaagggacaacagaggatgagatggttggatggcatcattgattcaatggacatgagtttgagtaaactccaggagttggtgatggacagggaggcctggtgtgctgcagtccatggggtcacaaagtcggacacgactgagcaactgaactgaactgtactatggtttaccggggcagagtatttaacctgaggccacaaaccatcaaccaggctcccatcagcaactccggagtctag

SEQ ID NO: 28961 - DNA, 1019 bp, Bovine  19866880739178
  misc_feature (1)..(1): n is a, c, g, or t
nacttgcttgtaataacatcctaaaaattccaaaggttattttccctcatccacagttaaaaagccatctcctacagaacactgtcatgtctgtgacgtgtccaggattaaggcaagagagttcttggttatagtaatttgtctggttagagattaaagaaaaaaaaaactggacttgagctgtcagttaatatttttcacttaacaacaacaacaaaaaaagccattttcatgcttcacggcagaactgtgtgatttttaagcaggtaaattctcctccgtgtctggcatctgatagtttttttgcatgtcagcgtaagcaagcaagcaaaacacgaccgatgaagtttcaaacgcgtcttagttacataaacggaagttagctttctttgatatagaattaccgaagcatctcactgaaaaagcaaaatcctccttgcaattaataaagaattggggtattctaactgagctgaaaactaagaaccttcaaattccaaatgtttccattcctggatgagctttggtattcacatgttaataggatgcctgcttttttttttttttttcttttggccaatgttcagcccaaagagtctgtgaaacagactttttccatcttatgacctgttttagaatttctttcttgcaaaatgttagttattttgcttggcagattgcctgaattcattcttattttctctctctcctactattttacctctctcctgtctctcttctctcccatctttcccctctttttcttctattctttgataaattatatatttaaattagagttcacttggacctacagtcaatgtgtgacttggcagggttgctagagttagcaaataaaaatacataatccccagtgaaatttgaatttcaggtaaaaaatatgcccccccacccagttttttttttaagtgtaaatatatctcaaatggggctttcttgatagctcagctggtagaaaatccgcctgcaatcctggagaccatggttcgattcctggg

SEQ ID NO: 28962 - DNA, 1074 bp, Bovine  19866880799519
  misc_feature (1)..(1): n is a, c, g, or t
nctcccggggaagccttctctgccgactgctctggatggccccaaaccccaatcagagtattttggatcatctgtttctgcaaattttgctctcgccaacttctgagagccattctaggatgaaagccttggtgagatgatgacagtaccagcagaggtgctttgaatcagctgtgaagccaaagccttaagaaggacctcattatcgctggaattgaggcagaaggagctggagcccacccggggtttcctgaccagtaagcagaaggtcacaggcgcacatctgcccctcaggaggatgtagtacagtcgggtaacttcctgaaggtggcagctggagaagggggtctccggagagccagagggactgggattggtggcatgcgagctcccccaagattacctgtgctttggtgtgtccatctgtgacacacctctgtctagcttctttcctggaaagggagtaaaaagggacttaggcatctgtgctgtccccaggcgattcagagcagagacagccaggtggcacggtccagcttcaccctcactctttcgttgccactgtgtccgccctgccgcagctatagattcagaagaccaggccttcagggtccctgagagagggtcactggccttttagcccgttaggaaaccatggctggtcatgctcttctcatggaaacgattcctgtattcctgacgctctggtattctgagaactttcagcatgcggatgggtggtcctttcttttcctggacagacgatggcattgtaacacttctgtaggcagcaaagccccagcagcatcttccctggtttaattgaatccaacatcctggaagagcctgaggttttgcctttgagtcctgggtaaagcagatgaatgccatcctttctgtgttttctaaaagggagacaggagagtcttgcatctctactaaaaagtattcccacctcattgaaattcaggcttgaactctccaccctgaacacatccagaagccctttctctaattttggaagcagtgatctcgggaaaaaaagttttccatctgtttccttatgatgctaag

SEQ ID NO: 28963 - DNA, 1563 bp, Bovine  19866880824017
  misc_feature (1)..(1): n is a, c, g, or t
naccatgatttaatcatcgtgcctacaaaatgaagcctctagaaaaccccagagggacggggttcagggaccttccaggtgggtgaacgagaacctgtccatgtgctgggagggtggttcaccccaatcccctcctcaggatcttctggacctcaccctatgcacctgttcatctggctgttcatttgtgtccattcattcgtggctcttgatttgtggacctgtgtttccgtttatcttgggtaaatacctagggaatctctgggttgtctgtttatcagccctggcactgttgacatttggggccagaggactctttgttctgagggcccattgcatcataggatgttcagcagcgccccctgcaggccagtagcaccccctcagttgtgacaaccaaaaaatgcctgcagaccttgttccgggttgaaaactactatagaatttggcagcgacttagtggaggttgataattaaaattctaaaagcaaacagtgctccctaaaggaaacattttatcctcagatgagtatttcttagagttcctttaccagggagaagcagatctttggtgtctcgttcattcacagaagattctatttagtgtgttttattcaaaaattccaaagcattaggcccattgtgtctagatggtgaagagaagatggtaatatgcttattaataggttttcagaggttttgctttgcaacttttggacaccatggttaccatgtttacctggttcttagtcaatttcaaccagctctggtgacatttcctttatgtattggctttcacacagttcaagactctgatgttgctgtcacatttcttctcttttctgtgctgtgtactcatttttggacaagaaacattagcttgcagtatttttcaaagcaggttgaaaatgcttgagtagtcattttgttggaggagtttatcacaggcgagagagttttgcatgggaaagtatgtattttctgatgagcaatcgctttgcatttatttttgcaggagctgcccccaagaatctaattttaggtatcatcaccagggtccatgtgtgtgtaattttgacgggatctacattcctttcattgttgaaattagttgaatgattctgtaattggctttaaaatgcaaaggagatcctcttgtagctgtattttaatttgccgagcttgggcttctgccactgatgtttatttttcctgacaagactgtaaaacgtgtgggcaggccccagcgctgcaactttcccattgaggcagccagagtccttgggcagtttcctctctggcttctcccccaggacccattctcggtgctgatttgcaggatttccaaaatgagtctttcctgattccagaggcaagaacaatgcagctgccacccactgcttgttaattccagctggtatcagagaggcctgatggaagttccaagagaaggcaaccaggttgtcattctggacacactttctaggatttctagggtctctagaaaacaaagcaaccagatcgtcattcttgacacgctttccagggtttctagagtctcta

SEQ ID NO: 28964 - DNA, 1714 bp, Bovine  19866880828980
  misc_feature (1)..(1): n is a, c, g, or t
ncataagccaggaggtgcaggccagactcagctgcttgcccttctctagtgacttgctgttcatttcatccttgaaaacacgttcgcatctgcctcatcaacctcattctcgctgacatgaagatagcatcagggcttttagcggacaagccagagtcagttacactaacttagaaatccatatttatttattttccccttcagtgtatccaataagtcctaataaaaagagatgaaggagtcatgtgggtactctttcacactccagacgggtgtgagcaaatctcccagcctggggagggcaactcctcagttgttgcccgattctgttcctccctggaggcaggaaagtcctctccattggccaggccctccttccttcccagggtgcaacaatcaccattgcttttgtctgacttctacctgcagaatgatcattttacatcggattccagcaccaagcctgggagccatagatcaacagcaaaacatacagattagctacagagagagagaggcaccaggtggacaaagccatgcagtgtcccaacagcaggatgaacgcttttccacctgtttgactcacctctgccctctgacatctcccctggctgtgggcaagagctgctgtctttccttcggtcctaggcatctcgggctgcatcaagtagcagcttcaaccacagacaactactcctcacagttctggagactggggcccaacataaagatgctggccagttgcttacctgttgagggctctcttcctggcttgccgacagctgccttctcaccatgtcctcacatggtagagaagagattttctttctcctgtctttccttacaagggcaccaaagtctccatcctcacaacctaattccctaccccaggccccatctccaaatactatcacatgggggttagggttccaatgtctgaatttaggggggaacccaattgttcaatccatagtaccttcctcggcccaaaggccatgaatgagcccttcaggttctctcatcatggataaatttgtgtagacattttattttaaagccaagcagaaggtaaaaggttttactacttaataacaccaattttatcatcacttagcacaacttccttctgacaattttatcatcacttacaataacttccattagggtaataaggcattaagtagatgttgattgcaaataatctgcttacattcactaattatatggagactgatttttttcctcctgtttaaaatgtaattttaaaacatcaatacttcctaaaaacaagacttatcaaagtgaggagacactttggcctcagagatagaaaatgagatttttatatatctggcaagtgcccgattacaggatgaacataaatgaaggattcatcctcagcaataatgtaaatgactcactatagctgatttgctctcaccttctctcccttggggtcaaattaatatgtttactcccgacaagccattttatacagcagaaaatattgatgcctcgctgccatctcaccgggtggggaagggggcaatttcgcatgtggtctttatagagattaagtataaattgccaggctctgaattttacgagacttccatagctgcgaagtgctagtttaagtgaggtatagaggggctctggctacattatatttttatttaaggctgctaaaagtttgtaaggccgtccatacaac

SEQ ID NO: 28965 - DNA, 1159 bp, Bovine  19866880830646
  misc_feature (1)..(1): n is a, c, g, or t
ncccatgtcttaatcgatggggaggtggagacctcccaaggaatgactatgacccaggattgcaggtttccaggctgccccactcccccctgaacctcaaacgggactgatcccatcaagctcaccttgatggacatgtggcaggtatctgggaagttaggatcacacggatagtgccggcattctggatgatggtcttcacttccttacaaagagaacccctctattcacttcaccttacactgagccgcaggttcttcaggcgaagtgggttaggcgccagccctaagaaatgtctgttgattggtccaacccaatctttgtgatcttacccttactgtggaactggtttagccatggtcacatgatgcagttcaagccagcttgacgtgaggggtagtctgtgcaatgagggaaataagataggcccatcccttttcctggacacgggcagctatgtgtgatgactgcagcagccatctgagagcagtgaggagcatcagcctgcagacgctcaagtcaaggatggcagtgagaggatatggaaggaaactgagtccctgctgaggccccagagtctctgagtttgccggtcctggaaactcccctctttgggggcttcttactgtgaggcccacatgtccttccttgctaggcttctgcttattttaattgctgtccatgttccctgtcaccagacacggtctgtcagctctgcgctattacacagcctttcaaaaggcccttctgaagagcgcttcctgcagaaacacctgaataatacttgatgcgtttgccctgagagtcctcatctggggagcaaatccagcctggttgacaacggctcatgagatcacagcttgagtgggcacagccacaagtctgggttcacattctgtcatttggtttccatgaaaatcgcttgtgcttgtcattcttaagctcttgtattccgggggtgagatgcaaattaaacaccacgtcatgctgacattaagacgcttggtttatttgctttaaacacaggagagaaatgggattgatgtattcagacggagatgagggtaggaggagggttttcaggagacatactcgattccaactgggtgctgccaatctctctgggccccaccagcctcccttgggagctgcctttgac

SEQ ID NO: 28966 - DNA, 830 bp, Bovine  19866880853733
  misc_feature (1)..(1): n is a, c, g, or t
natttagagcaaaatctttgagagaagtagaactgcctgaattactgctcttttatatgtttttaaatgagaatgtaaaggccaagggcattttttcccatttaataccattaaatccatcattaaatctctcgctgaacactggctgattttaatgatgccctcaagggccgatcctggtgcttggctgtgttaatattgttgtctatatagatacaataaataatgcttagctaagatggtatgagatgcattgctgtgcgtatcaataaaaatagtcgtgctaatgagaccaagtgtcaggaacagatggtgtggtgggaatctagccactggagctaaaagcaccagaaaggacagagttccaccgacacgttaaatctatcacgaaagccagcctgaatcctgtaaatattttacagcaagttggcataaaaggattaatttggagttagcgtttatatttttattatcttcctttatagcactgtggcataaaaaccacagatgctttccagtatctgttctgtttgctggctccagcacccccaatttctaggcagcatcagagacttacctgcctgattcttgatcacagggcagagttacactcatgtttttatcccagaggaccaagaaacagggtgtggggaagcttaaaaaattttttagaacatttgtgattttgaagatgaaacattttttaatctgactgtccaatactatatccttcactttatgagtattattattctatgatatattgtttttatccttaatgataatttcaaggataaagaagatgcaacacatatatacaataaatatta

SEQ ID NO: 28967 - DNA, 704 bp, Bovine  19866880902393
  misc_feature (1)..(1): n is a, c, g, or t
nccttgcatccccagcgtcatacattaaccttgtctcactgatacatgtcattagttcagcagaggtgagatatatgtgccctgcctcgtgaaatgtgctgcattatccatggatgaaggttatcaaatgcatgaactcatcattatcattgtgcattttaaatcacactgtcatgaatattcagagttatatttctcgcttattttacacaaaggagctactcagcatgaacacaaaggcagaaagtaagactcaaagaagcaagtcattgaaagggaatcacaccttctgggcttctttcttcactgagttacattcaagatttagagcaaggcagtagagaaactccctcaacgtctccttacttcttcccagtccagagagagcctcggctttcacatgatgcccctggatgcatccaaagacaaacatttgaaaaaaacagtgtgatgatacacttgtgtacaaacagccctgaaaaaaaatcactgcaacagttttactttcatattaaatagaataaacacaagcccagagagtatggcttcagattgaccactttataaatcgggcaaacgggaatgtcccacaagtatgatccatgatcagaacaccagagtccacacttggagtctgatcccaaagcagatccaagggaccggctgagagagaactgggcgcccaacacctttaactcgctcag

SEQ ID NO: 28968 - DNA, 1768 bp, Bovine  19866880916375
  misc_feature (1)..(1): n is a, c, g, or t
nccatgggcattctccaggcatgaatcttggaggggattgccatgacctcctccaggggatcttctgaacccagggatcaaacccacatctcctgtattgctttaccatatgagccatgagggaagcccttttaatgtctgagtgaagttgctcagtcgtgtccgactctttgcgacccccatggactgtagcctaccaggctcctctgtccatggtattttccaggcaatagtcctggagtggattgccatttcctcctccaggggatcttcccaacccagggatcgaacccaggtctcccgcattgtagacagatgctttaccgtctgagccaccagggaagtctttaatgtctagtgggtatttcaactataaataaatttaatcctctattttttgattaatcaacttctgacagtaccttttcttttatactatgtgaagtgaagaagccccccatttatgcttccctcctgctctcccctccctctatcaatcctactctgcacagctatatctttcttcctgcatagccgagatttaaaatatttatactctgttcagtaattattgagtcatctcattaatattaatttaattaataatttaattttgggaagtacctataggccaatgagaaaaattatatatgaataatggaatttacaatattgtaacaatataaatataatctctaagaaacagtagaaagactggacctgtgtagagggactgccactaaacttgaatgaagacaagggttcccagcatttacgtcaaatggattctcattcttatatctcactgtggcatagattaatctgtctcagacaaaggctatgcttttcctagaaagaagttcaataaagcatgcatgtaatgtgtgtaaaaatgtgtgtgtgtgtgtgtatatacataggcttcctgggtggtgctagtggtaaagaacaaaccttccaatcctgggtcaggaagatcccctggaggagggcatggcaacccactcctgtactcttgcctgggaaatcccatggacagaggaacctggtggggctacagtccatgggagttgcgaagagtcggacacaactgaagcgactgaacacacacacacacacacacacacacacacacacacacacagtttttaaaaagcaaattaggttaattgtgaaaacaccttgcaagcccagaaatgggacactgacaaataaataacccagaatcctcttaggcctgcatcctattgagttccagttagcaagtaatggaatcttgtgttaatcttccatcttttcttgatagttttggctgccctgtatttatttgtaaacaaaatagtcttcagtttttcctgattttaaatttcacatcaatggactcgtactgtatgcattcttctggaacttacttctgtcattcagtagtatggtttttagattcagccaacatgatgcacctagctttggttcattcatcctcactgctgtgcagcatccccttatttagttcagctcagtcgctcagtcgtgtctgactctttgcaaccccatggactgcagcacgccaggcttccctgtccattaccaactcctggagcttactcaaactcatgtccatcgagctggtgatgccatccaaccatctcatcctctgttgtccccttctcctcctgccttcaatctttcccagcatcagggtcttttccagtgagtcagttcttcgcatcaggggccaaaatattggagtttcaacttcagcaccagt

SEQ ID NO: 28969 - DNA, 1193 bp, Bovine  19866880922593
  misc_feature (1)..(1): n is a, c, g, or t
ntaatgtaactggtaggtggtcataacacgcgctgagttaggagtttacaattcacctattccatttccagtcagcctaagatggaaaagtagcttccagacttggctttaatatcttcagagaccctgtagtcattgtatattccagccaatttctgggaagatctgagtgctggggagatgtaccttatcttgcagctccactgcccagcacaatgcctgacacgtagtaggagttcaacaaatactagttgagtgaatgaactgtgcgcccatcattggctttcatttccccttcagaaatgtgagggttatataatatccttgactttttcagtgacatcatatgttcctcttctctgggcacctttctaatgaatggcttctggaacatagcacagggcactttatttggcaatagcaaggttgtcctttttcctgcaaaaaaaataataatttattagtcaactttgcttcactgccgactcccaccagtaactccaaatttgtacacacaggaggctgcttaagctccagctcgtatgttcctggagttgtatctttggccctaaatataatattcatttatctctattaaattccattctgttagaatggcccatccagcttaatgagctctttctgaatctaattctggcgtcaaacatatggagtatgtgtggctaaaataagcaatgtgacagccaggaccttctgtgctcatataaataattctttggtttactctttaatcactctgtttccatagttcattgctcatgggttgaagctgcctgcccagtcgtgtgtgtgtctttttttttcctcaaaggcttccaaagagtcaacccagagaagcgctccccattcctccagctgggacggtccctgttgctgtctccgccggcacctggtggctggcccgagccatcagttctgccacgtgtccttccagcactcacctccccacagctcgtgttgactgccgttcagcagctcatgcagctggcgcctgaggtcatcagtgcccacgtgttctcagcagtgttgccaaattgactctcagcatctcttctttctatttaacgctgaagaaggttcctataggacactgattaaaatgcctcaaaagcaacatgtgacctcactgtcacctctgagtatccagctgcacagaaggcataactcttggg

SEQ ID NO: 28970 - DNA, 899 bp, Bovine  19866880946366
  misc_feature (1)..(1): n is a, c, g, or t
nacatggcgagatccaagtaggaaggtcgaggagtcctgggggttttctgtgtcccaagattcatattgaaatttactgattaacactttgaatataaaaacagattctaagtgatgtgtcatgtattactgcaaaatgtttctttaagaaataagctgctttacccggcagcagctgccattatccccctgaatggattctgagtggtacccaaatggggtcagctgagtcagggcagccaaggggctggaagtggagacctgtatacctgtggcaatgtggcaccaccaagacaaaacccaacacccaggctaggcggtgaaggacccccgttgtgagcgctgggaggtgagattccaagaagccccgggtatctgaaagcaatttaacattttaaaagctctgaatggtaaaggttaacctctccattgattcaccagtcctgtcttgttgagatgctagaatttacaagcgcaacgggctgagccccagtgaaagagagggacagaattcatctgcagcaaggactggagcctcagacacaatattccatggcacacggaagtagttcagaggtaacaggacaacagattgctcttcaggaccaaggagagcaaggctacatccatatcactgaggaacagcgagcctggtttctccgagtgattggcctataaaaggaagactgctctatttattaatgtaagaatctagcatcatgagaggcttagggcaaaatcctactgtgtcccatgggaaaatgtttgcccaggaaacaaacaatcaatagttctatattatatttagctgaagttttatgcatgatgacaaacacagtccataaatgtcacttggtaatttgcacgggcaaaaatatagccaaaagtcacacatgggg

SEQ ID NO: 28971 - DNA, 1931 bp, Bovine  19866880960688
  misc_feature (1)..(1): n is a, c, g, or t
naggattttgtgcgctacctgggtgaccccaaccacaggtggctggatctccagttcggggaccacatcatccactgggtgacatacgtggagctgtgcgcaccctgtgagatcacgtacagcgtcgtcgggcaccacgagaccctggaggacgacgccccccatacatcctcagagaggcgggcatcgaccacctggtggcctaccccaccatccccctgggcatcaccgcgtacaacaggaccaaggtcgagcagtacttcctgggcatcagcaaacgagacatccggcgcctgtatgcgcggtttgagggggactttaagctctttgggtaccagaaaccagagtttttgctaaactaatgtgtaggaccatgagttcagatatcttcgttagaccagaggctaaccaggtggagctcaggcacagaaatgacacttcttcatctcactcctcttgaagactgccactccctgaggaccggggtgcatcttgcccagttaagctggaccctgacagttacgaagtagtctgcatataagatgcatggagggtcctggcccccaccctccagtgccactgagcctctgctctcctcagggtagtggggagagcattaaacacttgcagtcaaacagcagggggggtatcagacggccttgatcatctccctcagttgtcagacacctgcagggcagggcagtcctgactgtccccaggggacagcaggcatggcacccagcactttgaagagaggtggacaagccggtaccctgcagacatcccagggccggagacaggatcagatctgagtgataaagtcactcttctggctctcatctcagccgccgctgtcattgcagaggcaaacccttctctccatggctctctagttcccgagaagttcaggaatgacccaagggtgttcctcagctgctcaccttttcagaatacaggctgtgtgctcctcggccagatttccacacctttacctgccaagtgattctctcattcagtccaagagatccagttttgggaagtgaggggagtgtccattcttcccaccgaggaagggagcctctttgggggccttaaggggagtgtggcctggggagaggcagggctggccaggtgccagaagtcaggccgccctggacttgggcacatccttcccagtggctgtctgcctcttgttgctgatggactcgcgtgggtgggcacagaggtcttcacccatctcctccaggaccagtcccccctgggggctgaaggcaggcacaggcagcatgccagcatcgccagatcagtgcactgtacacattttagtctcctttcatctcagcaaaacgtgtcccaccaggcccacttctgatgatgccatcatcctgacccaagttggataatcaaattcaccagcaataaaaccctgggccgaggcagcccacgtaacgcatcttccaggcactgaggagcagcgggccacactaaccacttcctgtgccgtccgacagtgtggcccctcgaggtctgggacggtctccctgcagaaagtcccaagtgtccaaccaggccgcacagggctctggagcccaactcttcctccaggcagcccccgctgtccctttctcagtgtgacttcctgagtttgtaaatgtgaaagtaacatgaaataaaaaacacgtgccaacctgatgtgcggtgtggctcccagggaggtgccgccctgactgtgtcctgagggctggcaacagtgaggggcatgcgcccgcccgcagcgctgacgggggtgggaggcgggcagcccacgaggtgccctgtcacctgcagaggctgcagcaccatttttctatcaagttttagcaaagtcttgttggaattgtctcacgcctgatgcacagaatgattgttgttgagttgctaaggcgtatctg

SEQ ID NO: 28972 - DNA, 1086 bp, Bovine  19866880987221
  misc_feature (1)..(1): n is a, c, g, or t
ntacttcgatgtgtaacaggagccactagagattaccaacatcatcttaaattgttctccaagaaaaatgatgcatttaattataagccccctcctctttttaatcttttggctgcaccacacagcatgttcacaattaacagtgttagtcgctcagtcctgtccaactctttgtgaccccatggactggaccgccaggctcctctgtccatgggattttccaggcaagagtactggagtgagcagctgttcccctgtcaagtggaatcttgccaaccagggatcaaaaccagatctccatgttgcaggcagattatttacaatttgagccaccagggaagccctgccactcagcatgtgggatcttgtttccccaaccaggaatcaaacccatatcccctgcattggaagcgtgaactcttaccctgcgtgctcagcagataaacacatgccactccgtctggtgcccatttccaggcatcttcgtatcataagccaatagcagggctcaaagacgtggagtgggcagggcacggtggggaaggccatggcgcacacaaagatgggcacatctctggtcagactgcagggtaagaggaatgttaattagatgtgggagctgtcagatacggaagggtatgacaaccgtagttctcttaatgacaaaacccacgggtttgcctaagccttaggcgggaaaagaaagtcaacactcacagcgtgagaaagcactcagcaagccctcttatttaatctgatgagagaatgtgcttaagatcactatgaacacattctcatgaccttgagggcacagtgctaagtgacgtaagtcagagaaagacagaaactatatgacctcatttgtatatgcatctaaaaacgaacaaaaccaagttcatagacagaggacagacagggttaccagcagagagagagagagagtgtgtgtgtgtgtgtgtgcgtgtgcgtgtgcgtatgtgtgtgcatctgcttgtgtgtgtatccgtgtgtgcaatgggtggagggggtcaaaaagcacaaagctccagttataaaataagtcctggagatgcaacgcacagcatg

SEQ ID NO: 28973 - DNA, 900 bp, Bovine  19866881037688
  misc_feature (1)..(1): n is a, c, g, or t
ntaaaaaatctaacagattttttttttcctgcaaaggaaatggaaccacagaattcaaaacgaatccatctaccttgctcaataaagactctgctgttcatttactgtggtcattgattttttgcaggtaataacagaggttgagaagaagtaagcttttaaaaacgtggatgtttttgtctttcaaaaaggagcctttgctccttttctagagacaaaaaaggataaaattgcctatttcagacaaaaaaaaaagtttaacatgtatcttgtgccaaaaggataactatttcagagtaaaagtaacacttttgtgctatgaaaatgactatttcagtgtaaatatactatgttctcatgggctatgaagttagctgatgactgatttaaactatataaacatcagagtcagactgttctatttattttgtctccagttaaaaaaaaatttcaggaaagaattcacacaaccctaaccctaatcctttagcctccaaataaagtatcttaaataaatacaactatgatttagagacactggaaaatatctgagttcctccactgatttatgtctcttacatgccatgttatagagaccacttataaaaatcaactagtaatatacgtattatgcttttatccaatgatagaaaaatatgatttagtggagactaattcatccacacagtagacccattcttgacaaggtgacacagaggtttgggggctgagtgtggccagggtgtgtgagttagtcaacagcatcctaattgagcagctctgagccagagggggacggaagcactgcatgaaaagtaacacgacaggttcatgatcaattttcatctgaaatccacatgccacaaagatgttgcttctttcccaagggtggagcaaaca

SEQ ID NO: 28974 - DNA, 1096 bp, Bovine  19866881077643
  misc_feature (1)..(1): n is a, c, g, or t
nacaagaacataattccccagaactggtggtgttagaaagagacgggagagagccgtgatgtagcaggagctgttggttacccagtcccctggccgcaactataccttagactatgccaatccgacagccacctgccaaggcctgtacttcccacacctgaggattttctctagctttcaaacctcattttgctttcatctgtggcagactgaaggtctcagccaactagtccctccagcaagcagctttcaaccaatgacagataggagtcattgtgtaaatactccagtccctagctcctgagttgtatgttctacgtgggttcctatttaattttcccagaaggttaaattccagttggccacagtggcttgataatgccctcttttggatgccttccctttcttgtctctctctacccaactaccctattgatgttttctttgtctcccaaagaaacgatttgcactagaacccttgtctcaagagcctatttctgggggactgtacctaagacgtggcttagactcacgtagatactgtaggtcctggctcccagacagtagccagaggagataacgagcctccagagatgaaacactgaggattcacgagggctgtggaccatgaggcatgatcagccttgcagaatgtttgttgaagtagtgttaaattgaaaggaatcttctacactagtgaatggtctgtctcctagttgggtagatagtagctacgttttggacgtaagtaaatgactcaccagctcgaaacaagtgcttgtgtctgcaagtgtagcctggacaaagctttttatcaggatgaggtattctgttccttctgcctttatttgccctgtgttaaccatcagcatgttcaaaaacaggacaattattctgaatgtatagaagcaaatagattttaatgattattctagatgacattcatttcagatctgaaagtgttcaaaaaggggccaggagtaactttgcatttcaaatttttcttaagtcattcaaaatatgatacaatatggagtgatttccctcttaattcctttctaaaacttccattgctcattaaacctataatcaagta

SEQ ID NO: 28975 - DNA, 1039 bp, Bovine  19866881168632
  misc_feature (1)..(1): n is a, c, g, or t
ngatgaaaataagagaaaaaaacaggtcctagtaaggatccaaagtcctgataactgttttcagggttaggcagctctgccacatgttcagagctgatgactggtagatttgaggatctgaattctcctcctggttctgatgttaattatttagccataaacttccttgtggcttctttacagtgggaataaagaacccaattcccaatcttctttataggttgttgctgaagaaaatgtgataaagtgctttggaagacattattttattaacataataaatattatgttaatattaacatattaacataaatgcagtagtaaacctgactatgaatttgcatgccatcaatatatctactgcctgtttgacaaggtctcatctctaacattctatgtatgatttttttcctctaaaacttctctgtatattcccagcctgttcaaaatagaattccaagtatgtatcatctgcaggactgggcaatgctatgttgtttctgaacctaacccaaagttccaagaaccagaccatctctaaacttctttccagtttgaaaactcatctaatctaagcaacaacaatctctagccaggaacctctcctctttgcctttggactattattttagcagcttattatttactttttttaaagctcatttccccatcccagggctacgtgtctcctgacaccactaatgatggagtgctggggccagcctgggcatctcttccctgctgactgtccaagagtcagcctgtgactcacgccttgggctctccagcactggggtgctgggtggctgtcaccatcatgtttacaggatttggaaattccacctcaagctctactccaagggtgttgatcctggctagctgctttcatgaaaaacaatccaagcaccctggctcacttggggaatctggcattcttgagcttttgatactgagacagtggaaaactttatcagtatccatgctgccagtaatttttatccattgagcacttatcttttacacattacccagcaatttc

SEQ ID NO: 28976 - DNA, 1316 bp, Bovine  19866881192070
  misc_feature (1)..(1): n is a, c, g, or t
nggcctgaaggtactgtggggggcaaaattcccctcctgacgtcaggcaagaccgcatccaagccatcccaagcttttaaagaatctgtcctattcagaaagtctccaaaaacagtcctaagtctctccgtttaatgttatgaactctttatgtcaggaaatttaacttcagagcaaaactcagattcttcatagtttagttcaaaaaccatttccttgggccatcatcctccatctgagtacccttcatgtatttgaaaaccaatattaaattggctttcagctttctcttctccccaggtggaataatttcagttccagtcacttgaattcagaagaaaaaagctcgctaggaaaattcaagtcaagtaaatataagcctttcttttttaatgtaaaaagactaggagataagggggttaaaaagggaaagaaatggtttctctgctgacactatccaatctgaaattcaggctacctgaaatgaagtaaaaagttgtatattaaattttcatcactgcagaattcatcagttcctgcccgtttcccttccagggagagctggagttgacttttctttgtaggtcttacggatttcctttgtgaatttaaaagcaattgcgcgaatcaaagagatttagaagctattgagagaaacaagattccggagtgtggattccttacttttgccaaaacctcagccctctctggaacagaagttattcatctttggggaaagtcctagatccatttgaaaatctgataaatgctaagaacattttcctggaaaaatacgtgtgtgtacatccaggaactagtccctaccatttcgttgaatccctggacctcagattctaatccccaaacctattttaataggctgcattttaatcagagatgaaaatgaatcatttttcacagaactcttaatttatgagcagaaagagaaaagcgaattttttttttttttataaaagggtgaagtaaaacattcctattgaggtatgaattcctggagacataattagatatttaatttaaattgaaaatcctttttaatttctaaagtattcccaccagaaatccgtatctaatagaattttattttgaagaagagttggtattaacctcctcttacagtgcagtgaactgtgtgcaaaaactctgagtgggcaccggaatagtaaaatatcctgcctcagccctgggctggttgtgtggacctgggtccatctgtcaccttcttggtccttcttaccagtagaatactgctttcagaatctgtttcttagcttcgttttctatattttagctct

SEQ ID NO: 28977 - DNA, 1510 bp, Bovine  19866881198933
  misc_feature (1)..(1): n is a, c, g, or t
nctgaagttagcaactgatgctgtaaagtgaaaatgaaatttaaccgagcatttggtgaaggaagagtaatttatgggctctaatatgagaagccctgggagtaggcatcctgcttagcatggacacctgtgatggatgccggctctgtgcctggggctgcagtggactctttgaaatggcatagtaggggctttgcaggtgggcctcatttggttaagttacagcttttgcgaggctctgccatgtctttatagtctaccaaggagaagatggtaaatcagtgtaattgcttcatcccaaggcacttttatattataaagcaaagaggtcctgttaagaaactcaaattaacttggggtgtggatactatacggagagcctctttgaaagctgcttgtcatccagcccggtggtttatcatggaacaattccattagaacctgacacttgctctcgtggcaccaagactgaggatccctcgggaaaagcatttaacccttggctatgcaaagctgtcatttatctgtcatctctctgaacgctcactggagcatgtttacgagagagatttggagcagttgtcatttccatcgagttagaaatggagtcaagattcagtaaatagttgggaaacagtcagtgtccaggcccatcctgcagcagtgacctggccctgctggccccgttagaaaacacactcactgtggtattgtgtaattctcaaggagctcgctgtacagaattcatcagctggagtattagttaattgctagtgctgactcatttgaattgcttatcccagttctattttataggctttagaagaatttttatggttcatgcatatccaccaagggggcttagcagatcttggaagaatgaactgaaattgtcacgatctgaaaatgaacacccttctgcctgacatttactaacaaaagatgggggcaccatttgtcaaagtctgtcagtgagtaagttccctggggagccacgcaagctgagtcgaagaagtcagtctctggtgccagactgcctggcttcagacccaggcattgtcgctcgctggctatgggtattgagcctcttgtttcttcgtgggtggatggagaattctcttcgggttctaaagactatgaaatgaaataatgcatgtgaagtccttcctacagtggctgcatagagtaataaaggggaattggtattagcaaaatttaatctgggcctaatgggtctgagatgatggtacaggtcatcccaaaaggctagtttttttaaaaatatccactagctaaatttttctgtgggtgttcgttacgttctgattctcttcaattttctagtttcacaaaagctgtggtgcagaagagattatggcacagactagccctaattctcttccccttctcatagaacaggctggcagccctaaagcagagatttgtaaattttctgagttccaagatgaattaagattgagacagcctttgggtcagaaacacacaagta

SEQ ID NO: 28978 - DNA, 636 bp, Bovine  19866881208418
  misc_feature (1)..(1): n is a, c, g, or t
ngccacttgccagcctggggtgctgtgaggttgcctagaagcctcttagccccgggtgctctggtgctgggagcgatggagcagatcagccggtgcttcctggtcctgcttctttgatgtttgccccggtttcagaggaccggaagtgttcaggtttcaggcatcctgcttgcaggccgtgagctttcgtacatggcagattgagcctcattcaggtgctcctgcctgtaggcctaactccctctgcctgactcctctgtttcctcccgttggctcctggatcaccaaaagcttctcttcagtctcaccctgccacaggagcagttgaagttctgagttgagacctaaacatggatacggggggatggtttgtggggagtgtggacctgcattctgagatgggcatctctctttaagggcagcggtggccaacttaagaggcgaccagaccaacacacctcccccaaccccaccccctgtttgcttcccaggagctttcccttccattgaggagatccctgaaaacgtggtgcatgaccacgagaagaacggcctcccacgcctctcctccttcagcgaggccgagatccagaagcggtaggagtggggcaggggtgggggaggggctgggggatg

SEQ ID NO: 28979 - DNA, 805 bp, Bovine  19866881343478
  misc_feature (1)..(1): n is a, c, g, or t
ntcaattgaatgatttttcccctactgacaatgctttaataacatgtatgaggtcttatcactgtccccgttcctgtgctttcagcatctcatttgtatgcaaattctcgtggaggcaacttatttctccggtaaacggtgccagccgattgagtggctctgtaattatgttccatccctgtctaccctatttgtttcctattttatccctgccgcagcgcctgcttcatgttccagtcatgaattactgagtggctccatggcaatttttcttctgtgtgatgggatgctttacctccctccccctgatgtgtttgttacccgtttgccatcactttctaaacccgtgtgtgagacttgttccttctgcctttggattgtgtccttctgttgtttaatctagaaacctttggttctaatacagataagttgttccactaactaagttggctgcatccctcttctccctcagtttgatatatgtgctactgaaatttactactaccagtaaaatgattttgtatacatgtgtacatttggggttggtcaggaaggctgagaaatctaatgaaaatttcacgtgggacagtcatgccaggaataaacattatgcatttagatttacatatgaatacagtatgtaggcttgattttacacatatgtacaaaagtatgtgaataaagtgtgtgcgtacatgtgtgtgtgtgtgtagaaactgtatgtgccctgaaacagtaatacttggtgtttgaactctatatcaatcattgattattttgtgtgaccttgggacagtttcttaca

SEQ ID NO: 28980 - DNA, 1910 bp, Bovine  19866881427417
  misc_feature (1)..(1): n is a, c, g, or t
nctatcttttaaatttaaggctccaaatatttattttccattttaaaaggaggcatattttaatttctaatctaaggttattgtggcctactaaatatatccactaaatattttattttatttttacttctgctagatacttaatctgtataatacagctcagggaaaaaatgcagtcataaaacctgttggtataaagataagcagtttatttaatatctaattaaatgtagtcaccagagaaatcacagcttatgaaactttatcagaaaaagattaatccatttcaggcttaacccaaatgtcagaagagaactcatgaatttagataggaatccacatattaggcaaagaaattttcatattgagtagaaagaacctatattactgactatatttatacttacttcaatcaaatttatatactttgtaactatcactgatgtcaggggcaattatcatatataataacttaatagggagcctctctctatttgtcaaaaatgtctacaatgtccttaaacactttatgaatttatagatcccatccatccagaaactcagaaaattacatagactgtgtcatcctaattcaaaaataacaattcaacaaaaaacgttggactcaaacactggagaagtgagaaaggagaaaatgattccttcctttgaaaggctcatggaaaccatgagagctaaacctttaaacgagcagccacggatataaagtagtgactaccgtacagaagggactgcctgctttccccccgtctctattcatgtcttcttccagaatataaaatttttctcagggcacaagatgacccagcataaagactggacaattttctcagccttctttgactctcagagagctgggtgactaattcgggccaatggaatatgaaagaaagtggtctgcactccttccaagttgaacctctaaagggcaggacacgctccccccacatttccccttccatctgtccagtctggaaaggaacacagagcatcttggatcacatgcatgagcctaacagtcctactgatcacagaacaggataaaggagcctgagtccatgactggatatcaccaagcagaaccagcatgccatctcagatttaaaatgaaagagaaattaacttttgtcttgtttttaagctgctgtttttggaacctattataacaatgtgctctaatttatttataatagagatgcttctttttctgaggattatgttactggaaaaatgcccattaaaaggaagaaccaaaatttaatagtgtgagtaaaggagagtatgatttataactttttcatgaaaaataaaaccctgaactatggcaataaattaatcttataattagtaagacagaaatgagaagcagaattttataaattcttgggaaaatatgacaagggaggggcataatctctttttttttcccactaaggtatacaatcatgtgatacaactaatgacaaaaaatcagatactgtaagaaacagaatggaaactgtttctgaatcactgacacagagaaaaggattaagaaaaataacagtgatttcaggtgaaaaaatacagatcaaagcaattagaaagaaattaatattaatagaactgcaaaaaagaccaatctgactcaacataaggataattgaattaaaaggcaaatcaaaaccaatatgtgcaaacacttaatataaaagaaattccctgaactagacaaatgaactaatcttaaaagattgaaagaacaccctatgtttcaggaaatgctcagtactgaaacattttcattaagccacagaattttaaagaagtaattcttcaggtatttaagcagaaagaacaaaacatctataagaaataacagatgggcatatcagaggaacatatgacag

SEQ ID NO: 28981 - DNA, 728 bp, Bovine  19866881627933
  misc_feature (1)..(1): n is a, c, g, or t
naggactgactgtgctccccaggggagaagcaggcaggggaggcccccggaggcccgcaggtactcacctcgggactggagtagtggggaggcttgctgccctcgctctcgctggaactgctctctgtctccgagtcggaccccgagctgctctccgagtcgctggaggagctgctcccactgctgctgctgccgctgctgctgcccttgctcgagggtgcggaggccctgcagtcggccggctggagtccggcactgcccacccgcgaggaaagagagggaagggaagccgagtgagcaaacacggaagcgccgctgagcgggctggcgggcaccggaggcgcgcagccagcacatctgccagccgtcacctggatggagctggcagacccaccagcaaggtcacagcagcctcctggttaagacaatggggcacagaaattaaactgggagcgaaggctgctgccccctggccatcgggcaccggctggtgtgactggtctatgtgaccatttcagaaaaggaggtgacgtcgctgcaggaggactgtccctgttttgctgctgtttctgggaatggcttttcaaatgcatccccgattccaatcattgaccaaaaaagccaggaaatccaaaatgcttgaaatattttgcaaagaacgaaaaggtctgtttgctttattttaagaagtgggctgtgaaggaagggcacagtgtccttgctctgtg

SEQ ID NO: 28982 - DNA, 936 bp, Bovine  19866881648856
  misc_feature (1)..(1): n is a, c, g, or t
ncctgggttgggaagatcccctggaggagggcgtggcaacacattttagtattcttgcctggagaatccccatggacagagatcttggtgggctacagtccatggggtcgcaaagagttggacatgactaagtaactaagcacagcataagggactaaaagcaacagtgagcatgtgcagttggagcaaattatgaaccacaagatacaaaaagaccaaaaacccaactgccaattttgaggaaccgggagcaaaagcaggtcctgtgcacgcgccgtgcacacaagaccaacaaagcgggtgggcagaccacctaagtccgcctccggcgtgacccctggacccacaacttccctcctcacatttaaggaatgcgcttgcccccatcagagagcgagcaagggaaactgttactttttcctcactccttcaagctgcagcctgagccccaaggaagccttggctgaatttctcctctggcctcttatcaatttctattgattaaggagtccaagaaccctggtctggacacccagagcagagaaatcattaaaaaaaatctgactctccccctgcaaacacgtgcctctcagacccaggcacgcctccaccaacccttgcttttgcaggagcgcacgtacctgttgatgttcatgctgcaatgatttgcagacaaagtactgttggcagaggcgctcagtcgtgaggcgctctccctctctcccggggccttcttgatctccctgtaatcgtcttcgttgtcacactgtatggaaagaagcaaaaaccaatcagcttcggacttcgagggatcgcggtgagctcccatctcaccagctcgcggcttctttggacaagctcctgagcaccaacacgatggcagcactctcggccccggcctggttccccgtcagctcctcctgaataaggacgaaa

SEQ ID NO: 28983 - DNA, 1084 bp, Bovine  19866882080081
  misc_feature (1)..(1): n is a, c, g, or t
nctgggaagacccgcgctaaggggtcagagctgcctgatttcagctacaccatcaccatgcacaaacttagcagcatcaaccacttaaccaaaccaaaggattcattttgatgagattctaaaacaagaatccctaatgattccccccacttagagtcacaggaaaatgtggcaggaatgtcatcatatcatttgaatgtgtacccacttgccaattactctgggttgatgcttcctgatgtaaacaatcaactgaacataaaatccaaatcatacatttgacactttatccaagaccaaaaaagattggttatttgggcaaaaacatcagcctcatagttttcctggcaaatgtgctattactaagtggatatatatacagttgacattatgagcaagtaatggtcaggccattccaatgggcaatttactctccaggaaagcgacagagctggtgctatatgcacgctcttttccaggctactcagaatcatttagaaaattactattattattcacaaaatgctccaccaatgtgaggaattaaccctctttcccaacatgaatcaattacttgttcttcaagtaataagcatgttaaagcagaggtgagtccagagtctaaatagtaaaaaaaaaaaaaaaaaaaagttacttttcactgagtacttggtatgtcccaggcactgtgcatttgtgaacagggactaaaatccagcctcatgaagtcttcacagcaacccagatgcattatgtccctattttaaatgaagagtaagctgaggctcagaaatgaaagtcacttgccgcccataacagccatcaaaaagtctacaaacaataaactctggaacgagttggggagaaacaggagccctcctgcactgttggtgggagtgtgaattggtgcagccactgtggaggacagtttgggaggttccttaaaaaactaaaaatagaactactgcacaatccagaagtcccactcctaggcatatacccagacaaaactataatttgaaaagatacctgcacctctatattcatagcagcactgttcacaatggccaagacatggaggcaa

SEQ ID NO: 28984 - DNA, 766 bp, Bovine  19866882158955
  misc_feature (1)..(1): n is a, c, g, or t
naccctgccttgagtggaagcccccaacggcagggtctcaatccgtccgacagtgcacagagcaaataaataccaaatgaaagaatggttggatccaatttcaagggcattcaaataaaaaaccactcttacaacagcccacgtcctttctctgggtgatggtgtacagagggactcctcccacacaaccccctttgtgtataggaaactcgagtggggtgtagcactgtggtcacaatttcttggggcactcaatgacaaatcaagagactaggagcattttgactttaaaaacagacaaaataaaatggaggttccaatagaaagtcatttggagtaattgttcaaaagtacaaatgtctctctgccgtggccaacaaaaacaagtgtttactctgttttgctttttacatgaaactgtcagccaagttgaaaagcccttttcatccctggctgccacctacggggacacctgatgctgtgcatctgtgcagacgctccctcggcaaggccgaagccccgcccgaggaggctgctaggatctcgggttctcgcaaagacagggagacatgagaagctgattactattcagatcagcagccaggcctggccgtctggaactgacatcgccaggtaaataaaaggcattcactgcagatggagcacgctgtcacctcccaccgtggaaggggagacgcctgcgcccacggcatttgtagtccccatgtgggatgtgtctccagctcctcaaacgcaggggtcatgc

SEQ ID NO: 28985 - DNA, 2004 bp, Bovine  19866880352104
  misc_feature (1)..(1): n is a, c, g, or t
nttagcaaagaacttagcttctgagaaatgttacctcactgctttccatccaatgatcccaaaggatgttttcctggcacaaaacatgccagggagagagactggcatccaatgagagcaaaatgccaaagtgactttccaagggaagaattttcatggtccctttttgaactaatcctttcagggacttcaggtattaccttctcctggcctataccatggttccagagggaagatatttagatgaaaaaagggaaagcaggctatgacaccccaggcgaaaccattgagcctggctttctttgtctaagaaatgagtagtaagtatcttgcaaggtctttgcagagggacaggagaaaataaatgtgaaagcattattataaaatggtaaagtaccataaatatctgaattattttattagaaccagtttgtataaccccaaatttctgttattactcactcttcacaagtggctgaaatttaacattagttggagtgctctgtatgagtgttcacaactctaacatttgtgtaatgtcttgggttttcaggtggagtgtatatgtgtaggggtggcgtgcatcacttttcataactgattcacaccaaaatgctagctttcaagaggcagagcgatgtatgtaggcagttgttgtttcgacagtacacagttacttggatgacaagcaagctttctgcaggaacagaacactctcccgtcaccttcctccagatgaaggccagaatattccagaaataacagatggagacaagctgggacctaattgaagatctacctattgagagtagcaaatgcctgagagctccaaggtcagactttcctcgccaaccaggcagcatgcagaacccgggacatacagagcaaaagagacttacttctcactgggtggggagaatcttttccacctacatgaccccaaggggtaaagggtttatgatgaggaatataagcaggttaaggagtatgatgagaacacggccctgccaaagtgtcccagcatgtaattcttctgtggttatcggatggctcctgagatttctgagattttttttctatatcctaattcctggtatttcacaacagtattagtgctcagactctgggagcaggactctatagatcttttgaacactttggtttgtcttttacagtcttcatttttgcctttctatcctaagaatttctttatacttaccctgtatactttaacatcctaggattttgtcaatcaactccaataaagctggaaataaacttcttgtttgtaatttggctaagtaagcatggacagcccctggagaagacagtacagtcagaactctgttgagggttccccatgcagggattcaaacaaccatggatcactactgatagtatgtataaaatatagatactatgcataaaatagataactaatgagaatctactgtaggccacagggatctctacttagagctctgcggtaacctaaatgggaaagaaatcccgaagagaggggatatatgcaggcatataattgatgtagtttgctgcacagtagtaatgaacacatcactgtaaagcaactgtactccaataaaaattaattaaaaaaaaaaccatggatcaaaagtatttttttaattccaggaagttcctaaaagtaaaacttcagttgcaccagcaagtatctacacagcatttctattgaattaggtattagaactagagatgatttaaagtatacgggcggatgtgcataggttatacacaaatattacatcaccttttataagggcttgagcatctgtggattttggtatcccctgaggtcctggccacctgatgagaagaactggtcatttgggaaaagaccctgctgctgggaaagattgaaggcaggaggagaaggggacagcagaggatgagatggttggatggcatcaccaactcaatggatttgagtttgagtaaactccgggagttggtgctggacagggg

SEQ ID NO: 28986 - DNA, 1543 bp, Bovine  19866880406588
  misc_feature (1)..(1): n is a, c, g, or t
ngtcatgagcctggatactggaatgtgagacgatttcacagtgaccccctgattgtacccaaaggtgaggggtttcttgtccccacttaagggtgctgagttctgtgacagggtgtttcatgccttgtttgccatctaaatgacaacactgccatcaaggcccaggggtgacttattcttcttggagcccagactgaacgtaactcatggattagcagtttcgcagaccaagaaatagcccctttccaaagcaggagaagtttgttcagaaatatgaggtttctgttaaacccttgatagaaagctgatatttttaacctattcatttctaagatccaagatctaatcacataaaccagaaatcaaagcagcatcttcgtagcgatcatactttctgagattactgaataaagggcacacgggaccaataagaaaaagcaagaaactagatcgtcttcttaagaaacgtgaaagactgaagtttacaaatgtaggggagtctttttactattcataacattttatgttagtatttagctgaaacggagtggaagagggggtgatttggggctttcaaaataattcctctcactttttcaatagcaacactcagttttgaaaataccttcccaagatgtatgtttaggcttcctcttgcccctctccttctttcagatacactcagactatcagcggtactccctgaaacagattcagtggcctgtttcaatgaaaaggccctcctttctggatattgacgggcagagaacattctgtgagcacagcagcaaaatgcaaagctaaacaacatatgggaaagaaagaactggaatattttcttggagggcagatgactggtgtcccccttcccttagaaagatcattcatatgtttcattcaagcttgaacacattgtgtctgtaggagattagccttcttctgtttcagttattccctcatacaaagctgttttccaagcttctatcagcagccaagaccgaaaagatcctcagtaacagctaagccttggcaggttaggagaaattagaggaacacttggcaccaacacaagataaaataaaagataaacatttatagttttccaatatgaaatattttgattttgtacatgctaatatttttttttccaaattcatcccagaatatttacaagttctgaggggtaaaaacagtatcttctataatagtctttctaatgtctcataagatttaggatttaagtaaaattaaacatgaactttgcatataaatttggactttaccatgatcttaaataaatgtggcattttctccacctaaggaaacttttttaaaaaataaacttttgctttttccctcacattaaaaataaaaaagactccctcatatagacctggcttgggcatacattttactttgcctaggatgattttacctgttgacatggtaggattatttatagcatccctgttgacgctcaaaatcatcctgatttaaatcataaattatactttcagcctacttataggggaccttttaggag

SEQ ID NO: 28987 - DNA, 521 bp, Bovine  19866880492657
  misc_feature (1)..(1): n is a, c, g, or t
ntttgtttgaatgaaacatttcaaaattaaataaagaccacttagcgccactgagcccatggatgctgagtgatcaggtttattcattaagttcctgcatttcctgctgtcaatgggactgattaaaattctatatgaccgaaaagcataactattcagactgtttgagaaaatgtcaaattgtgaatgttaaattctgaaatggcaagggccaactccagacatgcaaaaccaaccgaggactaaaaggatacaaattaaaataaaataaatgctgtttgataatagagttcagaagattctgtattctctccttccctcctaaaatcagactagagaattggcgttcgccctcctgaaggattatctgtctatatgagtggctgccagcctgaaataccctgcagggtaatataaaccagaataaagcaaaacctgctcatgtgaagggaaaagaatactccacaaaatggttacaccttcccagatacatccttcagctccccaaacagcttttccat

SEQ ID NO: 28988 - DNA, 3083 bp, Bovine  19866880506148
  misc_feature (1)..(1): n is a, c, g, or t
nttgagagtctgtcctcaactcgaccagagtagctgtgcattaaatgtaaagttacacatattttacaatatatatacttttaaaataatgattgccaaaattggaaacatttgttgacaatctgtcctataccaaatgtgttacatcctagctcatttattcttcactagagccctatggcaatggcaccccactccagtactcttgcctggaaaatcccatggatggaggagcctggtgggctgctgtctatggggtcacacagagtcggacacaactgagcaagttcactttcacttttcactttcatgcattggaaaaggaaatggcaacccactccagtgttcttgcctggagaatcccagggaggggggaccctggtgggctgctgtctatggggtcgcacagagtcagacatgactggagcgatttagagccctgtgaggggcttccctatcacagctcagttggtaaagaatctgcctgcaatgcaggagacccaggttcaattcctgggtcagaaagatccgctggagaaggaataggctacccactctggtattctcgggcttcctttgtggctcagctggtaaagaatctgcctgcaatgcgggagacctgggtttgatccttggattgggaagatcccctgtagaagggaaaggctacccactccattattctgacctggagaattccatggactgtatggtccatggggtcgcaaaaagtcagacacaactgagctactttcactttcagagccctatgaggtagatctgttatccttcttataagaaaccctgggttatccatcctagattaggatggatttgctaatttgtctgttaaatgatagagtcgggactctagtcagatattatggcaaaggggagaaaatggagacatacatgaacttgagatccatctctatacaatgtcgtaggcaacagaatgagcaggtaggttcttactgagctgagaatttctcttctagaatgatgacagcaacagaagtgcttgcagacacctgacttacaaccaggagtttcacacccaaaagaaacctaccgacttggctactttggcccacgctattgtaacagtgagctaatttatagccgttgttaattataaaaccatcgcatgttaaataacaataccatagcaacagagatgaaccatgccataccaggaagaaatagactcatgcagtcaactccaggctttcactctcagaacacaggcatgttaacaatgatggatgtgtaagcaaagaggtataaatctggaggcagagactcttgaacatcaactagcaggaattgggatgatcaagtgctctgcttcgccagataccatttcacatattcactaaaatagtccatcacccgctctgtggcaatgaagttgtttaagttcctatgcctgccctgccttttttcagttgcactcagctggaaaaataatttaatttcaaggtactaaataggaatctattcttctgtatcttcctacaaaataaagacaggcattatggtatattcctgtatctatttttaaatgccatccccaaactcctttttctgagcaacacaattcttgctactttccagcagcaaaaatgactttgctaggaatatctctacaccaaaatcataaaaatttaaaataaagttatgcctcacacttcctgttgacactaatcccatagaggtcttctaagaatcattctgaatttggattctgctcagggtaaggtttgttatccattttcattgtttcctcccatttgaagagatgctgcacataaacaacattcctggcaggcccccagagaaagagctggggcttcagtctgcctaattctgaagtgtaatatcaacaagcctacttagctgtgagatctgagcttcaccctataacaccgtcttcatgggtatggactcaagcactgacatataaagattggactggcttgtaagagccaaatgtgtaaatctctgcccagtttcaaactcagtgacatcatattggcagcttgaagctgaccacggggagagaacttcaccccagaaatctataaacactaaaaatcagaccctcccctacaaatgttaaacatttactagtataccactgagtgaaaacattatatatatatatatatatatattttttttttttttcctggttccccaaccagggatcaaggtcttgtcctctgcagtgggagcacagtgtcttaaaccactagaccaccagggaagtcctggaaaacacatttaatcgtttaatctttacctatctaacccctgtgctcatctcaactgataatgaactcagtaggcggtactatctactgccctgtccccatctccagcagtctcccgaggactgtctacttcctttttctactaatcatcaggaaaaaaaagtttgtttttttcttaaagggtatctgtctagttctatatgtatcagctcaaaaagagactaaatacaaaaccttgaagaatagccaaattgtaaagcattaaaacatacaaccacttaataatttttagaaacggttcatgaaactcgtgtccttgaaatatgtaatacaagagaaaaatgctagttttcttaactttctcattcttgcctataacattttatgtgactttatactttaatgcgtagcctccttttttttttttttttataaaagctttattcacccctgaacaatctgaagctgcaattttagcagacttgacacagcggtggtggtatttcagtcacaagatctaaattacagagtacctgctcggcctgtaatgctcaaggctttcctactcggcctcctacagagctgtaacccaaagttcccatcaccttatttacaaaataataataataataacattttaattaaaatacctgcatagaaacacccactggtgttaataatcatatagttctaaggcactgaaagcaaagcttgaccaaaatacagatagttatcttactttttaccattcttctgttaagcttttgttaaaacaaggcatcaaatgttaacctgtatgcaaatgca

SEQ ID NO: 28989 - DNA, 1413 bp, Bovine  19866880568724
  misc_feature (1)..(1): n is a, c, g, or t
ntgattttgtaatttgtaattttttattctaccttcagaatttgttaaatccagagtctgtcgttagactcttgagcggacacgtggcttagaacttaccccctcacagggaatcttcccttttttttttttttttaagtaatgtatttattttaattggaggctaattactttacaatattgtagtggaatcttccctttctaatgactccatgtcaggctctcctctctgttgatctagttatggcttctcacagaaaataacaaaatgaagagaagcatcagaaactgctaaagcattttgtagctatgacacattacctcacaggcctcttacggccctgtgaaaggagacacgttacctgtaagtcttcgacgtgaagaatgttaaccattgtccaaggtcacacagccggcaggggaggagctggactcagactgtacttactgaggcgggacgtccgtgaccttgacctctgccttgtgctgccaactgagtccaacatcggatttaatgaagatatgagcatttattaagcaccgctacaactaggtgctggttcagatttttaaagctgtaatgcatatgttttgctgataagatatttgaggtttactcaaaacagtaagacccgtgcttactgaaaggtaacaaggttgaatgttttgagtgacagatgagttgagtagacgctcctcaggaaggaaaatcaccaccaaccagagtcatcagttgcatgaagggtcgagggggaagtaatatagagaaagtaggatatgggagtctgtgactgccccagacgcaaggtgctttcccagggcttcttatttatttacacagggtagaaatgtcacacaataacaagattacccccaggtttatctagaaactgcacaatcctgaaagctgaagagaaaaagctcatttcgttattatctattgtcaaaggattatgttggggtagggaatgaatctttgtccgttgctggtcatatgtaaactgctctgcacacaggtataaagtcaaaaggctttactgggatttgttgtcaatgctgttccaccccaaggcccctgacattggcttttcaccactctgtttcgtctggcccacatactccagaggatgtcccccagagtcctgacttcagacaccgtccactgacctgggtcggaacagtgatgctctgtcatcaagtcacaggcctgtgagtcacagtcctataagacgatctggtttttttttttttttttattgagattgtcctatatgtagacacgtagaggattacagacacttcaaaaacaagagaaaagaaaggccgtgtggtaaatctgctcttccgcccaggagaaacagaaccacaaggccatctgggaaccgtggggaacaaactcacactcccagattc

SEQ ID NO: 28990 - DNA, 1528 bp, Bovine  19866880599993
  misc_feature (1)..(1): n is a, c, g, or t
ncagctcagcagatgtcacaggaaaggagaagacatgaggagggatgagactcttagatgtgaaaaatcgtgaaagagagaactggggtatgaagtggcctggggagagagaaggatggtgctctccctgtctgcccgtattttcctagataagagattgattggtgttaacttagggatttgtaaggaaggagtttcagcctccaaatggaaaccagtaatatgtttctttaaaactctccttcagatgacaaataaaataataaatgagcacatgctatgtatcaggaagcatattgttttcagtgaagtataacgtagatagagatgagagctcaagtcatcaatgtgcagccctgttgatgctttttcccaaactaagcaccgtggacaatgtcactcttatccagaaacagaactacttcacctgctttgccatcttccactcattgattccctgagagtaaccactattctgacatatatcagtagaggatgatttctttgcctcgattcgttccttgtataaatggaacacgtaggatatacgctcttctgtgaggcgcatccatgtgactatctggacataggaccaggcattctcagggctgtatggcattttgcatgaataaacaacaatttactaattcagtctactgcggatgaacatgggttttttttctaggtttcaggtattatgactagtgttgttatgaaaatttttgtgcatgacttgggttggacatacataagcatttctgtgggtattggaattgtggagtcccaggaggggaattgtggagtcatgggacagaaatatttagctttagtagctgctgccatgcaattttcaggaagtagttatactgctatacattttaaagtttaataaagtccaaaactaccctacaagataggtattatcattctctctccttctctctctctctctgatgaataaacaaagactcagagagtggcccaaggctaaatagctatggtaatgacagtctgagtttaaatccaactctgtctggtgccaaagcccatgttcttcatcactaccctgaattactttgatgtcttggagagaattcatgccttcacctcccccacttcctgcagtagagcctctgctgtagaattaagatcgagggtaccaagtgtgaggggctggcctagtggtgtcgtgtcaagagggacgtagtttggttgacagtgaatctctgacgtcgttgtgcaaaaatgagcctgcaacccccttcaaagcacctgcggatagagcatgcccacatcctctgcctttgccaaggacatgggcacagtgggtgtagaacattggtggtaggggtgagaaatctgacacgtctcccaagttacagggattcctcacaggcatgggtggccatgtgaaatggaagcttctcttgatatgtcatgatagatttttaaggtctagcgttaggaatgtgttattcagaactcccagtcacaacccaaccccaaattgcttaagcaaaaaagaaaa

SEQ ID NO: 28991 - DNA, 2179 bp, Bovine  19866880608298
  misc_feature (1)..(1): n is a, c, g, or t
naacagctctccacaggaccaggggtccacagagcccaacatggtatcccacggggacccagactctctttcaagaccatattctagaccctgggggactataatttgctacccaaagagccccaagtgtgttcccagggcttgtgcaggcctcttctctggatcaattttctgaaggcaaatcatgcttgtcagtggactagccctggggactatttgtacaggtctacacagaccttggccatgtgggtggaggaacccatgtgcatttgtaccagaccccgtgataagcgatggagctgaggagggataagggccacagagccaaccagaggggctagctctgcctatgctgatattccccaaagcagaactcccaggaatctggaaatgctacatgagaacctgacttaaccgagtagtttagacaatctatttttaaggcaagaggatagaaagtatttgacttaattatttgttgatttataacttagacactctgcatgcacactcccatctgtcctcttgtcaggcaaccccacttagagtagatggcttgcctggtggcccagtggtaaagcatctgcctaccaaggcaagagactagagttcgatctctgggtggggaagatcccctggagaaggtaatggccacctgcttcaggattcttgcctgggaaatcccatggacagaggaccctggtaggctacagttcatgggctcgcaaagtgtgggatacgacttagccactatacaacaacttcgtatcagggttggtcaaaagtacctctcgataaaaggaaatgagcgataaaacaatttagagatgcagtttccctttaaagaggggtagggtggggtggggctacaaaataaagttgaggaaattctatttttccttctagacctaaccaaagccaatccaccttaactcaaatccttatcaaccatcatagcctttggtaagctccttaaggaaaatcaaataaatattttcttatcatgagataatcatcactctcataatgtgaagagatgaccacccaatatatagtattaagttcatcatagcatcaccacatcattaaaacgtaaacctcaacatcacagtccaaagaatgaaaaaagagataaagtatgtcctgtatcttccagagggcctcagggacatgtatacacccgcacatgtctgtttgcacacacactgctataagcaaaagggactcgtccccctctaagtgaccacggtgttgcttacacaggtaagtagtgagtactcctcagcacgtaccatgccagatgtattttaccaaaatgagtccccccaaaatcagagtagatatttggcactacatctttgaaacaggtccatccatccaatcccctagtgccctactttaattagctctcttcccatttctgcagaaatagttttgtcagaattcaactggacaagctcttttgtacagtagaccggaggtgaccctgatttacagcagaagatggcaaacccaatgcagttatcaccgctaagctctcttcctaacaacacggatgtgcgtacaaccagctactatgcctgtccttggcgcccaacatggtgtagtagtgggtgtcttccataaacattttagttacaccttgtgtgcccagtgaaccgagacagacgagcaaggaaaggagggcttctaaagagaagcttcaattaatcatcgagtacccttcaaaggggaaaggcctgacaaaggacagcaaggccccaggatattatttaatatactatgtggcgcttaatatttttcacataattagaccaaggagtctgtcaaaataataaattttagagctataaaggattttagagattgcctgacttaaaacattcttttttcattaaggtagaaactgatgaccaggaataagtgagttgcccaagacgagacagtttgtcctactctgggcttctgctgcctctaaacttttctccaaataccagtttcctttcgcccttcattctggatataccacctgcccttattttgctgcttaaagggaaggaatggttccactgagccatgtgttgatttacaaaccatcccaaattttgaataaactaagccagaggcctattcctcctacccccatgtaaatcacacttcctcaccaaaagaaatattt

SEQ ID NO: 28992 - DNA, 1112 bp, Bovine  19866880609414
  misc_feature (1)..(1): n is a, c, g, or t
ntctacagctaggcctgtgtgcagcctgagaatgtgtgggtcagtactttgaggccgcgtgtcacagctgctcagcagtgtgacacatctgctgttggctgggattctgtcagatgcagagatatacacggcgggtcacttacattgccacttcatacctttattactgcctttgctaaaagctgcttaactgccagaagacatctgcccattatggaagcaataaattgagatgtcacaaaattatgagaaacaggtgcttcaaaatacaacacaaggggattgtcatagacttttctttttttttttttctttttagcatctctggtttcatgtgtcttttcacagatagatgaatccttccttgctccagtctgataaaaggaaaggaaaattaaccttattgagagagattattaatatatgcctgctctgtattcttaatatatactgggccatttaaccctcacatccattctgcaagctgcataatctcaacctcattttctcaatgaagaaaataaggaaggccccaagtcattcattcagaggcatccattgagtacagtatgccagtgacttcatggatcactagagatacgagaattgatcgtaatatatttttcataaacatatcaataatgcaaggagaaatattatgcaccgtgttagagattgggcgacacttgtgctgaggcttggtggtgtagcaggaatctcctaggaagattaggcagggtaagtattctaggcagaaggaacatatatgtagggatgacttctggaaacagtacattttcctcatggatgaaatctaagacttagggagtgaagagaagggatttgaggggatgttttagaaggtgtggctgaaggagtggcaagaccagttgtaaagtagcttgttttgttctcctcacaaatttggaccttacattatagtgggcatgccatttttagcaatcagataactaagacctggagaaaaaaatggcaacccattccagtattcttgcctgtgaaattgcatggacacaggagcctggcaggctgcagtccaccaggtcacaaaagagttggacacaacttagcaactaaacaacaaagtcaga

SEQ ID NO: 28993 - DNA, 2486 bp, Bovine  19866880616023
  misc_feature (1)..(1): n is a, c, g, or t
naaaaacatctacttctgcttattgattatgctaaagcctttgactgtgtggatcacaacaaattatggaaaattcttaaagagatgggaataccagatcaccttacctttcttctgagaaacctgtatgcaggttaagaagcaacagttagaaccagacttggaacaacagactggttcaaaatgaggaaaggagtacataaaggctgtatactgtcaccctgcttatttaacttatatgcagagtatatcatgtaaaatgccaagctgaatgaatcacaagctggaatcaagactgccaggagaaacatcaacaaccttagacatgcagattataccattctaatggcataaggggcttctttggtggcttagatggtaaagcatctgcctgcaaagtgggagacctgggttcgattcctggcttgggaagatcccctggggaaggaaatggcaatccactccagcactcttgtctggaaaatcccatggacagaggagcctgataggctacagtccatggggtcgcaaagagtaggacacgactgagtgacttcattttcactttcactggcagaaaacaaagtggactaaagagccttttggtaagggtaaaagaggagagtgaaaaggctggcttaaaactcaacattcagaaaactaagatcatggaatctggtcccatcacttcaaggcaaaagaaggcgtaaaagtagaaacagtgattttattttcttgggctcaaaaatcactgtggatggtgacagcagtcatccaattaaaagacacttgttcctcaaaaggaaagctatgacaaatctaggcaccatattaaaaagcagagacacccttttgccgataaaagttcatatagtcaaggctatgatttttttccacatggatgtgagagttggacaataaagaaggctgagtgctgaagaattgatgcctttgaactgtggtgttggggaagactcttgacagtcccctggactgcagggagatcaaaccagtccatcctaaaggaaatcaaccttgactattcatttgaaggactattgctgaagctgaagctccaatactttggctacctgatgtgaagagctgactccctggaaaagaccctgatgctgggaaagaaagagggcaggagaagaaggtggcaacagaggatgagatggctggatggcatcactgtctccatggacatgagtctgagcaaactctgggagacagagaagggcagggaagcctcgcgtgctgcagtccatggggtcacaacgagtcagacacaacttagcggctaaagaacaagaaaacctgtacagacacatgacttttgctcatccatcctttctctttccacctctactctcaacatagacttgactggtggatttccacaagaggcttcatattacagtagctggagaaactgagttgcttgtgaaatatgattcatgaaagcctgagaaatgagacaaggggagcagagacagtcagctggagatgaggtggctgtcagcaacagcctgccactacatgtggtaagactaagagtgagccactatcacatttaaaatgggtaaccaacaaggacctcctgtacagcacatggaactctactcaaggttatgtggcagcctaaatgggaggggagcctggggaaaagaggatacatgtgtatgtacgggctgaggccctttgctgttcacctgaaattatcacagaatggtttgttcatcggctataccctaaaacaaaataaaaagtttgttgtttttttttttaaatgagtgagccactattttcagatccagaaaggaagacttcaggagtagggagaattcaactaagcaaatatcagagcagttatctttcctttaccatgttgctgatggagataaaaaatgtgctagccttagctggtgtcagtctgagaccctcggaggccatatgaaaacaatattcaaataccactgggccccagcaggaagctccagacaaggggctggcagagaagattgaaatctgaaaggcacagggctttctttccctggaggaaaaaaagagagggggcatgctaatcccacagatttcatgaggtttctgatttactagtctctcagatggctctgtgggggtttgtcattttgatgagaaagtcttgttgtaaaggttaaacatgctaagcagcatgaagtgatctctaagaaagattatatcttcttgccagggagacagctgcccaatagcccacagaagggggcctttaaagagctgcacacccagggttttggccccaagtcccagttgcacttgtcacttcaaaactctcactgttgagctggatttatttgtcatatggggtaatgtggattggttgatgaaagaagagaaatgtacatgccttttctctccatatttctttcctccaaatcaattgccaacattctaaataaatttagcaacaggaataagacgga

SEQ ID NO: 28994 - DNA, 1611 bp, Bovine  19866880650534
  misc_feature (1)..(1): n is a, c, g, or t
naaatatggatctatgggcttcagatcgagcagacgattgacttctctccctggaggatttgaatgggtaaaggagagaaggtccatgtgtcattccaaatgactgccttctggagagtcccttctgaaggcatgggacaggaaaatggagttccctctataagagagagtgtgttgttgtgttcaatgatggtctgacccacaattaaaatgagaagccggtagtgaaagaagtgtagatacagtttaactcatgtagatctggtggttatgggaagtataaggcacaacatatcacataaattattatcagtgggcggccagcagggagatgcaacacaattgcttcaggccagggcccctcagtcatctcattctctcttggcagcgtctccaggattcctctttacctctctaggccttagtccatccactggacctgctgatgcaatgcactcacgagctgaagctctcctctgcaggttctccatccccatgccccaggaatatgactcataaggctcctgcctgcagcttgagcctcatgcacctgctactctacccacactgaatttctcaccatcccctgggcaccccatgcttttctaatgatcctaccagtgaatgcattgtttcttttaagtagaacgtcatcccttcttttgtatggtgaactcttactcatacgtcaagacccgtatcacctcttaaacgtttacgacacttgtaatcacttttttatatgtgcattatcaacaacaacagcgatagctaatgtatctagtgtgggacctgggccaggagctttatctgattcatgtctcgcagtgaatctgtgaaatatgtactgtggtttttctcattctgtagactaggaaagtaggaattagagaagttaagtagtaagctgaggttccacagagttaggtaaattccagggttggctataaaacccaggtctgtccatttcaaagccttatttttaaattccatgttatcaagtccacggttcccctgcactgtgagctacaggagggtgccctgagtaatgtgagtccatggcaggtctggcattctagtttcttcagctttataatttctcttcttcagtaaaatggaggtgaattattcctactcacatggtacctcacctgatgcataataggtacctggaaatacttattccttgaatgaataaacagaaatttaacttttattataatacaattgagagccatgcggtcttcaggatgctgttagctttctagtgatttcagtacagcgtgattttctaggccattcttttgggaagaagatttctgcttttccctcattttttgcagatatggtcctctcatagcccaaccgctaacttgggtgtctacacatagcttgtaagaagcccttaggggtggaagttgttctgtatgttggatgcttagcaggttgcatggaaaacagccccgtgtgtgaacagactcacacccatccaccttaacttattcctttgccagcaaatgactcagacgggcattttccctcagggtgactttaaaatggagtggagatgtagcccctatagtaacgagtagaacggttgtggaatcgtgg

SEQ ID NO: 28995 - DNA, 1155 bp, Bovine  19866880662761
  misc_feature (1)..(1): n is a, c, g, or t
naacatttgccaagtacttaagagttaggcttggcaagcgctcatcaacatcagaggttagagaagtgcttcatggtgggtcatacagagtggatactcatgccctgaaagtccgtgccaagaagtcacaggtaatgagcagtgaaaacaaagcaacaaaccctccaggttggaggagagacagcgggtaggcagctggcagccagcagcaaaaatgaccttactgactcaaggacaccctagtcaagtgggtgaagagcaaagaggaatcagaaagccttaataagaggatctcacttctttactaagaaagaggatgcttttggcccaagtcagtagagaccaattcaacctctctcgtgcactagctgtggcctcaagccatgccccagccaactggctctctgaagctcacatatcactagactctgtccttggagaaacaacaaaaaggcctccctcatgagtgttcagcaccaccacaatcccaccgtgaacactgtatcctttcatcattttggagggtcttgtaagctgttaaccaagtccaacatcgtgtacggatcccaggaagaatcccgactttggattcaccttatagcccacaaaatgaggctgtaatttttatggacacatttaattctttttcacaagagcaccaggagagatagggaagtggttgatatcgtgcattgccctcaccatgactagacaactcaaaattctttccttctcaatagtaagccctgctcatgcataatgatatgaacaacatccccattaggaacaggttgtgtctgaagggttctcatgtatgccctttgaaaaagatagggtcaatcctcctcggtaaaaggaaaggtgttaattatttaattaaacaaagtagttattgactttttagaagcaataggcaaattttccataaaaaaagagactcttttaagtatatatttctctagttcctgaagataaaatagctgaaaatttaaccccagagtgaaaaatacaggtgtttatgaaagaggtaatgtgcaagtagaacctagaatttcttcctacagttttgacttggcctttgaaaagtatctcaattcaatttctatgatagtatgaatcccagggtttcacaaacaggggaggatttcaggaagt

SEQ ID NO: 28996 - DNA, 1640 bp, Bovine  19866880713931
  misc_feature (1)..(1): n is a, c, g, or t
natatattagactatgaaactcacattatcagtttatgttcagagatgtcaccaataattcaagaatgtgttttttcaatgcatattttaagctacttactgattcttaacagaaacaagcagcaactggtcacagtaatacaccaagttcagtttaaatatttcaagaaaatgggttgagagatttttccgacctttgatacacctttcattttgtttggggagaagtgtaatacacacacacacaccacacaagcacaagtatttgaggactgagatttatttttggacagattcaagccaaagtactgactcgcatttcaataatggatctgccggcatttgcaagaaacagtcattagcttatctttaagtaaatattttgattgtcagacagttcattgcaaacaaggttcttttccaaacactcgctcttgatgcatccaagcccgcttgcacatcattcattcaggaatctgcgtctgtgctaaaatataaaatcatcctaaggaagtccaagtacagacaaaaagcatgttttgcaggcttttcatttaaaagggctcccgagcatgtgggacctggttctctttcagttctctgttctttgctgtgccacattaccataaagctgaggaaatgagctattacacaccatcatccctcctaacggctatcacagaaaatcatacactcacaaaacactattaattgtcagaattagcaaccatttaaaaggcagctgttctttcactcttaaacaggctccaaatttcagatctctctccctgtattggctgctattacacgcttacacatgcacacatacacaggcactcacaatggattcttagacaaatgaatttttttaatgccctatattcaaaggatccaagaaaatattgtttactcagtgacattttccacaccagtgcttgccaatattggtccaactagctggaaagcttccaacctgcacagaagcacatgtcacagctccaggtaaaaggagctgttctgtgcagcgttgggggagaaaaaaagagcagtatctctttaagagtcaatagtaaattaacttgcccaaaagagtgaaataattagcagttagtagcttattaaaagggtggcaaaggccaagctgccatctgggatctccagttccttgtgattgttattatgtcaggatgggcaagttgcattagctttcatgtcaccgcgcctgcccttactttatatgtaaattttaatgaaagatgtggcacttctaaaaatcagacgtccatcaaaaagtgctattagtctggctttttacaaagcatatggtcttttctacctctgctgttctattcaccactaaatgccttaggaaaaaaaagagaaaaaccccaatgatatcaattagattttctctttgtgcagagggaaacctgcgtatcatcaaaaacagggcaaagctccacctcaccagagggcaaggtttctgcctctatttacacacagggaaaaccacaatacctccttgtcttgcaagggtaacccttgttaatggaaattaaagcacctggagactgcctgctgatcactacatggatacatagttttaaagggagtatggagaataaaatttattcattaaa

SEQ ID NO: 28997 - DNA, 1122 bp, Bovine  19866880716946
  misc_feature (1)..(1): n is a, c, g, or t
ntggccaaagtatttgagcttcagcatcagtccttccaatgaatattcaggactgattttctttaggattgactggtttggtctccttgcaagtccaagggactctccaacagtcttctccaacgccacagttcaaaagcatcaattctttcatggtcagctttctttctttatgaaagttattataaaaaattgtgtagtccaaaaagaggttactatttcatcttagtgcaattccactccatgaattttgtttcgtatcattgaaacatttaagttgaaattagaataagctaataagtagaatgataaaacttttcaaaaatctttgtggagtgctaggttatgttctcatggtttatttttataacagtctctcagttagatattatttccccagcaagtaggcgttatttattgctccatttataacaatgatgaaaactgagatacaagaattgagatgtctggtccgtaagccacagagctagaaagtagaaggttgtgaatcaaatccaggtttgtctcttaggagcccatgctcttaatgtctataccatattgtttttccacatgctgaggtacagaacagaactttggtctcaccaccttcccagagagggaccccagacaaagtccagagaagatatagatggccaggtactccgactgtggggatgctagctagttgctataagaggatacttggcaaacacatcacacccagatggtgtgcagcccacacatctctatttacgtcgggccccgagtgtttgtgttaacaggtttgagggataataaaagaagttgttgtttgttctgtctttacaagtctgcaattaatttttagcataaaatcaaaagggaagaatttgtaaattcactagacactgaaagactggcgcatccaagaaaacatttgttgagtttaaaaaggagagccagtgcaagagcagttgtttttcatttttcccactaggtggtgctttagtcctgtgggtcaaatgtaatgagcttggctttctttgctttatttttcctttccttttttttctttttccctcctagatgtctgttggtccaggaaaatagcccaacacaaggctgattaagggggattgt

SEQ ID NO: 28998 - DNA, 1514 bp, Bovine  19866880824573
  misc_feature (1)..(1): n is a, c, g, or t
naattattgttgttataataattttgatgtcattatgacagatctatcaattaatatttattgagtagctgggcaatggagattgagtggtaagacaagacacatttcctgattcatggtggttttttctttttaagtcagaaaagacccaggaccctggccccagtgccctcccaactcagtctaggatgcttagctgcacagctggcacctcctttattcagatatcactttaaatatcccttccctggagaggaattcccccaactagagtaggctactttctgatttctgcaggtcggggtgcagagataagaccggtgtgactataaacctgaggagattgggaacctggttaaaggaattaggagaaaaataaccttctttcatagctatgactttgaaagccaatataactccttagaaaactatttttctttccagttaaatcatgcttggttcttccatcagagataggtataacatctaaatccattgatttgtaatatgaatttcctcctgtaattagttctctttgctccagcaccccctgagaaaatccaaaatgcaggacaaacattattctaataaaacttcatcaagtagtataattaaaaaaatatcatacagcaatgtacagcaagttattaagtgtattgactcaggtagtaactgggaatttgtggttaatattagtctgcagatccatttgtcttctgaaatacctttgatatggagcttctttgcttggctgtgtgtttgagatcttggggtgtactttctctgtgactagcatcctgggctaccagacctttggagcatccagggaagtgctctctgccctcagctgtctgcttctgcatcctgggtgctgccgtctctccattcctgtctaagcagtagatgtatgtacccatctagggtgcatgcatcgcttaaattctctctggtgtctctacggaggaagacagtactttttgtaggcgatcatatttttcctttctctgttgctattcccgtgctgtctagagaaacactctccgtaccactgggtcctcttttccccagttaatcatagaagatattctgctcactcatcctctacatttcacacatctctaaagctccattctatttacactggttatagaagtaaatgtgaagaccgaggggatagattgtgtttgcatagaaatttacttacatgctaagaatgcaatgaaaatctttaatgtaaagctcactgtatatttgagtgcaatgtatacttatttcccaaaatatatttagtaactttcccattatgaatcaccaagccttatgcttccccaaagaaggaagcgtggtttctcaaaaatacagtattgtttttagaatgaaaatttaatatgcttcataaccaattcagatcagctttgaaattcggcactacctcagccttgaccagctttaaaatgcaaatgccacccataaggaacaaatgtcttttcaattataaaacttaatttcaagat

SEQ ID NO: 28999 - DNA, 939 bp, Bovine  19866880839126
  misc_feature (1)..(1): n is a, c, g, or t
ntctcaaaggaatttctcatttcaaggccgaggtaagtgaaaagttatttcgtagttgttattcagttggtaagccacgtccggactctttgtgacccccatggactacagcatgccaggcttccctatgagccatgctgtgcaggccacccacgatggatgggtcatgggggagagacctccactggagaagggaaacaccaaacccacttccagtgttcttgccttgagaaccccataaacagtatgaaaagcggtcctgcagaaaaacaattccatgaagttctgaacaaaggcaaagaatgaaacacaacaattttacctacataagtgacagtttcactatttgcgaaacaataacatgtagaatgtgaatgatacttattttttgcgcacgattactaaagcataagaaaaagtgatctgtgaagatgctagcatcccaaatcacatgacttcaggacatgtggtgaatatgctgatattcacccatgaaaactctgctaaaactgcaaataactgaaaatgttagtgtcctgtccatttgcaatgagaactgaggcttgctttacctgctttccaataatttcttggtatatatcgaaaagcagaagtctaagccttattaacagctttagccacaaaagtaggtcacctaccctggcaaatggtttagaggaaaaataattgtttttactttttttttttttttctatagaaagttatcaggccacttggtaaagttatcagcctattcgagtacaatgtcatgtatatttttcagttttcattgcattaaagttcccaaaccaagaattattcttcaatatgtgatttctggttgtaagaataggtgaaatgctttaaatatttgctaagcatttgaggatattcaataaaaccccatagatgactgaagtagcattatttcatcgttgt

SEQ ID NO: 29000 - DNA, 1376 bp, Bovine  19866880844773
  misc_feature (1)..(1): n is a, c, g, or t
nggagcggagagcctctttatatgtcaccagctattgcatgccattgctgctttctttcttgtccttttcattttccttcaccagcatggttctcagatttattaacagccttttcatgacttctgcagccatcaggatgagcaataaagagaatccagtcttctcatgcttgcccctcctcactgtgttggcttatcttttgtttcccctctgttttttcttttaaagaaagttatgtgttgctgctctgcatcaggctagagtctctttgcccctccttcattctctttcgccgcttttaattgttttggtgcttttgtttttccctggacttgagcgcaatgggaaaggtcagctgtcagaagaggggctgaacacggctgataaggctttcaggagattgcagggaagtcattcagcagtgttccctccctgaagtcctagagtctccactgatgcagggggaaaagaaaaggaagctcagagtagcagaggtaacccacatcgagggcgtggcttagccatgtgagctctgggcagagcgctgcttacccagagccctgcttacccagagcccttttccagggaaaggcgttgcccagtgccagccttggggactctgggacatgaatgtaatgtgtatctggatgtgccacatgtgcaggaggccttggagaaagaactcaagtaagaactaggcatccagcatcttagagatcaaacttctggagttggcccttcagttactgtgttcacgtgtccaccccgttgttattttgcaactaactcacttacataaaaaccagaaagcctgggttttggtcttgcctcaactgctaattcatttggacaaatgctgagctgtgctaggcttgtataaagaagtagaaaatgattttcaaagtaccttccatcactaatggctaaatttcactttaccaactctacctgcaaggcatcagtgagacgcatatccttcaccggacatggatatgaaaacgtgttaattcctttttccctcagtgccttgaggtaaaccctaaatcatggttcttgggattcgtccgtgtagcctgtccattacgatattcatggtgagcatttaaggaaatggtacacatcttctgcaatggaaaaaaagagaataaattatatgaatagtaatatcatcaggttgcaataattctctgtgttttttcaaaacctggtcacagttcaggatgacccagtttgaggatactctccactttagcctcccctagaaatgtgatagggctcttctgttttcactcttaacctcccacatgactagtgctctcaaaatgtggtgtctgaatggaggctaaggatcaagtgagtacttacaggcttcagg

SEQ ID NO: 29001 - DNA, 1043 bp, Bovine  19866880853746
  misc_feature (1)..(1): n is a, c, g, or t
nttgctagaatttgcagttgggctttttgctgctgcttctcttagtgttctgccaagacgcacaaactaatgacagctgccattcgagggtgcggaactttccatatttatagcttaaaatataagcacatttcccaagcatacacaatagggaaagcaactaactattcagtggttccaccagatgcttttaactgtgtgattcttcagttttctatattcttgtctcctcacttattgtcaagcagaatgaatgtagaggcttctttttgccttacagtcctctttgacttagaggcattgggatatagactatgattttccttgcccttctttctctccattcttccccatcctcctaaaatatatatactgactttgtgccaggcactggaacagaccttgggaaacacaggaaaaacaccaggtcttccacctgagaaactcccagtctactggggatagacagacagttacagcacagcatgataaattctataatagcagaagatggagctatgggagcagagggaagggaatcagctgtgggtggaagtggaatgggcaagaatgttgggaaaggcttctgaagtaggtgatactctaactgtgcctctcatgtgagcagtagttattcagatggagaatctaggtgaggcttatgccaggggattgtttattggaagaaccacagaactttggcaaggttggtgatgatgaagatggactatgatcaggaagactttaatgcttagaagtctgcatttgattctgaagttggtacagaagaaccattgaagagtttcaagcaggaaaggacattttatccccagagaaaacagtaagatgatcagagttatttctagtccttggaataaaaataacagtagattcctagtgattcaggaaggcacattttaaattttgtcacctttctaatcaaactgctaaaggcttcctttctaccctaatggttccttttcccccaactgcataatgactgtatttttagagcttttcataatgaagtaccacctactcat

SEQ ID NO: 29002 - DNA, 2306 bp, Bovine  19866880910045
  misc_feature (1)..(1): n is a, c, g, or t
nttatttgttttatgaaaattctaagctagagagagaacctagacccaaggattcaatatccatctcccagcccatagcaaatatgagtaactaaaaaagggagaatgcaaccattctgcaaagggcaagaaataccaagctagaatatcaggctaatggtgaggtttcaggccctgtggcagtagaatagagcttccctgagggactggtggaggtaacaagatatgatcttctttgtcttacctctttccagaaagaggctgactcctcactggtcattttctttcttcttcttagagacacaccctgagctatatgactacacaggagctggcaaaacacaaagaaaacttatttctttgttttgccagtgaatttatcagtttgtttgattttctgttcactgctttgtattttattaggccttagggtgcctcagtaaattaagatgatatagtcgaaatgtatgattaaaagactgagcaacaataataacagcataatcatactgtgcattcatatcctactcagcatctgttatatcatttactcacacaaaatcagcagcactgcaaaacaggaaagacagaatgtagcaatccagatttaccagcaggaaagctgaaacagaaaggctaggtggtttgcctggggccacacagcaagttattagaactttactcagatcctgcaattcccaagccagcctgctcttcacagtagttcagtctctgagctcaggcaggctatggagatgagtggtaccatgtggtaccatctgcttctgcctccctggagctgtgatttcagcaccatggacagaggcgcccaggctgggagctattctttaatggcatacaatgctagtttccaaagttcacaaactgaattctggaatgttgaaccatgtcatgcaccacaggaatattgcatgggtgcctaaaagtgatggcaataataatcacttagaaacaagtcagagtctgtaacagagatctttaaaggcttacctaggttgaagcaaatgcaacctttaaacagagcagctactcattcctcataaagcctgaaattaattaataatcagtaacatttaccctagtatccaaataccaaacttcctccaattaagtaactctgttttccctcttcacaacccaaactatcaaatgtgaaaataatagcaatatcaataatgtctacagagttatttttttatgtcagggcatgggctaggcacctaaatactatgtcaccatttgatccttttagtggtatgcatgaaatatatctaggatatagaggctgtaaggaaagtatttgggaaaataaagatgctagattgaaagacagaccaagtctggagtcacacagtcctgcttcaagtcccagatctgcctttcactagctgtgtgatcttggacacttgtttcattgtcctgagtctaagcctctgcctacgtaaaattagagaatcatactctcttcatagggtctctttatgtgcataaataatatgcataacacccagagcactaagctgggcacatagtaactattcaacagacactactgtataagttctttccctctttctatcttgtatgtgtacctttggtttatctttagactcctcttcccagggattacctccaactccttgagttggtatcaagataaaaataaaatttgggaaaggggagagagtatgttaaatgaaattcagctcacagatctgaagagagtaggacttgtattgagttaaaaaatgataatgcctctaatgggagtctctgagggtataaggaagggaaagacagtgggtgcaatgtgtatgatggttataagtcagttatatatacactgtcaaacctaccgtgtctgaccacagactagcaatggaaacagagactataacaaagctataagccagtgaacatcattcctgcctttgcctcccactcatatcattttcaatgtaacttcacaacctaagcagggaaggggctaaaaatgaggacttttttttttttttttttgccagaaccataggcacaacttccaacattcacccatatctgcaaacctcaactcatcttcaccgacccttcctaatataagctttagaatctactgtcccattgagaagaagagattcttccaaacaaaactgatgcaagaaggaaatatctctggagaaatggaatctaaaagagctttagctgttgcatccattctttccaccaccactcactgatcatcacaagaaatagttaaaaggtctacccacacatcaaaaaatttg

SEQ ID NO: 29003 - DNA, 869 bp, Bovine  19866880929104
  misc_feature (1)..(1): n is a, c, g, or t
nttcaggtttcctgcaagcttttggaagaaggggatcataaccaaagaacacgagtgagtacagtgtactctgtacacacaggaatttaataagtgtgccccgattcttcacttactggtcacttatgtgtgttgggtgctgtcatttctgaaacatgcaactggaagaaacacagcttctgccttctaagaatttatttctaagtagaacaactccagggtatggttgctaaaaggtcagaagccaggtagcctctgccatgttcctggaaccacacacctgactgcgggagctgtcattccgtaactttctccgcactctgcactgctctgcagcgccgcggggatgcttgtctccatattcatctggacacccttgcggtttgcttgccaccctcctcccccgccctgtgcagttggtcactgcctccctgatggatgggctgcggccacatttggtgttgcttggatgaggtgatggatgcctctctccggctgcttggagccagaacacagaagtgctggttagaaggtgattaatcttccctaatggtgccgtgcacagcaaaccgggtttcggcccccgtgtcttcattagccttgatcagagtctacattacctcagattaggtaatcggttatttgttatcaagccgaggatacgggcttttggagaaaatgccaattgcatgaagtctaggaaaggaaagggaaaagagtgggacccctgttgcttaggggtccatagggcagaatgaaagctggtgtgtggtccccaccaccactttgctcagcactccagtggatgcagggccgcaggaagctctgatgcagtcagcgtggacccccaggaacgacctcggccattt

SEQ ID NO: 29004 - DNA, 1527 bp, Bovine  19866880948659
  misc_feature (1)..(1): n is a, c, g, or t
ntacccttcaaatttgtctcccaaatttacctgccccaccaactgccacacagcagccagagccatactttaagataaatactacattaatgtattgccttttttgaaactttctaataacttactctcctgaaagttctgcactgcccagctcccacacactccatcttcatctcctgtcttcccatttgcttccttctctccagacacactaatctccttgacatccctctaacacatcactctgacctcagggcctttgcacgggcaccttgcttcagactgaatgcccccccttagatatatacacaggttgatcatttcttttattttgccctttactcaaagccacctcctaaaagatgcctgcttaagcatcttatctaaaatatatatgtgcttcctcctatcctatcactctgtaaccctgtaccatgagtcagttacctttacaccgactatcgtgagtttatattatttgatacggtatcataaatactgtttgttctttcctacttacatgaagctccccaagggcagatatttttgtctacttatgcaccccatgtacctggaactgggacaacatagatgctccctcagcatttgttagcaagtgaatgaatgcatgaacgtaaaacctctgacaaagcaaagggtaaagacacgttacaatggtgacgcgtttgcaaatactgtctgacagcctgcttatattaccattattattattaaaagtaagaaaatgcatgcaagatgtgtgcaatagctacagattaactgtaggctccttgtgactcctgggacaagttagacatcacaagttcattcaacttaaatatatcagatatagattaatgtgctagatccttcatcccttcttctcttgtcccctgtgtccttccttcttccacttttttgcttgcttccctgctcgcctgctgttttgtcttctcgccttctttccaccacatgtattcttctttcttcctctgccatcttcccgtagggacctcccagcttggctgagcatcactccatgctcacccctcatgctgtctctctgggggagatggctgcacctgcctggactggacccagagttatgtttgagtggatgaaggcagtgagaaaagatggagagaactagactcctttacagttccttccatctatggcacaaaactgtggatcaacgggctaattgaaaagtcttctccatgcacttttcatccccctgaaacgcccaccagtgactcccccgctgccagtcaacacctcagtcaaccatgactctcttccactgcagaaacctggaaatcatttacatctgtacgtgtgttccctctcatctgtcatttcccaaacaccagtcatttatactgcagtaaacagtacattagccaccagacagttcctaatctgtcatcccttttgttagatccactctatctgttcaacagaggagctgcttaaagagacttccccttgctaatgaagagtcagacttctaaccttgttcaccat

SEQ ID NO: 29005 - DNA, 1097 bp, Bovine  19866880993781
  misc_feature (1)..(1): n is a, c, g, or t
ntgaaggattttgtaagtaattccaaggttcatttaggaaaatgaacacaaaggtattcatgctttgtcaatatgtagtattgagctaagagttcgatataaaaagaaacatttgcttacccagagaaaccaccatcaaaatcttggcataagaaaaatggactttgctagtattgactattcattctttccttgtgaaatgtctgaatgtgctcattttcatactttaagtcatcatcaattacagagttgcaggcgcttttcttgtgggctacctccagcagctgtcagtgaaaccgagcagctgctcggtagatagtgaagaggttccctcctcgcacgtcctcctgttttcgtctcctggcacaggtggaggtatttatgcgcagggaaggaaatgaagggcatgcatccagtttcctttctctctgtcgtcttcgaaagcgctgcattttggacagtcctcaaagcatgacacagaggcggctaggtacagatgcatgcgcagtgtcatatttatctgccggttgcttccttctggcagttccttggcaggagaaatcaaattcttttctctaaacatcatcaccaactcttttcttttgttgtgcagtcgctaagtcgtgtccaactctttgcaccccatggactgcagcacaccaggctcctctgtcctccactgtctcctggagtttgctctaattcctgtccattacaattttattttctctttgctaaatgtttgggcattatagattctgagagcgatggttgcttttatggttcaaagactggaaatattttcttccttgacatttgatggttgacgtggggaagtggtgataactaggtggaactggacaagaaattaggatattgtaattctcattagtaataacttttcctgaaacattttgtaatacttgaacatggaataccctgtaggttgggaacctaattttatagtgctctgcttttggagcgtcttgtttgatctatttatcagtttttacttttcaatgcttattaatgttgaggtattttaacgtagacctaaaacttttaattctagagttaaaagcccctaccacagagat

SEQ ID NO: 29006 - DNA, 945 bp, Bovine  19866881014136
  misc_feature (1)..(1): n is a, c, g, or t
nctcacaaggcagaaatatcctgatgggcatatctttgacacatagtgataatttgaattgattttagtagtatcccatttagaaagattgaaaagacaaatgtagctgtatgtgtggtaaagaatgtgcagtttgtattttgaaatatctttaaaatcacaaggatgtagatgataccattaactcactgctgaaatcctctcagttgaacaaagaccagtatttgctgtgttctgggatacattccatgtgtgatttaaggtggcaaagctaagcctcaggttgatagcccatctctacattgtgagtcaaagagctgtccatggtactgaatgacttgagccttgatgagaatggacacaggatgcaaaggaaaatgactggaatcccttgacctgtcctgaaataatggcactgaactaatatagtaataaaggcactgggataatgggatcccatgggatttagcaaaataagagtagagacagttggtaaagagtagcctatagttcaaagtccaggaacatctaagtttcaggttcagctgtacaatttgagccctgtggtttatctcgaggcagtaattgtcaaagatagttttgaataatcgtacccaatgcaactgcattatctgaggtgatgagtttgcctctccttttaaggcaagcagttttgggcttgatcattacttcaattaccaaatcaaaagacaaagccaggtgctgaggtaccgagactgtggctccttgcctattcttttctctccccttctctccttacctcacctcccttccctttctcccttcttttcgctctcccttctacccctcccatcctttcccactgtcttcctttctctcttcctttcttcctttcttcatctgtctgctggtctctgtctgactctctttgaatattgactcttaagtcaatattcaaacttg

SEQ ID NO: 29007 - DNA, 949 bp, Bovine  19866881017397
  misc_feature (1)..(1): n is a, c, g, or t
ngagaccttgtgtaattttacgtaattaacaagacattagtaaacagggccatccattcagctatagtctaaatgcctactcaaaggacaaaaaagaaatctaatatctggatcacttaaaaactagactggatatacgacttctaaagtcctggactaagtaaattcatacccctaagaagtccaaaaccgtggaaacaaggatcctggagtgttagatgaaatgtgcttcaaaagactcaacaatttcgccatgaattcttgcaattccattacaaatgtgggagggatagatggaatggtcccaggaaagcctaaaataaaagggcctttccacagatgaggtcaatgaaatccagattctggcctttgagactcaatcgctgcccagctctaacaccgtgaatcacagctattcacacagtgggttttcaccttcttcaatcaacagcagacccagcatggactccctcaccaccggcacaatggatacacaaagagattagtctttagacagagaacaagctgctgaaccaaagaccaactacagattggtgcaataaaagagagaggaaattttttttttttttcagagtaataaaccgattcatccacctgctcttgcaaagcggaggatcaattatgccaacaaaagaagacacaatgaggactgtaaagagaaagccagtgaatgaatgagctcatccagggtgtggatggattgaaatatacaggctgacccggggaaggagaaaagatgacgtaagtggataaggaagaaaaggaaggtgggtggccaagcaggtgcccacaataccggacaaatagaagtaatcaggaatagggacaaaattatttcccttccagagaactctcttgtgatgctggttgagatgctggaattagtatcggaagaggccacctgcaccacttcagagcacagtcaccc

SEQ ID NO: 29008 - DNA, 1330 bp, Bovine  19866881055625
  misc_feature (1)..(1): n is a, c, g, or t
ncaagtatgagtttctaaactgaactataggaacatcatctcatttattttccaagtactttataatatcttccaaatgaagataatccagcaataaaattgtttcaaatgaccattcccacaatttatgtagtaataacaatcaagtgatttctacctaatgtttgcaaagattttttaaataaatgcatacttgatctagcattttactgttgcaattaataaaatttgatttcaggccaaaacagagtatgtggaaaacctgaaataaaggtgcacactataattattaagtagtaagtggttgattgttttcttataccttctccattatttattttgaatggctttttgttttgaatgctttgtgattcctttagcaagaatgatgacttttgacctaaaagtttgaaatataaagagagcgactcaaatatatcataccacattattatgtgtttacccccatgtattttaccccaaagagttatacctccctctccattaacacagtcctttcttttgttctgagaattagcacacgtttatacttaaaagattattttgttaaaaacaagtgaagttatatctagatttttaatcacattttccaaaggaaggtcccaattagggcactgatctccttttaattaagataaaaatttggtctctctcttaaatggttttgttctcaatggctttttttcctaaatcaattgtcttgtgataaaaaggatttctgatattgttgtgctctgctgctgctgctgctgctaagtcgcttcagtcgtgtccgactctgtgcaaccccatagacggcagcccaccaggctcccctgtccctgggattctccaggcaagaacactggagtgggttgccatttccttctccaatgcatgaaagtgaaaagtgaaagggaagttgctcagtcgtgtccaacttctagtgaccccatggactacagcccaccaggcccctccgtccatgggattttccaggcaagagtactggggtgccattgccttctccgtgttgtgctctaagaagcatcaatttaagaaaaagctaatatatgtgctttgggtcactccatgaaagaaaaaagaatgacttctaaaaacgtcactgaactcctattaaaattaaaagcatgactctgttttccatgatattttagaccatccaaacccaagagtgagttgactttactatctagatcagatgtcaatgataaaaggccttggaccaaatctggccagacacctgttttgtatgtaaagttttactggaacacagagacactcatttgtttatacattatctatgact

SEQ ID NO: 29009 - DNA, 957 bp, Bovine  19866881060575
  misc_feature (1)..(1): n is a, c, g, or t
ngcgaccccatggactgtagccctgccggctcctctgtccataggattttccaggcaagagtactggagtgtgttgccatttccttcttcaggggatctccccaacccagggatcgaacccgggtctcccacattatgggcagatgctttaccatctgggccaccagggaagcccagaattacaattactaccatctgtgaggatattttcacttctgcagaatgacttcacatccattacttcatttgatgccattggcgagtcggtgagcatggtagagcagggaccaaggctaccagatgtcctttgcaaaagaggaaatagaccctcagcatttaaggggcctgcatctagcttaaaagtggcaatggagattgagcaaatgcaagcccatgttagttcctcagtcgtgcccgcctctttgtgacctatggactgcagcctgccaggctcctctgtccatgggattttccaggcaaggagtactggagtgggttgccatttccttctccaggggatcttcccaacccagggattgaactggggtctcctgcaatgcaggtggattctttaccaactgacctaccagggaagctcccaaacacaagctacctgtctacaaagttggtgcatctccatactgtcctgcttaccctggaagtgaaggcaaatgttgaaatgcttcctcctaaccatctcttcctttcttctctgcagaggcgtccatcctgagctacgacggcagcatgtacatgaagatcattatgcccatggtcatgcacaccgaggcagaggacgtgtccttccgcttcatgtcccagcgagcttacgggctgctggtggccaccacctccagggactctgccgacaccctgcgtttggagctcgatggggggcgtgtcaagctcatggttaacttaggtatcgtatgaaagtaccctctgccactccgtttg

SEQ ID NO: 29010 - DNA, 1513 bp, Bovine  19866881069047
  misc_feature (1)..(1): n is a, c, g, or t
nctctctgggtatgatggggtcaggtgagaagacccaatttagccatcaacacttaatgatctggaagaacgactaagctcctggtaatgacgttcatacatgatgctaaattgggaggtgtcaccacgatggcttgtggaagaagcacagaataaggggatggcagtcaaggtcaggaggccacagtgatgcaggctggaaaaatgggggaggatgcaggcaaggacaagtggagggaatttccttgaggacagtctgcaaatgtttaaaatacatatatatatctagtaacatcaggacaggaatgagctggagatcttaagctgtccagagatttatccttccatgatttaagctgaacacgagcttaaatcatacaggagctgaatcacacaggaggtattttggggatcagcaaggtacctgagccatggtgggtattttaacagccgtgacctgccaggtagagttccttccttcctctttgatgtgatgatcttagaggcagaactactggcttttacagtgtcattacctgcttgggagttagtgttctcatgtcccactgtgcatatctgtatcctggctctatcgcttaacctgcaaaacgggaaaataacctgtaaaataggaaagtaagatgcttcaggagttttatgagaactaaataaatggaataggtagcaccatgcctggtatgtgctaagtgcttagtaaatattacctattcttatcattactatttttatcatcatcatcatggcctggagtgcacagtctatacctgtggtggaatataccagctgaacagataatggcctttctggttaaagtgggggaagaaacatccagagaatatgatttgaaaaccactcatagagtaaaaagagcataagttcaggcatccagatttttttccaaactctgctatggtggtggtggtggtttaggtgctaagtcatgtccaactctcttgaccccatggactgtagcctgccgggttcctctgtccgtgggattctgcaggcaagaatactgagtgggttgccagttccttctccaaaactctgctacaggtgaccttgaatgagtcactttacctctttgttcctgtttccacctttacaaacatctggggatgaacctggccatctctgaggccccttccagctcaaaagttcaaatacaaagttagtagggttttatattgtacaaactgtcaggttttaagcatattttctgaacatacattactctgcagacctatgccagcagttgccacccatgggaaagttgactcctacactcttagcactgagcgtcttacatccccaaacctcctctgtccccttagtcctgggcaaacagggatggttggtcagcctacccatggaataattgtccaactgtaggagtgttggatgacagtctaaatacacatctgcaggaactgagtagttctgttgagccacgggaagcatccttaggaagccattcaacatttttcatggg

SEQ ID NO: 29011 - DNA, 777 bp, Bovine  19866881071057
  misc_feature (1)..(1): n is a, c, g, or t
natctgcaatctgcccccgtctgccctttgcacagaacctaagcggctcctcctaaaggcaacactgctcgtctccgccatccctccagctctgggaggatgcggaagagccatccgcgcatgcccagccatccctggctacagcggggaacctactgctttctattgttggccaaatgtacccagaaaagaaatgtccaaaaggaaggcatttttgtgttcaccaggagagtaaaaccttcaaaatatggcaaacagagcagagacatttcttgagtatgatactacctaaatggagaatccggaaataaatgtgaaattcaaatgctctaattattactcagggtgaaatgtcctttctgatggcacaggatgtgaccttcaatgccacatgtccacagaaagcaggcagactgttcaggcattgcaaagcctcagcttctctatgtgtgtttccccactcccatcctttgttactattccagggtggctatgtactgcctggggctagcttgtttgatccatggctgcagaaacaaagccatttgaagcaaatgcagaaggttatgaagaggaagggagagttagtgaggtctgagcaaacagtgaaatatataggctttcacaccaaaggaaggctttaaattgaacatgacttcaggaaaaatcaatttgtcttttcctttcttgtcataatttcccctgcaatatgactcctgacaattattgaagggtgcatcgttgcataaacccttgcacagtgcggcttattctcca

SEQ ID NO: 29012 - DNA, 1135 bp, Bovine  19866881082102
  misc_feature (1)..(1): n is a, c, g, or t
ntgcatgtcagggagtggggttggaacactgagcttgaggaggcctggggtctgggcgtggggctgtgggttgagggtggagacaggaggtgagaggtgtcgtctcggccacggtccagcaagctcgacactgagctggcttgcatttctctttctcatctgcaccagagaaagccagctgccacccattattaaacctgcattctctcgctcagagaatgggatatttccctcctcgtgcttttaaaataaggtagagagcagggggtggggaattaattaatgtcagtaaatgaagcatggggtgcttgtccgggtatgataatgactgtgaattagtgcagaagaaacagaatagtatagaaaatgaactgcactggcacactgctttgggacagactcggccaccctgacaatgccttaacccttcccttgccgcatcctttgtcactctgggaaagcccgcaccgcagtctcaaggctacagtattctagctagacgttcctcagtggagccctgccggctagtgatggtacacttttaggacgtaaataaaacaactccgtgtttacttattaaattaatgaggccctccagaaaagaagcaattgctttgtattggctggttaggggaattgcacaatgattcaagaaggctgtatgcccaccagaggaaagaaaggggaatagtttctcaaaataggttgctccctcctcccaatgccaaggtttaccttaagactgcgaatgactaacctcattccccacctctgctttttcatatgtgctccaggctgtatgttgtttgaaattgactggacattcccgtgtacaatgccctaaggagtggacatagctgaatagtacctctatgttccaggagattcctcctcaagggcatggtatagtgcttggtatgtagtaaacatgcaacagatcattgctatcatcaggatcatttcactgaatttaattcatagtggatttttcttcgggacagaagtttcagaggttcagagagtccttgaccactgtccttgctttttgtttctttttttccctttcttttctttcttccttctcctctctgctttaaagttcttggcacactgataaaatgaagaaacgaaataa

SEQ ID NO: 29013 - DNA, 1176 bp, Bovine  19866881088671
  misc_feature (1)..(1): n is a, c, g, or t
naaaatatgtgaatgtaactactgccttcatcaacatcctatttcacatttggggacaatcagccgctaaagattaaaacgcaatatgttttctcaaaaagaatcagagatttatgttggaagtctgtcttaaaagaaggcctcgcattactgagcataattaggaagaagaaaaaaaagaagaaacagtggccttatttcaacttatttcaaaggacacaaaatctaaggcagtggttttcagtcaggagcgattatgccccccaggggacaactagcaatgtctgagatattttgtgttgtcacaactcggggagggtactactggcatctagcgggtagagtgcagaggatgctaaaaatcctacaaggcccaagacagccccacaacaaagaatcatccagtccaaaatgtcaggagggccaagatggaggcctcctatagtgatgctgtaagcagaaaagatctttcaggcagtagcttgaaatttctctcagtggaaatgaatgggctctcagcctcacactgccatgctgtcggaggcagaaaagaccttttgactacgctttacagaactgggatctgcaggtgaggcagccagcacatcgtcacaaagagccacgccaggctctgtcgcctgtgtgagagagcagccgtccatccccggcggcagcctcaggagagacctgcccgcccgtggccaacacagcaggggctgtcccagcccacagctccccagacggcaggaccgagtgaacttcatcaagtctcctgccatatctccaagccctggtacctctcagaaataaaggatttgggaaaactggatacgtgtgcgatttcaaatcctgcacgtttctctagcaggaatccttgccaggtggcataccacagagggtcacaatgcaaactggcttcgttcagtcaagcaaatagtcacccactaaaatctgtgatcctaatccatcttaacccacacccttccagactccttggctcacgctacagtcttgctttgttctcaactctacaggctactcccagtatctaaggtggatatttgtcaaggattgtaggccagcagtgttgaggggagcaaatcgatgaaccgtaaagatgtcggtgaaaacagaacccagggagcaagagattttaggtgcttattaaccaattca

SEQ ID NO: 29014 - DNA, 963 bp, Bovine  19866881101890
  misc_feature (1)..(1): n is a, c, g, or t
naaattagagccaaatctttcagggtaattgatttttatttattggtcaataaaaggtacctggagctaaaggacgctctgtcagaacagttaattatccattctaaaccagcccttttacaggcatttaaaagccgatattgatgcaaaagcaacaaaagcctcactttactgttttgcatgaattttccctttaggtttttctctgggaaaatttgaaggcaaggcagcaagccttcctgcatcatcgtttcagtcttctgcccttgtgtgaacacacagcttctcagctagtttccctggcccttagatacaagcctgtggaagaggtgcacggagtgtggtgctggcatcaggcccctggcagggccagtgccctgtagttgtgtgtgttctccttggtatttgacttggctcctgccagtcaagtgttgaccgctctccccttttctttccctgcagctcgagaggagaatgtggccactttccgaggctcagagtacctgtgctacgacctgtctcagaacccgatccagagcagcagtgatgaaatcaccctgtcctttaagacctggcagcggaatggccttatcctgcacacgggcaagtcagctgactatgtcaacctggctctgaaggatggtgcggtctccttggtcattaacctggggtccggggccttcgaggccattgtggagccagtgaatggaaaattcaatgacaacgcctggcacgatgtcaaagtgacgcgcaacctccggcaggtaatggctgagggcagagagcgcctggaggctcctcttagggggctggggagggggtgtgaagtaggtgatgggctaggttacatggagaagggtagaggtaccatatgggtgagcatttgtcaagctttctcccagcctttacaatttcacaaggatcagattaaaatatgtttctcctctacttcaattctccatg

SEQ ID NO: 29015 - DNA, 1213 bp, Bovine  19866881108300
  misc_feature (1)..(1): n is a, c, g, or t
ngtatttctcgggctgtccccagagtgggctttgctgtcggctgtggccagttggcttcagaaggtatagagccaggaggattcctgtctccagcataactatagagtgagcctggtgcatcactgggacttcaaactagagtacagcgctgccagacaggagctatgacctcactgaccgcacagtaattctacttgagggatttatttttccttccatgagctgctgccaagactcctggttagagttaatggggctcccctgccagcaagtgtctcctagtgatgtgcgtaagcagtgccaggcaggaaatagctttcctgttcttaatgggcttgttaaacctcttattgagtggggtttaaatggctttattatgaataataataatagtaagtaagcattattagtcgtagtagagaaaaaatgatgatgtcagctctgactgccccttcgtttttcaaccttgccagcctgcaggtccttttgccaacagtgtccagagatgggtggccggtgagactgggaccggtaatcggggtagatggcaggcttcgtttcctgcagcttcccaattctgagcccctgtccactcttgtagagtcattcctgctcgctgtgtctttcagggtttttaggctcttaccctatcagatgaaatagaaccacaaactcctctctcttaattttaatttgggttgaaagccgtggaccaaggttccaaagttaagtctgggcatcacatagaagagattttcgaaagggtagtgggtcctgttctccgtgctagtttacagctgggactggagctatgaagtgtatcctagactgtagttgtttatttatcaggttcactgatcttaccgtaactttctgcaactgtattggttttctgtatactgatgctcttatttgccttaaggagatttgacatctccttaagcaatatgtctgtgaaatcaggggtttaatgtgtgggctgttttgttctttttttttttttttttaaccaatccatattaaaatggatacgtcgcagttacctttttaaaaagttcatccatgtggcaaatgtgtcataccctcaagggaaatcgtgccacgcttctgcagacactgctgtttgaggtgtgggtctcatgctttagtggaagtcagaagcacaggcacagctggtttaactacacgttgcttctcccctccctctgagat

SEQ ID NO: 29016 - DNA, 763 bp, Bovine  19866881166573
  misc_feature (1)..(1): n is a, c, g, or t
nacagttcttctgattcatttctcattaaaaagtacatcctcactagcaagaccactctctcagaccctatgaacaagggcctggggtagatttttcttcccaagtatgtgtttcaagtaaggtaacaaaatcattctctacttctcaactgaacatacccagctgtttgctgtcttgaaagctccaagtcctcatgttgacttaaagacaccattcagttcatgggaccatgtggatgaacccagaaagatgagcccgacccagcacctctgcctagatcagatccttgacagagacgagagcctcagctgcacagaaacccaagcagaaaaccacttctcctttaaagttcttgggtttcttgctttaggttccctctttccctttccttctctgaagtgtgcccgcacacctgcttcccctccttcttgcatccacgagggatgggcatttctccagcagctgagaccttgcttctcccctcccccagccctcccctccccgtccccaccaggggcatagcctcctctgtccggcgatcgtaccagatgctccagggctgtttgctcccacttttctgttgcggttgacgacacatgacaaacctaaccgcatgaaaccaaacccagatttttctcaagagatgttctggggaacaaattagcttcccgcccccaccttcctcagaatgtttgggtgttataaattgctcctgtctggattcacgtagttttattctgccccgtcactcgccactcattt

SEQ ID NO: 29017 - DNA, 1108 bp, Bovine  19866881223835
  misc_feature (1)..(1): n is a, c, g, or t
natatttttcttcagcatttatcaagatgttttgattgtgcaatttgacccctgaaaaccttttaactctatgtcagtataatcaggattatacaaacactaaaacagttttattaagggagtgttttttagaagtaaatgagtttgtgcaattcttcatttttttttcttcagcatagttaaaccatttcttaattttctaattcatttttatttcacttaactatttcttacaagatcagttctgctccacgtgtcttctgtagcatagatttgattcatcgatcagttacttttttgtgtgcctatcaaattttgcccatgtagctcctaccactgtgaacattcttttatggtcatcatttctaccatacccagttttctcacatcagatctgctggtttaaattttgtcaagaatgtttgattcctccttcaatttttcagtcaataaccaattttgccacgtgaatttttagccgctgtcagttccattttgtgttgatttttttctgacaggtctaatttttttccaggtcagtttttccagttcaaagtactatatcttcttcctaaaactaaagtcagtctccttcctgacaggtgttttttttttttttttaaagcagttgcacaacatactcgaggggtcctaacacccgggtcaaaatatcctttgtcattcattgagaccactgacctagatgaattaagaaacttaccccaaatcatatataaggcagagttctactggcccgttttagaatatatagcacctctagttcagaaaagggcagagtaagaatgtaaaattgggctgaccttgatggtgtgcctctctccttccaccttccactccccacccttttgaggttctcagacttctgtgaccctccgccctgaggaacagcagctgggaccacggttcgaagcttggcgtctccgggcttcctagccaggccccgccttaagctgtgtgcgcactcgggtggcatgatttacaaacaagcaggaccaaaaaggaaaaaatcctctcgtggagaattaggtcagtggcggggctggggaggggagggaacacagaccatcagttctcccatccttcagtt

SEQ ID NO: 29018 - DNA, 1039 bp, Bovine  19866881230963
  misc_feature (1)..(1): n is a, c, g, or t
naaatacctttgataatgggattgacaaggatgctaatttctcatcttctgtgagagaaatcaagggttttaactatagcagaattcagaaggtatagtcaaaattcatcttccagattcacaaagggcactgtgagaccatcgacccagagcttcaggccatgtggctaagatcacacacagtgtgctctgccttccagcgactgaacttccaggtgagaccagattagacagagaaggtcggaggaaatttaattcttatcatctactgtggaaggctggcaacagcaatccctgcacgaaagaagaggctcctaattatgattaaaaggataattcaggcaaggtgactctagatcagcttcagttagtccttatttttgaatttcatatttaaatccattcccttgacagcaactgaagaagtgaaacacaggaagaaaattgtctacaaaggataacatcaaacactaatctccatgtaacggagactctacagaatttcaaaggcatgttggtacttgagtgactgctatgtaccaggcaatgtagggggtgatgggacacaggatacaatgatgctctattcggaggcagttcctgtggtatatgactcctcagtaagccctgcagtgcaggcttgctcatatccatttcacgctatttacgcctgctgaaggcggtgtgcaacatggatgccagtcatccccattcctagtagccatgcccttatgtcaccattggtgcctgctcagtcactcagtcatgtccaactctttgcaaccacatggactgtagcctgccaggctcctctgtcaatggaattctccagacaagaatactggagtcggtagccattcccctatccaggggatctttccaacccagggattgaacctctggattggtaggtggattctttacttctgagcaactggggaagtctctccccttaaatatgcactggatgcatcacatctaagggatggatggaatatagcagggagtgatggaatcactttcaaagtcagattgaaaa

SEQ ID NO: 29019 - DNA, 1274 bp, Bovine  19866881319849
  misc_feature (1)..(1): n is a, c, g, or t
nttctacctcagtttccttgtctgtaaagtaagggagaaggcaatggcaccccactccagtactcttgcctggaaaatcccatggatggaggagcctggtaggctgcagtccatggggttgcgaagagttggacttgactgagcgactttcctttcacttttcactttcatgcattggagaaggaaatggcaacccactccagtgttcttgcctggagaatcccagggacggaggagcctggtgggctgctgtctacggggtcgcacagagtctgatatgactgatgggacttagcagcagcaaagtaatggaaagggaggaactgctctccactgttctttacaatgtgagattctatccttctaatgcacacaaagctttatgcctctgttcatgtattcactctttctttctaccaatacttatttgtagatgcatatttctaccaatactcactgtgctcgcaatgtcgcaaaaagtagaggtaaattctttaaacacattatcttttcacaaatacaacggggtttcaagagcatttttaggaaaaatctcacactattgagaataaagcacatttttacatttcttctttagctcttttattgggaaatgttttaaaatgggctgaggaatgatattcaaatggaaaacccaaggcctttaaaatcctttttacagatgctcaaactagagtctcacatattcttccatttctcatcttacagtctaaggaaaaacaaaaacaaacaaataaaaaacttgacttccaaagtatatctttaataataacagtgcacacttaaagtttaagaactatagaatatttttaaagttgatgtagactatatctcagaggccactttataccatattcaagaaactaccatgctgttatttttgtcttcagagcaagctgctactttagcaattagcagtccataaaaatgtgggcaattggcttcctctagactaattagcaagtttgctatgttgctgtcccagctggtcatgctatgtcttttaacttagctcaggcctagttggttttgccagttctagaaccttttaaagtttgtcgtaataacagatatctcaattggcttaaactcttcagcaaaacaatgttatctgaactgggtcaggattctcagctcctatctcctgttctcaacaaaagctcaggcaactccctactctgtgcaaacctcctccaactgtgttcaccctgtccctctaccccaatgctcaagtctctgttttctgaagtcta

SEQ ID NO: 29020 - DNA, 569 bp, Bovine  19866881343574
  misc_feature (1)..(1): n is a, c, g, or t
naagccccttgtaaacacatggtcaggagctagataagaaatgacccctagttgactgtctcctctgaaagtaagcctcagcttcactgagaactggaacattaaattgctaatatgcttgagcttagagaagatttattgagcacccaggacatctcattagactactggaatacagactggaacaagccatggccatacccctctggggctcgtagttagcagccttatgggagagacagtaagtattcatttaaatataatgtcatctgagaatacagagccggcaaacacagcaaggctaaagaggagggtcaagacagacggggtggtaaaacagctgagctagtctggaagagcggtaaaaattggctagtgaggaaagaaagagagtctccaggcaagggaaaacagcatgatcaaagaaaacttaggttggtatttcttaactaaaaatgtcagatgagggtatggccttgtcataagaccacaaaggaatcagaggggaaaataattccaaagatatgcattggagacagcttgtatttaaagcgcaaatctatttttta

SEQ ID NO: 29021 - DNA, 649 bp, Bovine  19866881373916
  misc_feature (1)..(1): n is a, c, g, or t
ncgagacccctggactgcagcctaccggctcctctgtcctgggattttccggcaagagtactggagtgggctgtgccccctccaccggtcagccaactgctcccctatcctgagccataggagggcccagacagccacaggggcagggaatttgctccaatgcctatgtggaaggcccaggctggtgcagaagctcaaaatgcttgtctgctgtctgagaaccaagcaggagagggaaagtgaatgacattatctaattgccagctaatctacataattatcgaacggcatacttcttacgtggggttagcatctttgcaaatgtctcatgatccggctgcttgggagacagaagggcccccacacgactccaacacatgggctatttaccactggcacaactcgaaagatccggctgccacgtacccttccactgcctccctatagttcctctgcttccctgagacagattcaaaggaaagtggggcctgtgttgagaaccacagacggtgggaaggcgtgatgaaggctgtcctcaaagcctcagactgggctcatcagttcctcctctggaacctcccatcagcatccctctgaagtcccgatgatggctctctgttggttctacccgcctccctttcaccatagc

SEQ ID NO: 29022 - DNA, 892 bp, Bovine  19866881431123
  misc_feature (1)..(1): n is a, c, g, or t
ntctgagttattttagatcctgtttttaggttaaaagcagtaaattgcagatggcaagttttttttttttttctcccttgatattactgaaagctggggtaattttgtcatgagtcacattaaaaaaagaacaagtgatgttatccagcacctactcaacatgaatatgtgcaaagaacagctaactacccagtcatccattgagcaaggagagaaggcttttgctttgctttaaggtgacagattttggagtgagagagtgtgtgtagttcagtgtgccctgtaagcactatcagaaactatgtgtgaaaatgtgagtgaaaaaaacaacagaattggtggagtacctccagcgtgctgacttatactaggccctatgtagaaccgactcattaaaaaagctggggaggggagatccaagtcaaaggaaaggcttgaggtcaatatggcaaaacacttttactcagggtctaagattaagaatttatttaagaagtttttttttttgtttgtttgtttttgttttttttttacccttatatatgtttatttcaaagttctgggcttaaaaagtccagctttgacttaactgcttaattttaagaagacttgaactgtttcactctttgaaatgaaaccaatttcacaagcaccctcaaaggaatactactgcaccagaagttaaagttgacaaagaaaagcgttgggtaatgctggagcccaagaaaggaagctgttgcctcaacctcttttaaccagcgatgggaatttactccaagtcatttcactccactgagtctcaacaggttctaaagaggtccgtgctgacagcacttaggattcctgggagcattatagcctataatctatctctttttaagggattttattt

SEQ ID NO: 29023 - DNA, 1002 bp, Bovine  19866881489337
  misc_feature (1)..(1): n is a, c, g, or t
ntcggatgtgaaaaataaaagtccccaaagtacgggtattttagctctatttatcgatttaccgaagttcaatgataaactttgggggtcttttctttcaggagaggtggattgtatatgtgctgagggtgggaagggcgtgggggcagtgttcattcagaagagcccttggaaagtaagtatgatgctacttccgacctgggtgaggtcccgtctggtggtgtttgggagaagcgggagttacggacgacaaggtgggctgcagctcctttcctggctgcgagcctggcgccaaggttttccatagagtcctggtctcattgtcttcccccactctctttttctgtgtcgggtgccttttttttgaaaaactaacccaagatcattcatgcgatgtgtcattttactaaccgactaatgtactaacaccctaacgactcatctttgtttttagtttttttaattaacaatcgttctgttcacaattttttaatttcctttcttcccccttttccgcaaagcactcaggcatcggacacgctatggtaaacaaactacattgtctggtagatatcattcttattgtctctttttttgggtttgccgtgtgttgccccccttttcctccccaaaccccccttttatcctctttagacttgtttcttttttaaattttttgttgttggtgttgaatgaaatacaagcctttctttttctttaaaaagaaaatggaaggggatgcatctgtcctgacaacatttggatgactttggttgggacagtttccttttctccactatttttttttttttcctaaaaaaattttttttctaaataaatattctttgtttagctaaattcattttgttttcttattttgcaacttccaagttacagactagggacaactgagatttctattgaggactttcttctctccgtgtcttcctaccccctcactcttccaactttcttcctcccccaccaacccccaaactcctg

SEQ ID NO: 29024 - DNA, 737 bp, Bovine  19866881556620
  misc_feature (1)..(1): n is a, c, g, or t
ntggtgggaacccaaaacagaaaatatgcctgttagagtccttaaaatataacacagtaactctcctgctattattaaaatgctaagcaatcaatgtaaaggctttaagaacctacaccccataggttgttcctcctgtgtcttcttcccagccctttttctggaatctcccatcaacttgaatagcataactgagaatccagctgaaaaataggcaatgctgaataattcttcattggagtatgtgtatttggatatactctcactgtgcatgtgtgttctgaatattattaaactacatatttattggtatgcaccattctttcttctttgtcatttcattttaaacgacccaacaactataacacaaataaaacaaacacacggaataaaacatctggtccccccaggaaattaaatgctaaattactatgttaattcaaccaagaagtagagactttaaatgtgaagaagtcaacaaaaatcaaatttatgctccccactgtccccataacagctaggctgcacatgcacattttattaagacataaatataaggtagcagacagtaattgagacttaaacaagcaacttagaaagcagtactgtctctgactcagcagtgcgactatgaccaaagtgctatcaatgtcgagagtttcatttttttcttctcctcaatttttctttttcaggaagatattaaactcagaaatggtagcagttagaaaaccgtt

SEQ ID NO: 29025 - DNA, 876 bp, Bovine  19866881596658
  misc_feature (1)..(1): n is a, c, g, or t
ngaaacagcgggatttgcttggtatctaaatgtatccatttcccacatcttctttcccctaacagctcatgtcttatttctgttcctatccttgattcccatacaaaggtgattgaggaattctccttttgcatttttacagagcaacatttcagggtagctattttgtcacatttcaacagggaaagactaattaagccagaccaagcttccccgcacccccatccctgaaaggcagaaaactgctaaaccaacacactaactccgcagttatcgggaaccgtttccttttttatttcatgcttctaagttcagggaggcgtctcctgatctttgtttgtgtttaagatgacacctttgcaataatcatcagaggcatttctgcatccacgtctttcctgtgtttccctggacccacagtgaaacgctgaagctaaagtgccactggcgtttcatggttcttttccagtcactcctacctctggcccttcctgccttctgaattctgcaagtcttaataaccccatttcatgcgtgagctgaagaaaagaggcaaagctgcttcctaaaggtctcagggcctctaactgtgctgggcacatggtcggcactggctaaatgggtgttgattgatttcttgattgattggcccgattagaatacaaagccttagctctcccgcatgttgaatcatatactctttcccagaaaaaaaaaaaaaagaaagaaagaaagaaagaaatagtacagtgacctctgctaggaagctttctctcaagaccatcatccctccaatccacctcaaaatcctagatctgtcttcctaccagctgattcaaacctttgcatgcaagagtgtatttattcattaatgaa

SEQ ID NO: 29026 - DNA, 785 bp, Bovine  19866881692584
  misc_feature (1)..(1): n is a, c, g, or t
ngcttgaggttcgggactctggaaataccctgacctctctgagctccaacgtgtctccttaggcagtgttctgccaattcttgatgagctcccaaggtttttgtaagaatcgcaggaagtaatacagagacacttgtgaaattacagtgcattattataaaacatatatgtgaggctttcatctgctaatgtggcaaggtcagggaaaatacggaacaggatgtggggattgagaacagtggatttggagcttctcgtgttttacttgtaaggtaccaacttctgcacttcatatagtgaagcaaaggtggcatctggacagcaaaggcgacttcctccctggtcacatcaaaaaagtcatctctgctacctgtctcctgaagatggacagggaaaagcatctaacacaaaacaacatacgtctctgcatctgaagtcttctgcgtcactttgcagcaaccgtccctcttaattctgtttgaaaaggcatttattaaccaagtgataaaagagagaagattcagagcagtaagtcttcacaacaaaccaggttcacaacgtatagaagtgtctttcctcctgtctagaactgagcaaaattacattagggtgctgcagaaacaggcttttccaagttcttttcccagagtcaatccccacaacctttacaactccgcttccgaacccctgcaatgatggaatgcagtcagttgactattaagatatccttcatctgttaacagaaaagctgctaaattgcaactctgagcaaatttacatgggaa

SEQ ID NO: 29027 - DNA, 1348 bp, Bovine  19866881831167
  misc_feature (1)..(1): n is a, c, g, or t
ntgactgtcatggggaggtggctgagagccagactagcctcatcccctttagggtgcaggaggggatttgcttggcaggtttccagtccgtgccaatgcaggagcaacatcttctagccctgcctaatcctctccctgggagacttcttcccaacagtgccaaaaacatgggacacccaaggcagcctggcagagtcggaaacatttctgaatagggcatatgcttccaaggccagtttccaggaatagctactcaatgctacatcgaatcatacccttgtctttttttctttttttttaaagcatcctactaggcttttaagcaaaatcttgatgtgtgttggggcgtctgatcctggctgccacgatagacttgtcaagcaagtccaatccaattccattttcctctattccatagcattctggaacttctcaccttatttctgagccattacatatttccagggggctccttggaaattcagagatgctgaaaagcttgctgaatatggaggaagatgggacattttaggggggatcaaattaggcacagataatagagccagagatggggctaagcatgaatccttcagagtgcaagctccccaggaacgaaatgactggagcatgaatcacctgcttacatcaggatttcttcccacatcaatccctcccatgtcatttaagattaatcacaagcagttaattctaaataactcagtggtgtgtatactgttagtgctatattagagaatcccttatgaattctactttgtgcaagggttaattcctccaaagcatcatccagaaatgttatgacctacccattagccccacccacatggcccatcacaacggtcagattgctttaattaaaatgaggaccagtgaggaaatgtctgagaagcagactttggcctgatgaaggaagagctccacaatactctgtaatcagagatatatcaggatgctttggaaagtaccaagcccctgccgttgccactgcccgggattttttagtcagggagagatgtcttacacagttgagaagaggatgtgaaatgaataattagacccaatgacctttatagtcccctccagtaacgtacagcccgtggtaactatactattaataatacagtattacatgtttaaaagttgctaagagagctgatcttaaaagttctcataataagaaaaagcatgttgtaactatgtagcatattaaaaagtagagacattactttgccaacaaagtcctgtctagtcaaagctatggtttttcaagtagttatgtatagatataagagttgaactataaagaaagctgagagctgaagaattgatg

SEQ ID NO: 29028 - DNA, 1205 bp, Bovine  19866881950112
  misc_feature (1)..(1): n is a, c, g, or t
nttttatctaacacacaaaactgattcactgttgaaggaaacaggtaatcttgtgtgcttcctttataacttctacaatccctagcatattcctgacatacaccaggctatcaagaaatgcttcctgctcgagtgaggctctgaatattcgtttatgtatgtaaagattcattcacttactccttgccctcctagaatgtaaattccaccagacccaggacttgcctaattgcccaccaccacattcccagcaccgtctaagcaggacttgggacacagtaggcagtcaattaataatgactaaataaatcattaaataaatgaataattattcatttatttaatgtactaagtgtcatgtactgcttttgatacttacttgtacctataaagttttgactttcttgtttacccatctccctctactagagagtgactcattcagaagggaagggactagcacttgggatgcctaagaagtgggttttgagtaactgaacaatagaaggatctcaagaacttcatgttctttctccagacacacactccatgcctaaggagagagccccatcaatatgtaaccacagtagtggagacgttgggcaatatagatcagtgaaaagggattctgaaaatagagaagcagatgttcttagtcttacctgagcttgtcaatagagaacaagacatgtgacttctgtttagcaaaatacaagattttcaaaacaaaaaaccctttactcactgaatgaccgagaagagtctgagagaagagagagacaaagttccgcagagcttactcaccctcggctacatcgtcatccacagttaacttaaggctttttcctctccgcaccacccggacggtgtgccattcattgtcgttgagcttctgccccgcgtacagggtctctgggcctttgcctaagggcagtggtaagtgccaaagttaggatcagtcttaaaagtagtgttcatggcatcagagttgtcaaagccacactggtgcatatgacccagcaatactcaggcagtcaaccccctccagagcccatgtgagtctcagggacattctgcagaagtccccaatgcaaaatttcaactgaatcataatggacagtaacaaataagtatcctcttttatctgtaggtacaagacattttaaatggcaatgcaatatttacaggaaatagtagtcagctgt

SEQ ID NO: 29029 - DNA, 832 bp, Bovine  19866881997445
  misc_feature (1)..(1): n is a, c, g, or t
ncctccctgaaacccagtttaattatctctaaaatgatgatgatgagatgattcctttatatctccttcaaaaagatcatttgaaaatgggggaaaattataaattgcctggaattttctacacacaagcagcacagaattcaagctactgctccctctctaaagcctcaaagcagctgcaatttctctgcgggaatgaggaggaaggtattatgtaacactgcatctgccctgatggtccatttctaaaaagagctccactgaaggacctagctagcctccttccaaacactggcagggctttgttcttccttttaactgaaattaaattgctgcctgaagaacagaggatatatttagaagacagattcttcccattttttttatctgctttaaaattttctaattgagactcatattccataaaattacatagcagtataaagaattggggaaagaggcaggaataatttttttttaagtctttctgaccttttccccattttctcatcataacaaatacatagcctaccttttaggtttcctgacagtacgcattcacccccattctattcagatattctctttcagatcctccacggctaacactcacagtcaattcattaaatcctttttaatgtccaaaaatatgcaacacaactgaatttatatccaaatttccagtaaagacttccattttctatttctttactcctgaaaggtatgatacctttcataccaggatatgatagtacatgctttcactgaggatgtggataaaaaatatggatatgactggtgtcatacatatttttattctttcagtaaatac

SEQ ID NO: 29030 - DNA, 2146 bp, Bovine  19866880197928
  misc_feature (1)..(1): n is a, c, g, or t
ngttcatctagtaaggctatggtttttcctgtggtcatgtatggatgtgagagttggactgtgaagaaggctgaacgccgaagaattgatgcttttgaactgtggtgttggagaagactcttgagagtcccttggactgcaaggagatccaaccagtccattctgaaggagatcagccctgggatttctttggaaggaatgatgctaaagttgaaactccagtactttggccacctcatgcgaagagttgattcattggaaaagactctgatgctgggagggattggggacaggaggagaaggggacgacagaggatgagatggctggatggcaccactgactcgatggacgtgagtctgagtgaactctgggagttggtgatggacagggaggcctggcgtgctgcaattcatggggtcgcaaagagtcggacacaactgagcgactgatctgatctgatctgatctgatattctaggtaccatatatgttaaccatctcacaaatattctcacaataaaagtgaaatttcatgaattccattttacgtgaggaaagtgtgactctgagagatgaagcaacatgcccacattttgcaggtgtaaaaatctagcacttttgtatattctactcactgataattagcaatgccaccaaacctgatcaatccttatatttgatctgtttcatcttgagggaaataactgtcaaagaagctctaaacatcattatttccaaataggctaagattccattacagggagccaggaggtagggagctatgtgataatacatcttgatggatatttgagtacattggttttccaaagctgcactttctgctaccacaaattctcatcaatgaaatagtgttggtggttcagagggaacctctctgttttgcttcatcctactctgagataatgcgtgattccttgaaagcagcatagcatttaaaactctgacgttgagggaattccctagctgtccagtggttaagactctgatctgccaatgcagggagcatgggttttatccctagtcaagaaactaagaactataagggcttccctcatagctcagttgggtaaaagaatctgcctgcaatacaggaagaccagggttcgattcctgggtcggaaggatcctctggagaaagaaatggcaacccactccagtattcttgcctggagaatcccacatacagaggagcctggcaggctatagtccgtgggttcgcaaagagtaggacatgacttagtgagtaaaccacgaccaccaagtacttagaaataacactggttaggagaaatgaaaaggaagtgaacagtagtccactggtgcaaaaccataggctactgaactccacgctcaagtgagggaatcatctagaaggcatcgccctacgcttcattaactggagcaattccaggcataggacagaaaatgaaatttaaggaaaaggaacagaaaccagtacctctaagaaagactgcacctgacctcagctgaatccttccccatcacacacagaatagagagagggagagagaacacaggccttgagcctttcagctatagctggaagataagtcaagtctcaggtaatggtggaaagagggtggggagaatcctctcaggctgtagacagtctacagagcagctcttttaagcaacagtcaggcaacatggattgaggttttaatgtgaaaatatctaagaaaatacagcatgagaaagaagttaaaaagattaatatctcaatctcacagaaaacatgccccaaggatcattcccaggtgctttgtccagaaggaaaagattaatgagaataagattatttgaaagcaataaacagaaaataaaacctctcaaagtcccaccaataaatctacagaattaaatataaagggatatggccaatggaagaaaagaaattaataacctaactaaaataatactattttagaactaatgagtaaattagaaacagcaagaaagagaatgggtaaaaattgaaagagaaattcaggacatagaagaaagacaaggtaatcatagtagatatggaggggggaaatgaagtttatgaagagcagatattatataaagagaaagctctttttatattctttttagagtatag

SEQ ID NO: 29031 - DNA, 851 bp, Bovine  19866880473107
  misc_feature (1)..(1): n is a, c, g, or t
ntgtacagtacagtctcatttctgctcttgagtctcacaaaagtagcagcctggctgtgcttctgtgtgactgtgcccgtgcgtatctatgtgcatgctctcactcacagagaacaggtccatggtgggccctgtgggcaggaggctttcattcttttactcattatactttggtattgctacaagtttcacaatgagtatgcattgcttttgcaattaaaaaaccacaagcaagaaaaaaatagcagctgcctcctacagggtatacagagtacaagtcaggcactacgctggcccctatctcattttgtcctccccatggctctaagtgtggaactcagatatattatatcccagataaggaaactgaggcttgaaaaggacatacagttagtaagtggcagggtcaggatcccacatggaagccacattcagattatccttgtgatgtcactcttttccacctgcaatctgtaggagaaagggtgtgtgtcccccgtgggaatgtcggccgtttatcctgagcggcttcacagtggaaaaaggctgccgccggccacgctatggaactgaggcaccttggggcgtctgctgcctgagctgaagacccatttgctatcctggttcctggcccaagccccacactcctgcatcctcaccattgttggcaatctctccacgtgtgaattccattaaaggctggctcacagctattttgggccacgcattagcacttggactttgattaaatgagagaaggccagacacctcgggatgatgagaaagaaatgagaaatgtcctctccctgccctcacagttccaggagtccttgtccactgctcctgggagg

SEQ ID NO: 29032 - DNA, 1739 bp, Bovine  19866880482074
  misc_feature (1)..(1): n is a, c, g, or t
naactggtaatgataaaggtgtaatttctcaacttcccctgaaggcagggagctatgactgctgggcagagtctcccagactcctacagggcacagcccaggactcctaactcagccgtcccattccacagcagttattgagtcacttaggatgtgactggtctgccacctaaggtttgtccaaacttgcaccttcatacatttccccccactttccaccaccctgtctggctttcaaaccctaattctttaggttggatggagaagtagtgagctttctgtttataatcccctaagtcaggttttgatccctgtctcagctagagtgatcacattcatcacctgctttcaaagggcagacccaggtcattctctatgagcagagaggcaggagtctgcaaactggaaactcacttggggagaagtagaccctttgggaatgtctgtctaaccccctgcctgtcagtctagactatccacaactactctgggaaagacagctccatggaccatttggtacctggaaaatcgatgactgtggctgtttctttatttgataattaacactttctagttgttgttcagtcactaagtcatgtctgactctgtgacaccagagactacagcatgccaggcttctctgtcctcaccatctcccagagtttgctcagattcatgtccactgagtcaatgatgtcatccaactagctcatcctgttgcttccttctcctctttgcccttaatcttttccagcaacgcagtcttctccaatgagtaggctctttgcatcaggtggccaaagtattggagcttcagcttcagcaccagtcctttcaatgaatattcagagttgatttcctttaggattgactggtttgatctccttgctgccccactttttagaacttactttaatcatacagaccaatcattggtctgagatatctttaaccgtgcttaggctagaagccaagagacctctagaacaagaaggcgccatatgaccctggactctaggccatctccttatctttaaaatgagaggatttggtcaggatggtctgggcctgacctttagatgagattctgcagggagaaagcgtaaggatcgggattgtaatgaatgctggtctgggattctgtgaacgggtgaacaccgaatgaagctgtctccacccacattcatttgggctggagatggtgggtcagagccactgtgacctcttctcacccttcatttcctagtggctgctggggaagttgccaacttcggggcctacgcgttcgctcctgccacagtcgtcacccctctgggagcgctgagtatcctcattaggttagtcacctctcctgctctctctgactccttcatgttttcagttgatgtcggaaactgccatatggggtcaatcgctacttgcagtcagggacctgggtcagtcccaactcccggaaagaggctctgcactggggattgcgtgctgcccattgttctagcatcccttcgaccgcctgggcagtgaaggggcaggccaagccccatccagggaaagggctgtccctgccaccaggctgaaggtctcatgccagtgttttggtgccatagtagaagcagcacacacattgaaaggacaagccctagattaactgtcctgagttctaaccttatctctgccactttgtagttacagtacacagcaggtcacttaactactctaagcgtcaatttcccatctcc

SEQ ID NO: 29033 - DNA, 1850 bp, Bovine  19866880485782
  misc_feature (1)..(1): n is a, c, g, or t
naatcgtaagaggaaaaagcatttacccatctgtcaacattgaaggctccatgagagcttctccttcagcctctcagaagattccattaccagtgcagctagaattagccacaggatgttaatcctgagggctttgtgcgtgcagaagatggctataaggagccttagtcaattagtagaaaatctctcccaaaagggaagcagaaaaaataaaatagttgagacgaatccttaggcacatagcaaagtgcagtgcacgcagcaggtactcaataaatgtttattgctgtctacatagcatctgtagtcatgcccacatgaaccccagtggaaattagcctgagccatattttccatcctgtaatcagcccttctcctcgtgcttttaaatttatcctcataaaggtacacagtaggcccttgcttgggttgggcaggcgggggcaccctggtgactctgaactgcatgataggatggatgcaggaagaacctcagggtgagattcaggatgtcagcattgcatgggctgccagagcttatcacaagcctcttcctgcagtctgaatgcaccatattttttttcagctttttatattttaaacctacaggatagttgaaacaataagacagtgaatacacatgtgtactttatagtcagattcatgattattcatgtttaatcatatttgcttcactttatttttctcatgtatgtattatttctcatacagtaaatgtactttatgtatttatagaatatataatttataaaaacatatttatatgtaagtaatgtattaaattatatattttaatatacataatttttcttagccatttgagaggaagttgcagacatcataacactttacccctgatacctcagctcgtatctcctaagaacaaggatatcctcttatcatccaaatagtactatcatactcaggaaatttaacaatactgttttctgcatagattccctatttgtcttggttatgttctttatatttttaggacaatttactaaatcagtgcattgcatttagttgtcatgtgcctgtgtaaaatttaagtaactttctgtctcttccatgcagctgttgggtagatccattgacttgaacagactcattacccagcgcatctctgctgccatgtataaatccttggaccaggccattagccgctttgagagtgaggacctgacctcaatcgtggtaagagatggaggccgttgggagttctgctgtgggactcctcaaactagaagccttgttggggagttgttggtagcctggtactgagctggttaaaaagatgcgatgagtctctttctcatctgaataagcagggcaaaaagaaagacttaaaaggaatgagaaaaattttaccttcctgattgcctggagagagggagtggagggaggtcttgaaatctctagagatggcctatcccgggacatagcttctcatcctttaggattctacagatacagcaagtagctagatggtcctgagaaaggagggaagatttcacaatggggtcggcttcattggtgtgcagtaggttagaggccagagaggctgttgactggtttaatgctgcgttgtcaccatctttgaatttacaagcattttctgatgaaagccccaccttttcattttgtgctgggacttggaaactgtatagttgttcctgatgcacaagtacggaacaggcgtgcactcttcttttatcaatcagctatttgaactactctctgctaattctcctcaagagttagaataaacttggttggtcagtctttaggtgataaaggaagattttaaagcttcaagagcagataca

SEQ ID NO: 29034 - DNA, 1419 bp, Bovine  19866880515707
  misc_feature (1)..(1): n is a, c, g, or t
ngttatcctttatttattgcactccttcatggaaagggctgaaatcttgcttcggattctcaaataaatcctccatggagagaaaggggaaaaaaaaaaaaacattatgtggtggttaatatttcttagttcatagaaagttaatgtacaggtgatgttctcagggggcagaatgtatgtgcatgggcctgtgggggtctggatccagctggaatcagactcatgggcggcagcttgatgctcagaccccccagctgattccgccctggctctcctcccaggcacccctttcccagagtgttcaacagatgcaacaggagggagctggacaggtatctgcagtcaggcggggggatgtgtctctccaacatgccagacaccaggacgctgtatggaggccggagatgcggaaatgggtaccttggaagatggggaagagtgtgactgtggggaggaggaggtaaggtgtcatgccatgttagtgggaggggaagaatttacagtgacttcaaatctcaaggtcaaagagcatgtatctgaaaattagtcataggcatttcctacatacatgtggaggtcaaagaccccatcacaaataacatgtggggagtaagccttaaatatggaccatttatgtagattctcccagtttgaggttgacagtatctgtgtccaaaatgcaggggagttctccttgtgagcatctgatctatacagaaaccacagtcttggccagtggagctacagatggcttccttggctgtccacagctggatacgtgaacttgaacctgggcattatgaggatacttaaaataacaagctcatgctctttgacctgtagaagaaatgactgaaaggggcttctaggaggaagaaagagcagaattgatggtgtacaagccctttccttccttctgatcttcaggatgaatatagtaggcatatcatagctctgtcacttctgacagatgctcgcggttctacaaaaagcagaactggatagtttcatatctattttatgaagcatgaaaatatgaacgttaacgtgcagaacagtttgtgggagaatgtgtcagtagtctatgcattcagaataaactctggggatgagattgagggtctgtatatgtgggtaaagactatttgcttttttaatcttctctatggtttgacttttttaaaatgccagcacataactttaataaaagaagaaccatttaaaggcttcccacctgcaccagcatgagttcagagagatcggcccagacccttcagaaaggagagagttgtattatcatggagggcccagtgaggttaaggggcccactcctgagtgggcttggccaatggcttatattcagagcagtttctccttcaacaaatgagtatgtgatctagggtcatgtgccagggatag

SEQ ID NO: 29035 - DNA, 1596 bp, Bovine  19866880526237
  misc_feature (1)..(1): n is a, c, g, or t
nccaggggttgaactcacgtcttttatgtctcctgcattggcaggcaggctctttactgttagtgccacctggaaaggccccttccctctctagatgcaccccaaggagctggtcacagagacattcaggtggttgtccaagaactcgaaacaacacaaccaaccacaacaaaaggtgcctcccagccgagctctgctggccaagccccgagtttcattccgcctcgctctaagagaacagcagttcacgactcttaaaagcaggctggttgtcaaatagaatgcactttccttttcctcaaggagtaaaccacaatatgatttggggagatggggagaagagtgaggagcagagtcaggatttgtcagagagcagacacaagctctctggaaaccagaggctaacctgtgtttactctggtggctgaccaagaacccaggcggcaaaggtaacctctgggtgtgtgtgtgtatttaaaatgcagcatgcaggatcttagttcccagaccagggattgaacccatgccccttgcagtggaagcacggagtcttaatcactggaccacagggaagtccccttcggcagtggaagctcaaagtcttaaccactgggctgctagggaagtctcctctgggtaacttctgggctgaagccttaaaggcttggccagtgggatcagctttgaacttcagtgaccaagttggggtgtaagctaggtaccaggtgtcattctggccatggaccagattgccaccaagtccccagtccactgatgagctgcccaccctgggaggcggtgtgccacaactgctgcaccaccacctgctttggggactgcctgtggtcccccaacatttggctggaggcagtcaaaaaaccaagagcagctggagagagagaattaatatcgtttcccttcctgtcttctttctagcagtgagaatgtgacagttgattcaaggatcattgatacggaggtaagggagtcagtatatttgtcaagaaggaagccctggccctcagccccccgagctggtgtagagcccccctgtgtaactgcatacctgtgcctgtgtttatgtcccgggccctcagtacagccaagcccaggccaaactcctgctggccttagagcaccaatgaacaggctggctttctgcacgcactccagcctcaaagccccaattttgaacgactgtggatttctctaactaaaatcaatgcaacccgttggatgttgagaatggccgtgatctgagggccctgagagtgtggtctgcagggtcagtaataaagacctctgagtgtgtttacttgatgcttacatctcggccctccttggacatggactaattaaactggttcttctagtgctagtggacggagcagtggggggtggggggtagggttggggtcgggggccaggccaggccccaatctctggagagttgtggctatcaaggaggtcctgtccctccagtgtcttctgcagtccagccttcactagagagggaaaggttgtctggggaatacagtccgctaaagactttgcacatcccttgtttttttgttggtttgtttttaccatcccttg

SEQ ID NO: 29036 - DNA, 1718 bp, Bovine  19866880562311
  misc_feature (1)..(1): n is a, c, g, or t
naaaataaaaaattcagttcctcagccacattaggcagctttcgagtgcccagtagctacatgtgactactctgatggaccacaaagagagcattcccatcactgcaggaagtcctttgtgcagagttcagctaaactaacggtcaagagactttctgtaaagggtcagatagaaaatatcttagcatctgcagaccacatggtctctgtcaccagtactgaactctgccattattgcttgaaaacagccatagaaagttcaagaacaaataggttccccaaaaacattattgttggacagtgatatctaaattttaaatgattttcatttcattacatgttattcttctttagatttcagtttaaccatttaaaacttaaagcctattcttagcttgtgtgtcacacaaatacaggtgtcaagtcagagtgcagcaataggctgcagtttactgccatctagactagagctgtgtggatctcagcaacaggagctgcatgtgcctgagcatctgtgtgttctggataggccggacaaaactaaaagtagaaaatgaatatatgttagcactgagcttcatctgctcttcatcatccatatagataatgcaagtaagataaaaatactcatcaaaattgcatgagctgtgttgcaaggttaaaaggaaggctgttaatgtaaaatgatgaaaaggaaattttgatgtgtggaattgacattaatatgctagaactgcaacttgtgactaggtaactagatctgtagctgtatgaaaatcaatgagacactcactgtaaaaaaagaaatcctcatattcagcccaatttcctgaaataccaatatttgtaatcctaaacacatcatcctaagactctacaaggtcctacagaaaatgcagttaaatgcaatgatgacctttctggtttacaagacactgatagtaaagagttttcttctcatctagtaacttctttattgacagtagctgcccagagtcctgagaggaggaatgtcatgattgatcattaatgtttgcatgagtgagagtatggggactcatggcacaagtgctagaaatttgttctccctgtacctgcagcacgacacaatggcagaagggtgggggatagattttgaaacaacttgaagagcagaatccatgatacgtaggctttttttttccttttattatggaatattctagacatttattaaagagtttacaatgagcccctacgtacctattgcctcgcttcagcaattatcaactcatagccaatctttactttcccttccccactttattaagaagaaaatcccagcatcatagcattaatgagccattttacaagttgtttgtttatttcggctgtaataggtctttgttgctacgagtggactttttctagttatggcgcgcagggcttcctctccagtggcggtgtgcaggctgctcattgcagtgacttctcttgttgtagagcatgggctttagagtgcaagcttcagtagttgtggcacgtgggctcatgagccatttttggaccagtttctgaccttgcctaggatgcctccgttgttatacaatacttttaaattgttcagtgtttttcagtgtgcagtattaaggcacaaacagaccgagctctttattaaagggtctaaaaatggttgattaaaacaaaaccttcagttaactacaggcagtctaataagc

SEQ ID NO: 29037 - DNA, 1088 bp, Bovine  19866880580250
  misc_feature (1)..(1): n is a, c, g, or t
ngaggggaatactgtgtccctaggaatagccgctacacgcatggagaaaattgcaaaatggaaacagattcaaaggatttcagaattggaaaggggtttagagaatatttcaccttaagacccctaaaatttcccattccattttagtgatgaggacatcacggtccttgttagccaagtgacccatccaagggcctacagcaaggttctggcaggaatttggagacaactttgactttggaaagagctttcagtcactggcaagcccatgccatcctgtccttgtggttgattccacccacataaaacctatttctttttcattagatattggcttctgtatggtccatagagctaatgtagggaatcattgacttctaaaactaggcaaatgcttttctgggccaagggactggtaactctgaactttctctcccaaggtggagggtgagaagtagtggtttttaaagtggcactaagaggggctacaactcaggaagccgcagaaaacccagccacgtgttacatttagcacatccgccttgggctgtcaatctgaggtactgggttttagtgcaaaaaagaaactgacagatgagaaaagttaagtagggtaagagaggctgagaggaaagggcgatggaagaaaacaatccatatgatccgtcgttcctagtcaaccatgtctctgcagcacgcttcctcactgtgtaacctcgagggtactggagtgctcaagcctcctctttcttctacatcacaccatctaccctagatggtggtgataagtgggagtgttttgtatgtaagtgtgcatcagagtggagttgcccttcatcagggattctgggcccaaagtcatcgtgcatgcatgcttagtcactcagtcatgtccagctctttgtgacccgccaggctcctctatccgtgggatcttctaggcaggaatactggagtgggttgctattcccatcttcatgggatcttcccgacccagggactgaacccgcatctcctgcattggcaagcagattctttaccactgagctatctgggatgcgccccttccaaattcaatacataaatta

SEQ ID NO: 29038 - DNA, 1327 bp, Bovine  19866880609793
  misc_feature (1)..(1): n is a, c, g, or t
ngggaaaggaaaagaaacatccttacggcctttattcatttcgtcaatcggacacacaaggcagcatctttctctataatctgatctctccgatgacctgaattttctctttgttgttcattctgtccaatacaattgttgctgtcatcagcgtccattggttcagtttttactctcatccctgcttctgaatgaggcaaatcatcaggcagagaagccaagcaattctgaatcatctcaatgactcgttccagatgcttttgaaacctctcggctgtctcaagacgttgacgtttctgcacctccatcatgactctcaaggtctctcttgcttggtggggtcggtattcatttatgagatgatgtacatgcacaaaaagcagcttaagatcttctagcttctcttctcgttttatactcccagggctccgtatcaagatatctaagaggtctaagaaattaataaggatagacatattgagttttctcagttctttcttgtgatcaaactgcataggatgaagtcgttcaataccctgactttctaaagggcggatgataagatcatcacactggaactggttgccaaacatcatgtaactgtcctttattggaggtggaggcttgggagcgaggccttcctgaatattttcatctgtatactccttgatgtactgcatcggagggggtgggagggcactcacttgctgtggctcacccattgtggaagatcaagaacctacagaaataaaccatcaaacaaaaaataagaggaaaacaaaacgtaacacacacacacacacacacacacacacaaatagaccaaagattgagagtggagctacaaaacaaacctatcacattcagtgattaatgacagaatcatttcccttttctcccatggccatttggtgcccaagacaaaatgatctccctcgtctctaaaactaacatttacaacagggtaaacctgctatctttttctaattagcattatatactcaatcattcaggtatttttccagctctacttaacatttccatcggcacaaaaaactactgtagtatacagctgaccttcaaagctatggtttttccagtggtcatgtatggatgtgagagttggactataaagaaagctgagcgccaaagaattgatgcttttgaactgtggtgttggagcagacttttgagagtcccttggactgcaaggagatccaaccagtccatccaaggaaattagtcctgaatattcattggaaggactgatgctgaagctgaaattccaatactttggccacctgatgtgaagaactgactcatttga

SEQ ID NO: 29039 - DNA, 1479 bp, Bovine  19866880628395
  misc_feature (1)..(1): n is a, c, g, or t
ncctacttataaacattctgctgacacctaaactttatttcaagccattctttatgatttgtatctttgtatgacttttaaactacgactggctctcacaagacgctaagtccggcgaagtctggactccactcactgttgtgtcttagggagggcctagccccgggcccggcacatcgcagcgtgtagccaggaggaatccagctgggttgggaagaccagatggccgtgacatatgccctggtgagagcacagcagcagacctgcaagtgtccatggacacaggtgcaaaatcaggtctgtccaggtgtgcaggggattcaagggaggcagggaagatgcgtgagagatcagtttcgtagggccgctgagcaaagtactgtaaacttggaggtttaagacaattagaaatgtgttctttcacgtctctgaaggctagaagttcaaaaccaaggccatgctctcactgtagtctctagggagggatccttcgtaggctcttgcagcttctagtggctcctggccgtccttggcacccactggcttctagtttcatgactctaacctctgccttcaaatggccttcttcttggtgtgtgtgtatcagtgtccttttctctttttgtaaggcttctagttaagtattgcctcatcttgatttaattacatctgcaaagactctgttccaagtaacgtcacattctgaggttttgagtagatgtggatattttttgtctgtaccacatggcccgtgggatcttagttccctgataaggatcaaatctgtaccccctgcactggaaatgcagagtgggtagacgtgaagtttggtgggaacacagttcagctctcacagggggtggtcacagaggtgactctagtggtgaggcaagcttttcggaagccagtgtttcctgtgaccagcatcatgttatagaaagagatctgaaatcctggcttcttcaaccagcagagagactttcagcaaatccctttgcttctctgagccttggcttcttcatcgattcagtggggatgatggcatctgccctgtccctcctcccaggaatatcatgaggatcaaataaaacagtggctgggaaagctctttacagatctaaggttatgtacacctaaggtaggtgtacagtcatccctgactgtctcaggatgccagcatggctgacttgtcagtgtcctgtggtctgactgccgctctctccttgctaggatcactgcttttaccacgggacagtgaggaaggcggagcagtccagtgtcatgctcagcacctgccggggaatgaggtaagaggccctgacagtgcgaggggcacctggctctctccccaggaatggagtgtttaggacaagtggggctggctttgagcagggactttgagaagctgtccatagagaatgtgtgcaagccagctctgagaaaggctgagctcgggagggataagggaaatatatcctt

SEQ ID NO: 29040 - DNA, 1476 bp, Bovine  19866880706540
  misc_feature (1)..(1): n is a, c, g, or t
nttcttcattcattggtgatgccatctctaacatgtgctatgtaaaatattagacagataaagtttgtgaacgtatgtgtgttctatgttgtttactctgggtacgctggggactcttgttgttcttgtacattattttattataacagctttgcatcaggacttaatattaagaagggcgactctaaactcttcccacttcctttggttctctttttaaaaaatttaaagctatttagattttataattttatgaaaattctatattcaattcttgagtgctttaaaagatcctgttaggacagatggtaggcaaaatctgtaaaggtggtcagaaggtcaaaactttcagttataagataaatcagttctgaggatataatatacaacatggtgacaaaagttaataatctcatatcgtatatgtgacagtttctataagggagtaaatctttaaaagttctcatcacaaggataaactgtaactgtaagatgatgacggttagctagacttattgtggtgatcattttacaatgtatataaatatctaggtataatattataagttaattatctctcaataatactggaggaaaaaagatcctgttatgtttctattaaattagcttttgtgatctgattcattaaggaagctgatatatttacaaatgctaagtctgatggattaagaaagaaatgatatctttacaaatgttgtcattcagtctatgaacttagtacatcaggttttcctctgttctataacatactttaaattttttcttcataaagcttttgtgtctccttgcttaggttacttactacatattttatgtttcctatagctaacatgatttctatctcatattttctcgacaattattgctgagagagtgattgctgttggcatcttaactaccttatattttgtattcaattaaaatggattacatttatttaaaaattttatgaaaatttatgatgggtttgaacatcatctcttgagaatgaaaatgcttttctattagaaaaacccaagtcagtcattgtgagtcagagttactagggcaacaactcctttcaagaagagatatataatataagaactgaaaaactaaaacttaagagtgaaaaagaaaacaaagatcataatggaaactaaataatatattctccacctacttcctcatctataaaatgaggagactgtactaaatgttacctaaacttccttctacctcaagtctctgaagatattccttttagaaaatgaaaaagtcggagtgaaaaaaattctaagtgtaaattaatctcttccattgactttccagttctattgagtttttagcaaagaggctttgagaggaattattctttgtgggaactcaagaagagtaagtttagtgcgtatgacctcacagagacaattgagaatggatgctttgggagaggaactggattatttttatcactgt

SEQ ID NO: 29041 - DNA, 3224 bp, Bovine  19866880708099
  misc_feature (1)..(1): n is a, c, g, or t
ntctgtccatgggaattcccagcaagaatactggtgtgggctgccatttcctcctccaagggatcttttccagaccagaagatcaaaaccctttgctcctgcattgcaggtggaatctttactgctgggccaccaggtgaagcctaagatcctgcatgacgggcagcaactaaacccacgcaccacaactgagagagcccaaacactgctaccaaggacccaacgcagctaaaaataaatgaattaaaaaaaatttttttcccttaaatttctgtactaacacccagattcaactttgagggagaaaaatagccaatatgaaaatagcagcaaaataagaaaatcttcacatcctaaactcacactgacaaagcagatcacaaaactttacctacccatatgaaaaagcaactaacacctgactgggaaatcatttcttttacttatatttttgttaggaagtgggtaatacagtgatttgtatcaattttaatcagatgcaataagcttaaaatatggtttatttcacctttttagccagcaaagcgttataaatccatgaaacaacaaattcgtatgttgtttttcctgctcattccctggatctcaatcagggaatcagttccttaagaggaggcattgtctccactgagcttctctcctggcttcctaggggtggggttgggacagggaagctgcctgggagataaagtgttgatctgaacttacctcggatttcagggtggtggtttgagcatcgccacttggagtataacacgtttctgtgtaggctggagcaaaaaggtgcctgaatagaataaaaaaagacatttgtctccttagaagatagactttaccctcctgtgaacagtagccagagattctaactgaacctggtagaaccacccccaagcatctccatgcagaaggaatagggcagcgttatggaagggcttaaggaataaaaagataaacagaatgaagtttgttatgaattttgtgttcactgggatcatcagttaattcagccacaaccagatgctgctgaccaccaaagcagtgatattagatcttaatttgttctgggtcctgggaagatcacgtgcaaacacactcacagaatttcccagggtctatggaccctactgtataccttaattgattattttcccagcacatccactaacttttggtatcagcacaccaaccattctttaagggaatccctcctccctgttgcaggttttgttaagactgacaatcaaggaatcttacctagccttggcccattgtgcaagccaagccaatggagtaatgctgcaagaacgtaacagatgggagctatttatctgctccttgttcctgctacaaggattctggaagtttcctttgcccatcttttatgagacctaatggttcagatttcctgtgacctggtactatgtgttgccttttcaatatttctttttttttcctttctaaaactggatgttggtttctctcctgttacagacctctagaagccgaggttaagaatccctcgcccaaggcaaggtgacccccgaatgaggctttagaatttctctgaaagttaaaagagaactaaaaatgccaaatgaattcttcaactagttcagccacattaaaagcagaatgaatctaaagaaaatcgaggtcaggaagcaaaatggtttttaatggaaggcatcattaaaaattggagtctaacaaaaaagaattaagtggatctatatcttttactatggaaagatgtttaaaatggagtcagataaagaaaaatttcaggaaagtatgtacttttaaaatccctttaaatgaaaaactaatagcagtataccctagggcatgcattgacaatagctggaggaggacatgcctatcggtagtggtagtgatctcaggggattacagaagatgttcacaatgtaagctgtatatttctgaaaaactggttgatttaaaaaaataattatcatgtgtttattttgaaaatggaaaatctaatttgaaactgccttttaaaaaagaaaaaaatacaagctgatgccagcacagaaagccaaaggaatcctcagggaccaccctggttttgtaagaggtgacatttcccacaagacagggtcactgaagagggtttctagggtcactccagagtcacttccagctctaagttctgggactccagactctcagattcccctccgcccccagagcatagtcagaaggcaaatgccacaaagatcttctcctgcacaatatcaggcccttcaacatccagccttgaacaagaagaaaagaaacccaacagggagatgtaaaaacaaagcaaagcagaaaacctagtttgtgtagagaaactccaatttacatggcaagtttgggtcagtagctaaatcgccagattctttcttcctctttctccttaacatctaaccagccaaggatctaagggaagagtcactcatttgtctgaaggagataaactctaagccccaggaggacacaggccaagctgtttgctcaccggtatataccgatgcttaacatttactcaaaggaaggatgtgttaactaattactgaatgaatgaatgagtgattgaaggaggtagtcactgagcatgctaagagcttagggcatggtgtggaatctgagagactaagcttcagcccctgctcttacatttactatctctatagccaggagggagttactttacctctctgaacctctgtttcctcttctgcaaaaacccttctgctcaacagacttgtcatcagagtaaaatgacataatgcatgaaaagaacttaaaatcaggcctggctcagagtggagctcaggaaacgttagtgattatcacaattgctttcaacagggattgtgatgggaagaactgagaaaaactggcggaatttacctatttccttccaactccccccagccattaactccccagtgtatcacttgaaagaggcgagaaaacaatgagctcattcctgcagctcatttctgtggtctacttcacagactgcataatggacggccagtcaggagttcagaatctaatggttcattccgggtgccagacgtgaatgttcccacagtaagtgcactcctggaaacacatcctcagcctcttctacatcttcggagttgaggggtgggggggggaaatgttcatctagtaacaccaggatgatc

SEQ ID NO: 29042 - DNA, 2302 bp, Bovine  19866880712562
  misc_feature (1)..(1): n is a, c, g, or t
ntgaactgaaaagagcccttggtgtggttggttgtttagcttctactgctttctgagcctggatctttgagtattggaggggatgttgatgacagggggagggaatgaaagaatacagggcagctgtggatgggctgaatccaggcgatcagcccctgccccactgcagccccagtgagtcccacaatcttcctccagctcaggactgggctccttgccagaagtgtttcagaaatgccccaaccaggggctctttgatatccccctttcatgttggtctgaaactccagaaggcagaaatccctgggctttattctaactaatgagggtggagcctagggaccgtatatttttagctctgatagcatctcacaacatactttcccagggaaaccctctgctttccccattctgccggaagctctgggcgagccagacagcacatctgggaatatggagaaaaggctgagaggggagtgcagactgagaaaatcagagtaaatcaaaccagatgggggaggtggagactggctctcctcctcacccagagggaagtgtgtctttgtccttttcccacctctggcttattcactgtaggggaactgaaggcagaatctgacctggagggtcaggggcaaaaataccacataccagatgtctttaaataagtaagaattcttaaactgttataaaatatgctctgtcatcctgaagataaaacaaacttttataacacaaaataaggtatatataaagtcatgggttttatatgactgcaagttggtaaaaataccaaagatgactgaatttaattatcactgcatatttctgggcattttgttgttggacagtgatgtttgcttggtgaaaataaagacatgatattcttaaattaatatgcatttattctataagatttatttttcttgccttcattttaacattgttatgtttttatagtcaagattcccacactcatgcacctataatcaattaatctaaacaaaggaggtaagaatacacaatgtcacttcaataagtggtgctggaaaaactggacatgagattagaacatttcctcacaccacatacaatgggttaaagagctaaatataatacctgaaaccataaaactcctagaagagaacataggcagaacactgtgacataaatcgaagcaatatttttttttgatccatctccaaaagcaaaggaaatgaaggcaaaataaacaaatggggcctaattgaacttaaatgcttttgtacagcaaaggaaaccattgacataatgaaaagacaacctatggaatggaagaaaatatttacaaacagtatgaccagtaggggttaatatctaaaatacataaatagctcaaactactcaatataaacaactcaatcaaaaaatgaacagaagacttgaatagacatttctccaaagaagacacatagatgacttaacaggtacatgacaagatgctcaatatcaataattattaaagaaatgaaaacccaaaccacagagatatcaccttacacctgtcagaatggctatcgttaaaaagtctaaaaataacaagtgttggtgggaatgtggagaaaagagaaccctgtacactgtaggtggaaatgtaaattggtgcagacgcgagacaaaacagtatgcaggttcctcaaaaacaatgaaaatagaactaccagcagttccacgtctgagtttaaaagatacatgcacccccaatgttcatagcagcactatttaaaaagccaagatatgccagcaacccaaagtgtccatcaacagatggataaaacaggcacggtgtgcacacacatgcacacaacacacacacgcatacacataatggaatgttactcagccataaaaaggacgaaaccctgccatttgcagcaacatggatgtaccaaaagaacattatgcttagtgaagtcagacagaaaaagacaaatactgtatgatatcatttacatgtagaatctaaaactgaaaacaaagaactgtgtgtgttcagtcgtgactgactctttgtgaccccatggactgtagcccgccaggcttctctgtccatgggcttctccaggcaagaatactggagtgggttgccatttcttcctccacagaatcttccccacccagggattgaacccacttctctttcatctcctgcattggcaggtggattctttaccactttagccacgtgggaagttcaaacaactgtatatagccaaacaaaaaacagactcacaggtacagaaaaagaaaaaaaaaaaacaaa

SEQ ID NO: 29043 - DNA, 852 bp, Bovine  19866880715840
  misc_feature (1)..(1): n is a, c, g, or t
natgctcctttttcccatctcctctcaatttcctcatctgtaaaatgtagtgttggaagagatgcttataaattcccataaaaatcagtgattcatcttacccttccatatccctgagagtcatatcttagcatatccaattttcagatgaggaaactcaacattaacaaggctgaaagggtttttcaggtcacacagctggttaaagccaagactaaaaccctggcttcagaccccaaactctgcaacttgttctagtggaacacaccattcccctagtgacctgacctagatcagggctggaacccacgggcctggcaatgagcaggatcaggttcccagaactcccactacccccagccaagttttgcgggagagtgtggtctacaacacttgggtcagctgaagctaagtggtttattccattcccatttctctttgagtcttcagctcccaaataagaatactgactggtagcccccgggactgggtgggggctttgcaagagcccaggaggaggggatgtactgaacaagaaaacagagtcacccctactttagctgggatgcactctggtcaacgagacctttgggaaggagggggctgtctgggagggagggggaagttctctcactgccctctgtcaaaggccctcacaacatctctgcccaatccagagagcacaaagaacaagcacatgaacacaagagccatgaagtcatcgcattccttctcagtttctcggcctgagggggccaccctgagggggctttcgtagcaggaagcatgagctcatggcaaactcatgcactgagacccattcttccgctctgggtacagaagtacaagagc

SEQ ID NO: 29044 - DNA, 1824 bp, Bovine  19866880736945
  misc_feature (1)..(1): n is a, c, g, or t
ntgcagttttattcgaattctaccaatgttaaatgttggctcaaattttcaaatatgctctgcagcctaaacaaaacacagactgcaggctgccagctctcaactctggcatcagatcccttcgggaatctatttgctcagctgcagaggaggagggtgactaactgatgaaatcgctacaatcctcccagctgggcatcaaggtggagggaagggctgaggggaacacattcctttctttgtttctcagaagaggcagaagcttctcagccaaggcagtgggggcctcctgacgccccaggagacagcatccctggctctcctcttcatgggcttcagggactggggctactctcttggcggctgtggccctcacctgataaactcaggctttcactgcttgttttgattttgttcccagctaaaagaacattcagtgcctttcaaggactgggaagaggccgtggacaccccgcccacactaaaaccagttttgccatagggtatgctcattcatttctggaaaactacaagatagagataaacaatgaagagaaaagcaaaaatcccacctcttggacataatcactgctaacatttggcaaaaaaacaccccatgtcttaaagtagatctcctagaagaacttgtgctgtatcacagtctctcaaagtccgtgacccaggacagagctgcggcagctgggtcaagtcctcttaggaaatgctgctgagaatcgaccctgagagtgcctcatttgcagctcaaaatttcttttcttttttttttttttaatattcattttatttatttggctgcactgggtcttagttgtggcagctcaaaatttctatattcctctctttcttcataagctattttcatcaagtggaagggactatgcaaagctctttccaggcagtatctcatttcatccttgaacacggctatgaggtgggttctaatgtttcctccatgtactacaggtttttatacaagataagtgactcacccaagatcacccagctagtaagtggcgaggccagaactgggaccccaaggtctttctgatgctagaatcctagttcttaatcctttttttaaaaactgctttgtccattaaaaaataccttttattttgaaataactttagacttacagaaaagctgttactgtagacctcctgcacattcctgatctagtttgtccaatgttaacctcttacataatcatagtataattgcctaaagttggaaactatcattgatacaattctatgaactaaatgacagactttattcaaatttcaccagtttttccgtgaaagtcttatcccacatttctctgagtggtcatgtctccttgtcttttcaaatctctaatagttttcagttttccctttgtcttttatgttctgggtgcttttgaaaagcattgttcatttttgaaagccattcgatttagatatataatcacaattagattgagattatgtatttttcattatgcatacatattcagggactgtgtgctgtgctatgcttagtcactcagttgtgtccgactctttatgaccccatggactgtggcccgccaggctcttctgtccgtggggattctcctggcaagaatagtggagtgggttccatgccaatccagggattgaacccaggtctcttgcattgcaggcagattctttaccgtctgagccaccagggaagccaattcaggggatacatgaatatattttcttactggtgatactaaccttcatgctggttaagaggatactcccaggtttcccactgtaaagttattattcttcc

SEQ ID NO: 29045 - DNA, 1330 bp, Bovine  19866880764329
  misc_feature (1)..(1): n is a, c, g, or t
natttttcttctctcctttctcctactttccaagtatttagcagagaacagtattagagtaatttagagggtatatgttttccctgaactattatgtaaagtttaccaacccagctaaaagaaatcaaagaaacagagagcaacttatttttgtctttacttaaacccactccctcatttatgcaagggaaattatcattagctgaatgcatttcaaagttttcatgggaagatgttttgatatcaaaaaacctctgtgcccaaggaaggcagcacttccaactttatagaaaagggaactgaggcacaaaaaaattttggtgatttactcagacttttctactctttaacttgtgacatactaagcctgggccatgtatttctaatattcatttgtctttggttagttttctgtgttcttctttttaaatattttgctttatacaagaatataatttttatacaaaaattttaaatgtggatttttgaagaaaaaaggaacccaaagtcgcctgttgtctctgctcagaagaggttattgttaacatctctcatattacttcaagcttgagtttatgtaggtttcttcttacaaaatgggttaagattgtgcatgatcatttgtatctagattgtcacactcaaccacgagtcatcttcctcacttctattgtggagaacagtaaggacacacttgtaaaaatccttttaaatggttgatgaatctttatacagatgattcagtctgacccttcatatttatggcacatgccactcaggttattttaagttttatgttattatttgtaatagtcttatatttacttttaataatttatttgtgtctccacttatttctaaaccatatttttacattttgagatggtcacatgatttaacttttcctgttcttcagaagtgtaactttggtttctttccaagttatcttggagatttggaaagggaactggacctgatatagaaaggaggaaaggagaaatggagctcatccaggtgaaaaaaacatctgttcttcaagacacttcagtgatgggctttttactttgtcacactacttttttatttgaatatgggaggcggcggggagtcttacctcaccaaagaggaactttgagtaagaatttgatagcaaagtgtctgaaagaatgagcactttctttagcaatgcaactccagaagtttcacttcctcttcctcttctcttcccaagctagaaaactcttaaaatacatggaccctgttgaaaagatcttcagtaatagagtaggggtacagctaatgacagaaaagaagccagttggtaaccagc

SEQ ID NO: 29046 - DNA, 1471 bp, Bovine  19866880769048
  misc_feature (1)..(1): n is a, c, g, or t
nacctgaaggtagcttacccgttaaaaaaaattctgaagtactagcctcataaacatacctgttatttttcccctgttattttctccctgttagtatcaacccaaggaaccaaatctgatgtgaaagttgagatagattggaagaagagaaatgacatttttattcttcattgaagggctttgatttataataatccatgcattgtaaggattcagcaaactttttaaaaaaacttctatatatcaaatgctagtagatatttctcttctcacaagataaaattccagtttctaaatagagccaccttttgttataataattttagcataggttgctaaagaaatccgcttgtgataatagaaataaagattgttgttgttcataattgttgtttagtcactaagtcgtgtccaactctttgtaaccccatagactgcagcatgccaggcttccctgtccttcactatctcccagagtttgctcaaactcatgtgaattgatttggtgatgccatccagctatctcatttccaggatatgtagggtaacttgtatattgtaaaagagacttgtctcccttccctggagatttacactgccttgcgcttgtcaagaatcacatgatttgcactgaacaatgaagagtgagaaaaatgacaaatgctacttctgagcagaaactttcagagccattgcttgattctgccattttctctcttccctcttgccacaagatcaacagattgtcttttttagccattgaaattctggatccttgttactgcggcatagttcagcctgaacccacggatacaaacccaaggctttattaaagggatatcgcagcacctgaagtgtgattatcctctcagtttaaagatagtcttgtgagcccctcccacctgaaggtcagagaaattcagccagtgctaattaggaaaaactcaatatttggagtgttggcaatgagctgtgtgtgactagcttgcatcgattctgtgtagacactgcatacctctcaaagaagatgagttcctttgtcatgactccatgatcacaggtattgactagtgccttattactttactttaaagaactttaatatttgattttgtgtcttggccagtcctttaataatgatgtgacttagatcttgcccttcaccactgttttgtagggccttgtttctattcacagtgattttaaatgtgtttactaaaatatcccaatcaacctggagcaatcatattcaattttgtcagtgattctaaagtaaaagtcagttgaagggtatatttaaacccttattttcccccatttctatgaaagatactacagtatagtgtatcatttgtcttctgggtgtataatctcaaattatccatggcatccggtcccaccacttcatgggaaatagatggggaaacagtggaaacagtgtcagactttatttttctgggctccaaaatca

SEQ ID NO: 29047 - DNA, 1915 bp, Bovine  19866880788194
  misc_feature (1)..(1): n is a, c, g, or t
nttagtgtttccttatcattttagccatgcttcaacatgtttttcaccaatgcatcttgaatggtgacttctctgacttcattctctttgatttaggtttctttggtaagttttccccaaaaaggaaaccatgtactaaaattactgcaccccacttgtgagaaaaattttccctgtagcattttaccttttgaggattctgcagtgttgcttcagcatcatttgtagtcaggagcttaatttgacgggaggtgtaacctatgatgaaagtataatggggaatgcatatgggttctgtcatgtattggatatgtaaaataaaattagtcttagattttctagatgagaaaatgacctctctaccttaacatgtaattgtgagaatctattcatatgtcattactccattataaactttaaaaatgaatataagcattctagggtctcaagctgataggtaaatcacaatacaacataggattatgaaataaattagaacaaattaacaggggacttcagaatgataagggcagagaaaagatgacatggggatgggatcctgaaggatgatatctgtgatagggtggtgcgacttggaagggcaccaccttccaaggtggatagaatagtatgttcaaaaatgtggtactctggcaggccaggagagtgagatgctgaaatggaggattgactgtggtgtgtgatgccatgatatccttctgtcatacgttgtccccatttgggaagcagggttagggtattctgtggaaaaggataaaaattggaccagggatgggcaactggcttacaggtggctgatccataggctgaccaggaatgctaaggtatcctgattaaaaatgcagatcaagcagactggcttcttcactgatttagggataggagtggtaaactacagcagaaggagcctgtccaggtctttaggaaaatggtagaggatggctgttcccttaccttctccaggtcctggggactccccagttctaggcaggtgttaccttatattaagctctctttcaaaaagcagcctgtgtgaatctcttcctaaaaacaaaaatgacttaataacatgttaggccactgatcaaagagaagaagagaagttaaccttaaaatttatttctgtggcagagtcaacaggagtaactgttttatcaactgtgcaagtggaattccctaaagaagtggacaagggtgctttccttcttaccaatcattatttttattaatatattttacaagactgcagatgaaataatattaaatacaaaatttttatacagaaagtgtaataaagttaaaatagttccttgtaattcatagcattattgcaatgcttacaaaatttttgcatagagtgtgcaaggattgatgttattcaaaacaaaactaaaaagctcttcttacatcacacccaaatcgagagaaaaacaaaaaaaaacaagttaaaaaaaaataatccaaaggctgaactcaattgcttaaggaaatggggttcctttttcaaaatctccaagcaaataggacttttatgaccttatctttactgtgaaagcaccagaatctggcttctccaggagtgggtttagccagcatagtgatggatggttccctgcttttcctttctcaaacctgatctcctaaagaagtgttcctctgctttaatgtggcctcaaaaagagagaaacttgactgggtaggcggttaacagatggcaaactctattactgcctcacaaaacactacctataaattaggttagttttgtgtccatcccaaattcaggtttgcagactcttccttctactttgccaagatctcctgtgtctgctagggaacttgactgctggctctggtgatgttagttccatgagaccctttaaagatacctttt

SEQ ID NO: 29048 - DNA, 1311 bp, Bovine  19866880790206
  misc_feature (1)..(1): n is a, c, g, or t
ncgaatacgcagagctcaagactgacgtgttccagagcctgagggaggtgggcaatgccatcctgttctgcttgcttatcgagcaagctctggtgagttctgagccccaaggaattggcgtgtctccaggctggaagggtacccccaccccaacagatgcccaaggcccctcgagcacatcccacctgggagccctgccgctcagctgtgtgctcttccagggcgggcacgcgctcctctccattccactcagacctctctgacacccagatactgggagaagcaggtcctggagtcagaggggcctggccttcccccccaactgcccaccttccgctagcagcagggccccggcagtctgtcagagtccgggtttccattcacccgtcagacacaagataactcctggcaaccacaggccaggcactgcgctgggaggtgcagtgcagtgtcctgggtggtggagaggagacctgtcctgaaaagtgtctacacggaaacgatgtgtttaccgtcggagcaagtgctgtgagggacgattgccaggtctggagggaacacctgtggtgtggtcttgagggtgggggaggacctccctgagaagggggcctgaaaactgatcaggaactgtcctcatggagaatcagggacagctgttccgggctgaggggagagcacatagtgctttcttcatttgttgtcatggtagacagggattctcaccctgcaaggcagtttagaggctgaaaggaggtaagacatgaaagtgaaagttgctcagtcatgtccgactctttgcgaccccatggactatacagtccatgaaattctccagaccagaacactggagtgggtagcctttcccttctccaggggatcttcccaacccagggatcaaacccaggtctcctgcattgcaggcggattctttaccggctgagccacaagggaagccccaagacatgtaaagtaagagctaaataattggtttgaattatgctaatgggcaaaaacatgagtccctgtgcttctgcatcttgggaccacacagaacttgtttgtggcttgctcatggagtcagcattctccacaccctcccagtgctctccactcggctctggttccataaggcgtccgcaggtgggcctggccgtctaggcacagggtaatgggcagcactgtggaaggaaaggcatggtcttcaggacgcagcaggaacatctttcagcatccattcctgccgtcctctgtccacacacacattcagcagaagggtattgagaacctgctcactgccgggtgcatccctaa

SEQ ID NO: 29049 - DNA, 1414 bp, Bovine  19866880790556
  misc_feature (1)..(1): n is a, c, g, or t
natctgccctgagtgaggcatcttattggtttattttctctcttttccttcctgggccgggaaaaaataccaaattgtctcattttatatgttcttataagctcaggctcacagattccctttgatgataaggtgctctgtaagcacattcatttcccaaaggcttctgtccttctgaacagcttccccatgctcagtaagagattctgcaaggaattttgattcattctgggaaatggaagtaggcttggttggatggcatcgctgactcaatagacatgagtttgagcaaactctgggagatgatgaagaacagggaagcccagcgtgctgcagtccatggggtcgcaaatagtcggacatgactgagcaactgaacaacaatgtccctgtgagatatgacccatatctcaaaatctaagttaaggaacatcaaagaacagaagccaaaggtcaaatgtctccagaatctttcagcttctaggacaataaaagtcctcattcattagaacagggttcctctttgggtgtattttagtattaaaagaggcttcccaggtggtgctagtggttaagaatctgcctgcccatgagggagatgcaagagacgtgggtttgatccctgggttggttggtattaaaagctcattgacaagtattatttacactccttacctccttgaccccaaggcgtttctggattctgttaaaataaccctttaatattttctttcttgtgagggtttttcttgatgagagattctgtgccaagaagtggcccctaatttggttgctggctaatgctgtgggcagtgcatgtctggccagtagtacagtgctcactctctgggggacttggtgctaagtatttgttcaataaataaaggaccctctcaccatcaagccgatgcagtgttctaacagctttctgttttggactatggaattcctggctgtgttcataaatactgcttctacacagcaggcctgaccatcttcctactccatttccactcacccattccagctgtgaatgcatttctgagttctccctaggagtgccctgagaggggagtcaggatgtggttttaagagtccatggaaggccaaaggcaacatctcaacaccatctaccatggtactgataccaggaagctcgtcgcccattcaccatggctctcagtgcttggtccaggagtacacttggtggttgaatccctggcatctggagcaggacaagatgacaccatgggaagtggggggagggagccaaaggaggcgaagatgctaggaagtggaagcatgcctgtcaagccaggctgacatcttggggcatggccacactcttttctccatctctaagacttcagtcctggggttgcatgtgggcactgggcaggaggtcacaatcggg

SEQ ID NO: 29050 - DNA, 823 bp, Bovine  19866880807813
  misc_feature (1)..(1): n is a, c, g, or t
ntatgcctgaatatggacatcattaaaatgaaacagcttccttaatttgctaggcagatgatacaaaggttgaatcaataattcatcttggcaaagaaactcattactcagccaaggctatgatgaaaatcctgttaggaagtcttactttggctaaacaagacaagtaaattaagagcaaagtgaataacccaactctctataaatcattcatttcaggattaaacattatggatttctccattaaatatgcatcccaggcctaggtatgtattaacttctatattagccagccttgagagatagctaatacagtcttctgggagtctctatgaaactaccagcctactgagtagaacaaaagcaaataatggaaagttttggagaagccagggactgaaaaccaaaagtcgtcaaagccaacctttcacacaacctgggcgccctttccaacttactccgaaggctggtcatcctcttcagcataaatgctgtgagtgggggctttactacccatttttgataaagctctttctatttcaagtggcagaaaactcaactcaagctagcttaagcaaaatggggatttattgcatcatggctcagaacatgaataatctaacttcatactttcagtcttggcataatcaaggctccatcaatgtcaccagggtttaatctttattcccatatttgctctgagctctcctcttcttctcaaggagactccccttgtggtgccccaacggcagctgcagccctctgttttgtccttcagagccagtaggtaaagatccacacctcgataattcaaagaaaccca

SEQ ID NO: 29051 - DNA, 1091 bp, Bovine  19866880855278
  misc_feature (1)..(1): n is a, c, g, or t
ntcacttgagaaagaatctccaaatgcgaggaatatggagatggtagggtgcagaactagagagagtttctctggaaagagcaattatgatgtctgtagttttacatgcagtcaacttggaaacctcaggttgtgagaaacaggatttcctgcaaaatccaaaccatctaatcaccattcagaagcccatgttagactcctaatgcacaacatttgtgatcagtttttacctctggcagaagtaactgacaaattctacccaaaacctgtcaagagttttcccctctcaaagtcatcaacattttagtaaatcttaaaacagtaaaaatagagtatggaagaaaaatggacttctgagtaactcacctttgaaatttttgacatccaagcttttttcaaagtctgcatggggccactatgtaaaccaggatgtctcctatggataatgaaatgttaagaaacccagaggggtttaggagagggaaaaacggaaaaggaatcatctgttctaaccagtttgggagtggaaatgaataggtatttcatttttatctggataaatacagtaatataaactatcacctatcaccacatcctatgtacttgatgaaaacttcatcatctatatttccacatttcagcttcctaacagtcttgggagggagatactcttatccctacagaatatgagaaactgctaagcctcaaaaaggcttagttggggacttccttggcagtccagtgaagacttttgctgggcagcggtcgctggtttgacctctggtggaggagcctaagatcccacatgcttcagggtcaaaaaaaaaaacataaaacagaagcagtattataacaaattcaataaaaactttggaaaagtaggtaagcctttttttgttttaagtcaaacacccatcagatggaggtgcttggactcaaaatcgtgattctaaagctcaagctttaaacattatcctctattcctatccaagaaagattgaaacatttaagagggaggtctatggccttcatggacaaactaaaaggaacatattacataaaccaactacaaccctaatagaacaagtcag

SEQ ID NO: 29052 - DNA, 2388 bp, Bovine  19866880855642
  misc_feature (1)..(1): n is a, c, g, or t
naattatttccaaccacaggtcacaaaagatactgtcagtcaaccatgtaaacttttaattcaaggcctccctaatgttttttgttatttgtgctccttcaaacataaatgataaaacatgataaaaacaaaataaaactatgttggatttgggtttaggagtttcttttgagcaggaataaattgtgtataaacaaagacatatggatcaagagactggtaagaacatcaaaatactttacacttgtgtagatacttttcaaaacactatcacattcactgtcacatttaatactacaaggtgagagcagtgtctcctccactttctaggcctctgattctgtacttgtaaaatgaaggacctaaactagtttacacataaaatccccctagactgtgcattctgtgaaaagatgtctcctaacttcttgctctttactccattaagtgtttgaatttttttcaatctagtgatttctgtttaatgggaaatgtgtaatctatttcacagaattgtttggaggagtgaagaaatgaagaatggtaataccaaatacctgatatcttgtatcttatacccacggttagtcagtcatggtattatgctttctttggagaactgaacatccagcctcagaatccttcttaagccagcactcaaggtagtcaattccaactgataggagtcaacttgttctcagatatgctgtcttttatgtctttcttttggatttccttttaattatgtctgtttttgccacaccatatgtttacaattatattactaggtcaaatactattttgctttcatataaaataacagttttaatatcccaaccaaaactggattatctactaaatgatgataattctcttgtgtgtggatatagaatttacaaatctctttcactttctttatctcagtgattttctcaacactctgagatggaaagctgatattatcatctgcattttacaggtaaggaaatagattcagaaaagttaagtgacttttccaaaggccctgtataacaaaagcagctgatattcaagtccgagtcttctgtctctgcatcttgtgtactttccgctgtaccacactattacaaagcacactagggaaattcccagacaccctgattggcctctggggtgtcttctgcgatgccctttgaagtacagagctgagcctttctgcgggccattgaacaaagtgtaaactgtcatttggggaagtgaaacctaggagaagaaatttcctggcacataaggtgtactaaagaaatgtcagttggttgaagggatgaatttcttagtaagttcctctggtgtttgtggagccaggcaatcttgaacctgtttctgaaatgagcctccccataataggcaaagaaaaggtgatgtgactggtcttgtttgtttccccaagttaactagacagggaggttccaggtgagggggcttttgggtctgttctcagcaagcaagtgacactgcctctgagaccacagtttttgatctaaccctcctttacttcccttgcaatggaattgataagggtacttaaagagaaggtgccttgagaatgtaagttatgacatatgtaaaaagtaaagtctttaccctaaaaatgtttgtacttctttttctactcatcaggttggcccctctttttaaagtttaatgatacccaatgttgggcttcgctggtggtttagatggaaaagaatccgcctgcaatgcaagagacccaggtttgatccctggatccagaagatcccctggagaaggcaatggctaccccatccagtattcttgcctcgagaattctatggacagagaagcctggtgggctacagtccatggggtcacaaagagttggacacgattgagcaactaacactttcacttcggtgttggcactccaataccctgttggtggggaatgtaaaatttggcaagctttttgagggatttatcttctaaaattaagatgtcacatagtctgactcaccagttccatagttagaaatgtgagttatgtattttttcccaaagaaaaaatatgttttcaaaagtatatgtatttcagaagatttctaagttacatgagcgtgcacaatgcaagatcttcattgcagccttgtgtgaaacaacaaagaaagcaacctggaaactaaatgtcccactataaaatattatttaaatatttataatacaatcatacattctagaactatatgtttacctaaaaaataaggtagatttgtatgcactgatatgaaaatatctttaagatatatcattaaaagttaaaagcaaggtgaagatcaaaatgaatcaccttaatgcaaatgaaaattaggatgcatttctatatgtataact

SEQ ID NO: 29053 - DNA, 1544 bp, Bovine  19866880859442
  misc_feature (1)..(1): n is a, c, g, or t
ncctgcgtcccattcctgagactttgctgctaccatatccctaaattaccttgtcatcccaaagtcggacaccttgataacttggttttccccaactaaacaattccgggcagcctggagcagagacaggcaaacaaaaggaaagagaaaacttggtgagtaatcagtaattatggagtctcctataatcacagtgctttgcttatatgggagcaataaggagcttcacaaatgttaattaagcatcactagtgcatgatggaaactgaatgcgtaaggtctttttatcagggtgagtaaatctcatctttcatcttcattcctgggatcctaatcaaaaagaaatccatggtgttgtgtaaccaattataagctccagtgcaacccgatgttaaccttagggatggtatgaagaagctgtcatccatttgactaaagtgagaatgtattgaggttgctaattctcttaaaactattcctcaatagggagatgacatggtccctaattcacatcacagagtgttggatttgaagatcccttactgataaaagatccagtgagtcttaaattctaatgtgcctgcaaattccatggagtggacatgttaaaatgaatattcctgagcctcaaccaccagaaattctgaggttggttctaggatcactccaatgtgattctgatagatgcttggataacattttaagaaagcatgtacttgtcagcttctctcattttaccaagaggatgtggaggcatagagaggttaagaaggagccgctgttagcttcattttggaagaatgtaaactccaactcagagagtgaaagttagaggtggggctgggaatagagcccagaactgagtcccatgaggacctcccacagtgggtggaggaaagaagaagttgcaacgggaaggaagaaagcttgtgcctttttattgattcttgcgttcccagtgttggtagttctgcatttcattggcacatgccccttcaccctgaacttataaggttttgccctgcatcctcttaccaagtctctgtggatgacacacgcctcttccaggtaggccatgccctcacatacgtccagacacatgcccagcagggtctccgcagcaaagagccccctctggctacgcaggtaatctgacaggcagccgtgttccatgaattcaaacaccaggcagatgggggcctgttccaggcatactccatagagctggactagtttggggtgagagagtttcctggagaaaaatggcaagagttgagatggtctaaattcagtttcccaaaatacactccctccctcaaacaaaaatgtctcattgagctgaagaatggcacggactcagctggtgtgtgtgaggacaacaaaggtcagtgtgactggcatgcatggaaccagaggagagatgggtaggagatgaaattaaggagtgggcagggccagaccatggcaggccttctagaccacaatgaggagcttggtgttattctccatgccataggaagccattgcggactcgggcagggagg

SEQ ID NO: 29054 - DNA, 1136 bp, Bovine  19866880883442
  misc_feature (1)..(1): n is a, c, g, or t
nctatgcataagttaggaaaggagagtcagagagggtgcaactcacctgaagtcacacagcacatcagtagcagaggtgaaagaacaaaagcatgggtttccagtactgaccgtcggccttaggggaatgtgagtgggaggagacatagcaacagtcagggctcggggcttccctggtggtccagtggttaggacccttcacgcttccactttgaggacacagattcaactcctagtgggaactaagatcccatgagccacatgggaggctgtgagctctgctttctacttagacagctggagaaatccccaagataagacagtgctttctgagattagaatgaggcaggagcttttgggaactttttaatttatgaagccggaataaatatttaaatgacatattgattattcttattaagtaggaggactaataacaaaaaaaaaaagaaaggaggaggaagggaggaaggagattatgtccgtagaggaaaggcatttaaactggaatgtccgtccagtggaggactgtgtaacagtcaaaaagaataaagtatgacggtgtctttgcacatacaacatagaaaatggtgaaagacataacaatgaatagaaagaaagtgagttccatgataagacacattatgccatacaagcaaaataaacaaacaaagcccacaaaataaccctgcgttgggggaaaaaaatctgggaaaatcatcctatagttcagtcatttttctctaggtattacagagggagctaggattagagggcaacagagacgtttgctgtatctgaaatgttgaattttttataaggaatatatattcatgtattatcattgactaaaagttaattaaaaagatacaagtagtatatcattggagaaggaaatggcaacccactccagtgttctttcctggagaatcccagggacggcagagcctggtgagctgccgtctatggggtcgcacagagtcggacacgactgaagcgacttagcagcagcagcagcagcagtatatcatagtttcaggaaaattggaaggatacagaaaagtataagatgagaagccttttgcccactggtctcttgtattctaatagctttatagagttttgtcctgttgtgg

SEQ ID NO: 29055 - DNA, 1397 bp, Bovine  19866880899109
  misc_feature (1)..(1): n is a, c, g, or t
ncgggccgcaccccccaccaggtggggccatgggtccttcattgaaggaatgcccacctcatgtggatatttcaaatggaaaaccatctttcaaaacataccccccagtctcattttatagattctgtggccaatatagaaagtgacataaaggtcacatattaatgatttcctcaccaaatatttctttgcacagaaaccactgtgccctccacaaagtgcacacttgatcaagctactcccttatttaaaacattccatggctttccatcactctaaggccagaaatcaaaatcctttaaatggactacaaagctttgtacggcctggcccctgctgtgttccccagcatctcatcacactcgctctgccagccatgacactgctttcaatattttgaggcaccttgtttcttcccactatcacacatctttcttctgtctgaaagactccacttgatcacgacaatcctgtgaatgattgtacttactttgctgtaggcaaaacactctagtatgtacatgtgttgctagacttgaagtttgggaagccagttagtcagtaaccaatcatccattgcctaattgcaccagcagcagccaaattgttaccatggagatgaatattgctgtcaaaaatattggcctttatctgatagggtttattgacttgatgccccaattgatagctccctccagaggaagatgcctgttgcattgaaatatgtatgtatctgaacatgcatctcttgatgaactgtcaaaatagaaaaggaaatgcagagaaagtgccaggcagggcatgttgtggtggcaagtcctcacctgcactttcttagatggtatttgtgtacattctgcatctgctcaattaatgtcctgcataatggacaaactaggttgacattagagaagccctttggagtgagagagtgagaatgcataaaacaggatacaaagaaccaaaggtaaagccagggtatacagaatcatgagactgaattttgactaggctgatttggcctctggcatggtgaaaatttggggctctgaggaaaggctttgcaaagagttcctctcctctggcacattgcccctcacatttccagaaggcctcccccaaatccctctcaggtcttagagaacatgcctcttggtttcttcctcccaagacccactgtttcaagagttaattccaaggacacattgatccccagaattgattgatcttatttatcggaaatcccaaggtgggattttccagccgcccaccagagcaactgagaagggcttcccctcatcctcccaagccaccactcctccctatcttgtttctcacctcctccacctctatcacatacatgtgctttgcagaaaaagtccctaagttttactgga

SEQ ID NO: 29056 - DNA, 2427 bp, Bovine  19866880940758
  misc_feature (1)..(1): n is a, c, g, or t
ngaaatgtctttgtactgccgagtcctgtactgggagatgcctgctggcccatttctcctccactgagctgggtcttcccactatcatccttggagacatttggggctcagtctacacacaccctcaaaactaagctgagatgaccacaggctgattgctataaagctgaactgcttttagttcagccagataaagcatttctaaccatgagaactgccaggaaatacaacagaagcccctaaggggcaagcccctgccctcggtgatgtgcagcagctctgaccaaccactgtagacactgaggagaggttgcaggctcccctccacctgatgtggtcggcaaggccgtgcactgccccagggcccagcagtgagccatcctgggtgctgtaggtgaggaggatgcaggacaggggctaaccagaggggggcgctgctgtttagtgtctccaccagcaactggaagtgatcccaggctacgaggagctgctggccgacattgtcaacatctgcgtggattactacgagaacaagatgtatctgacccccagtgagaagcacatgctcctcaaggtacagctccctcggtcataccccctcacctccttcttatttaaaatcattttaaaaggttgtttctttcttcttgcttaagcatgagtgcagatcttactatacaaaaggttttgtaaccaattttttccatttgatatgctgtgtacacctttctagacagcattaaggctatgtctacaatgtgacttttaaaggctacctagtatttcattatatggggacattattatttaacaaatcccctatcacttggtatttgtttgttaaagtgcattgaaactctgtggcgttttatgtccatactcttgttaagtcagacatcctagaggaaaattgccaacctaaaggggaaggcaaaatcttatagcttttactatattttgtcaaaacggtcatgtttgtctcatcagtttacacatttcatttttaaattatcaagtgatgtttatcattgtggacattctgaacagaaaagcattaaaaaatcgaatctcttttaatctttccacccagagataacacttttagcattttgatgtctatctttctctttttttctgtgctgatgtattttcaacatatgcggtttacataaattatgtatgtgtattatttatcccatttcattaagtgcatttggaataacatgcagcccttaaataatgttgtatggatgagttcccatttctttagccattagtctatccttagctgcttaggttacttctaacttctctctgaaaacaatagtactgaaatgaataacgttctccatactctttatacacactgcatcacctctttaatttctttcttccctttcagagttcccctggtgatttgactttttcttcccctccatgttgcctcttatttccagaataccaaccctgttggtgttcccttctttacatttccatagcatctcgaagaaggttgcaggagagtgtggctttgtgactcattcactctggcttcctctgcacagtcagaaattcagagaagtcacccagagttcagcagcctttctcacaccagtgctatgtccaggcaattaccacagctctgcccagaattgttgcttccacaaactaggttactaaaccccacttcaccaatcatccttacatgctgctatcagattctcaggctcttcatttctcttgcctgcttttaatcctcccacatctcggcttcccaaccttctccctctcaattctcaacctggcctcttggagttttgcagtttctctacagtgtgttagtaaactcagatgccagcagggggcgcctttcaccttaaatggaaaagtctggcacaccccctgcagagccataagtacccatcctctagcccagtcccttaggtgtcagtcatgactaatcccccgtcacatagcaactgcgagccgaggatgctgctttcagcctagttgttcaggctccctcgggcttgctgtacatttgacaaaagaagcaaagtaagccagcgtgcaggaaactatttgggttggccagaatgttcatgctagtttttccgttacattgtatggaaaaacccaaatgaacttattggccaacccaatattatatggactggaatgtttagaatcagcctgtcaacctgcctatagggcactgtcagcaaaaacgtgttctttttgttaatgaaatcaccgatgagattccttgggaatctttgttgtagtttccttgggaaaaggggtgaagggtttcacattcctttaccatctagtgagtatgcatcaagtgcccgcagtgtttgccagggcctggggatgcaacagcagcaccactcagtctttctcgaggatctaagtgcatacatg

SEQ ID NO: 29057 - DNA, 910 bp, Bovine  19866881051232
  misc_feature (1)..(1): n is a, c, g, or t
ntatctaaatggtaaaaagatgagtggatgtatatatgcatgtatatatagacatagtttcagggaaatttttatttgttatattttgctgtatggcttataataaaaagatatctacataattaaaaatttactgtgggttagacaatgtgaataaaccaacttgatgagttgaaccttcaggcatgtgcttaataaatcaagccattgaatgaaattagaaatatactatgcatttattcttagtctcatttagcagtcccagaactttcaaaaggtcaaatacagcaagaaagctaaaaatttacaattaacttactcttccttaacatggtgtacttgcccagcacactcagacaaggggctatttgcaaggctgactccggctgcaccaatacccttcccaccatgcccggtgggatcacggttttgagcaacctgatcacggtttgtcacgagcttgcctcttttgggcaaaagcaaacaactgtgaccagcttccccgagccattatgggctgtggggagttgaagatctcttctcacatacacgaagaaaaagtaattacccaggcaggctctaggggttttttaatggtgatatttaattcatgaggtcagagctgccaaaaccttggttggtgccacagcaagaatagccaggaaggtattttggggtcagaacagaccaacaagcctttccctgggaagagaaatggcgctggtatatgtttactagctaatctatttcttacactcagctccaccactgcaccggggactccatcagttcacgacctttcaccttctagattcaggcagcccccttccctctgcccgcagggcaaaccctctccgggggtccccagaattcctgagcccctcatcctggtcccggtgctctgggagga

SEQ ID NO: 29058 - DNA, 910 bp, Bovine  19866881063612
  misc_feature (1)..(1): n is a, c, g, or t
ncctcagttaagctcctttcctccccatcagaacctgagcatggacttgccctcggccagagccggcatcagcccctcccccaaaggctgaccacaaagtctgtccctgaatgtggttctttccagccatgctcactccttcctataaaaggcctcttccttctgagctgtgagatgctttacagatcttgcagccactcagctcacccgagcagtctcctaaagcaactgcccgggtgcccctgactcaacattcccttcccctgtcttgcagtaatccctgtgagtaaagtccttccttccctaaatccatactgggtttcatcacctcaaagcagcacatggacacaggaggggaaaagcaggccacagtagccagtcttgtccccccgggcagcctccctggccttccagaatggtgcctcctgcctccctgaacagaaccaggagagaaacagtaaatagaacaggttgccaaaagtcttaccagattttaaaaattcgaccatcttccagttcacagtacaatttttatcacgtggaggtggtactaaaataatggaaaacaacacacaagaaagcaacaacccaggtctctttctggtttggttccagggagggtggatttcagattcaagaggctcacacctcacagccttccacctcctgatgtggcggaggaaagctggacggaaccacaggatcattggtgaggcatggggttgggcttaagggtgattttggtgggggaagtgttttagcctttcattttctgggacccagccgtgaggcctggggcatctagagtagcatgcttaaatggaaggctgtcccctgaccccaccaggaagtgaggatgatggacactgggtgtggggcgcaaccaggacccttgtcagcaagacagagg

SEQ ID NO: 29059 - DNA, 1256 bp, Bovine  19866881070868
  misc_feature (1)..(1): n is a, c, g, or t
nttttgtaataaagaaattgatttaagtatgatccacaacgctttcctgtccaccttcctccttcacagaaagaaatgaagactttggataagctcaggtcacagccagcatagtgtgcagcatcactctggacgtgtcaagagtggttccagcaggaattcggaccctggttttcagggtaggatcaactctgtatcagtgatttgtaatgaggaagatggcagaaagataacaaactatcaaggaacccccaaagggtctgggtgatgacaagtggttacttaattaaaaacaacataggaagagtgaatgtgtgatttttctcttacaagtgctttagaaatttttcttctagatctctgccatagacaccccacagggcccgtagaggctccctgatcatttcagactgaaaatttaaaatcttgccatgttttatctgcctatcacttttagtgttagaattcccaaggcagaaattccaagcagtttgactagtcattcatttatttgggaacatccccttatgcttatttccatttaaatttaattttcacataagtttttttgaactgaatacaaattaattttatctccagatttctactgagaaagtctttccagaggtaagtagagatgccctagatctgtaattttaaagattttcattattcttttctggaactcagcaggcaaggggaaaaggagaggggcagctgggacacttgtttgtagagttctcaagcttaaggggagctcagattttaaccagttttcagtggaaaagctgtgcagtagagaatgcatcagaaatgtgactttcaagattctagatcctctacatctttttttcagttgtattgcctgtaattataaaggtcactcatttacatagtagcaattttctttcgtaattcttagtcaagctccttctgcttatggtgtgactctttttccagagaaagtaatgatgttttaaaaaattgtttaagctatgcaagtgtggttgtggtggtagaatgtttaaatacccacattatttttaatgtaattgttttgtgggtgggtcacctttggaaagtattttgttgcaggtttatagtctatacttaacaacatgccttatgacaatctgacatgttgtcctttgtaatttctacatttcatgccttttaaacctacttcatgtaaaatgaaagtattttacactccaatgcagtgtttaaaattagtcttcatttggccagttctgaaa

SEQ ID NO: 29060 - DNA, 1121 bp, Bovine  19866881088102
  misc_feature (1)..(1): n is a, c, g, or t
ncacacgactgcagtgttttaggacacgtgacatcatgttgcagtgaagcagttcagtggtttagaacaatacagtgctgtttgtgtttctgtttgcttccatggagggtcatagtggaggagttcatgcttgatgtcattctcaccctgggacccaggcttgtggagcttccactgtttggagccagttcctctgtcaggggagggaggatagtgaattgtacaccagttctcacacttctacctgcatgtgactcatgacacttctgcctacatgcacaggccagatcaagcctggtggccatctgacatcatgggggtggggaatgctccttcaccatgagcctaaagttagctgaaacatttgtaaaggcaactatcaccaagttctctgatatcaagttgcgcttaattgccacaggcaaccagttacattcatctgccattccacaatttaatatatcctggaagtagtgatctcactacatttgggccaattaggatatccccaggggaactgaatgctgtactttttctttcttacgtctaatacttgcactttcaagtttttaatccaagttatgaacttgccagagttgtgtttccaagatttcagcacttcctgtattattcagatggaaaccatcttaaatctacagaaggtaagtttagactaacaatgactctttgaaataaccagaacatgtatccacacaggctccatttctccttttctatttgtggattgcccccacccctcaacccaccctagccaaggacaatttccaaggcctattgactcatgcctatttcctcccatttttatttcctttgcttgtaaattgaaacagtgtttcctaattctttatggtttcaaataatttacccattaatagtttcatttaatcctccccaagtcaaatttatagtgaatggtttattctttttttttttttttttttttacagatgaaaaaaatgaggtttagagaggtgagataagatctcaggagattagtttctctttttcatgaaccaaaacattctttcatttattcactcagcaaaaaattattatctattggaagtatttggccagctgcagagagagcatattcaggg

SEQ ID NO: 29061 - DNA, 1159 bp, Bovine  19866881089478
  misc_feature (1)..(1): n is a, c, g, or t
nctgaaaatgcaactccaggacccaactgtcagggattgtgttttggtaagtgctgggttggggccgggagtcaatacttttcataagcatcctaggtaacttgaatgcccaccgaagtttgaggaccagcaacataaaagatacaacatgaaagttacatcagccttctcctcagccagcacggtttggatcagggtatgttggcatccccaaatgccttcagattccaggcagaaagtacaaggaggtgaagtggtttcatagggaaggaaggaaaagtaaggcccatggccctggagatgtataccctgcctaaaagcattcaaaaatttttaacactgctatgcggacacacacttctggatgctgctagcttatagcacctgcaatggactgatagccaataaactagatgatacagaagttctagaagataggccagaacacagtggtataccattggtttctcacggcattagtggaatgctctgtacagagtaggtggccagcaaacacttcattgatatgacctagataaaagtgcatctgtctatctatctatttattttacacacattgtaaatgttcatttgtgtataccatctcgagatacatctccagatatacttgtttaatgatcattttaagtctggggaagtccattcacaatttgccccagacctttatgtgagttagtgcaaatgaataccattcccaaatgcactcttaccgtatctcagccctgcggtgacgggggctttctgcctccaggagcaaactggatacccggagtctagtgaccaggcctgggttgattaaaaagtgaaaggcagttgttagagctttactgaagcaaccatctgagtcaaatcaccaggaagaaaaaagtgtaattcaatgcaagagctatttttattctggaaaacaaattccaaagccacaatcactgatattacaccttccctgagaggacctgtaatatcttcaggtgggtaggtgggttggtgaaatctcatggttccagcagcaaaatttgctaatgggaaagtatactgccttatgacccagcaatcctactgctgggcatacacactgaggaaaccagaattgaaagagacacgtgtgcccccagtgttcttcgcagcactgtttataata

SEQ ID NO: 29062 - DNA, 772 bp, Bovine  19866881097074
  misc_feature (1)..(1): n is a, c, g, or t
nttgggaagcccaaaactttattacttgtgtaattttttctagaattttattgtcaaagtttcaaacactccaaaaatttcttctgtaatttttaaaaaaataattgatgattcttatgctgtatttcaaaaaagttttttaaatagataataaaacttaagctatagtatgatcccatttggataaatttacatggaaatatatacagggttaaaaaaaactatgtaaaatagtatgctcatggtaaatgttcactcattggatgtcagctatcgttatcttaaggtaaacagctgatggtcaagggttcctcaaactcaagaatcaactcccgacttcctccaaatacacagcttccctttgctctgacaaaggtccatctaaggccaacagggcagttgacagcttcccttccattcattttaccctgtgctcctgctgaagggccgccaggagaaataagcttgagacaaaagaaaaccatggacatccttcctggctacacaggcagccctggctgcaggtccctggaaggagatagagccggaaatggtgaacaaattctacctgcttatcagacagttcagagcctcgcctagggagggcacagattctgcaggcagagacaagaggtacagtttggccgactggacaaccctgcaaagctgtattctggagatacagttaggtcaaacagggcacagcaggggagcagaagtgagtttcctcccaagggcaatggactttaaggtcatcttcctaattacattt

SEQ ID NO: 29063 - DNA, 1257 bp, Bovine  19866881108110
  misc_feature (1)..(1): n is a, c, g, or t
ntgtatacttgaaagctgttgagagagtacatcttaaatgttcacaccagtaagaccaaaagtggtaattgtgtgaggtgaagaaagcgtcaactaagcttattgtggtaatcattttgcaatatatatatatatcaattattgtgtcatacaccttaaacttacacaatgtagtatgtcaattatatctgtgtatctgaggaaaaaagctgtgaatgctaaattaatagtttttcaaaggaaaaccttttcctagaggctgaattaaatattgggtgcatttccagaagaaaatgacaaatgtccaatcaaatagcacatggaaagtggttaaaatgtcattgctgttgatggctcttggaaatcaaggataacaaatctgtaacctaagtgccagtgcccttattctaacctaaggcagatattcatgggccatcctgctgagtctggtgtcagaatcctctccaggaacacccactgcctctcagccatggtcagtacttgagatgaccccggggccatcactagcacacatgttgccttcaggcaaatcatgaaaagatatcttttctctagatcttatgccttcttcttttgcaatattaatgtattgatttttttggagaccaaaatatatctgttggaaaatcattataaacagcccatatctgatgtctaccatatatttgaaaccccctaggattggagaaggaaatggcaacccactccagtgttcttgcctggagaatcccagggatggcggagcctggtgggctgccatctatggggtcacacagagtcggacatgactgaaggcaacttagtagcagcagcagcagggatgggatatccttggatagtatactgtcttcataaaccattcacagcaaccctgggtgatactttttttgtcatctctactggagatgcaccccctcccctaaaataaatccttctcactctcccccagaaagagtggtctgagccccctggaaatggcccagttgtcctgacatgccagcactggagtttgtcctgctttggtatctatgaggcaactgaactgcccccctcctcttggtcagttgtacagtccatagaagaaggcaatatggcaagacataggatgctaactaggtgttattagccagtcagctatttccattttccaggcaacacgatggaaggcaaactatgggttctttgttccaattaaaactcagacttcattccattttttcccagtccctgaatttg

SEQ ID NO: 29064 - DNA, 764 bp, Bovine  19866881113040
  misc_feature (1)..(1): n is a, c, g, or t
ncacgcttctgggggttgagtcagagaaggcgacttctccctaatcatcatccttctagaaaacagaagtgctgagtgctgattcctaagagaactttccagcatgaagcagagtctgtccatgccttggttcaatggaaccaaactcccaagaggggtgttgacattcctaaagtcctacaaaaagttcagctgccacccagctttgcccactggctagcagacatggatactatggcaaacaccagcatctggctgccagcagtctggctatctggggaaaggggcagtctggagggctttagtgcatctcaagttaacctcactaatctaccctcacttccacagagaacagcatactgtattcagcgatctcagcaacagctgtgccttccaaatcaagacactgttcagaaagatgatccaaatgtgggctatgtgtttcagcaggatttggtgggactttcctactcaaacggtcttttgtgtgcttctcaaagacaggatattgacttcacgcatggctaaagcatgatggatgacttggagttctcaatttacatttggcttgtggtcagaactgactgtcaaaatgcatggtatctgatggacagtgcctggcttgttcagacttgtttctgatggagtgagtggatcctaaggcttttgctccatccaggtttgataagctaaacatggctggaatgttacaaagttcctcttgaggcagaagaattcagtgtccgaatggcagtctcttttac

SEQ ID NO: 29065 - DNA, 2005 bp, Bovine  19866881153867
  misc_feature (1)..(1): n is a, c, g, or t
nctgtggttagcagaacctgacttgtgactgggactctgtggaacagtgggacagagtactgagctcagagacaggtgatacaagaattggtcagcaagccagttggccctgctgggcttccaccttctcatctgttgttggaggggttttgtcccatttaggctctacgagcctttcctgcactacctgtttaaaggacactggataagtggaaaatgaaaaagaagtccctgcctcagggcatttgcttccccagttctggagacattcctggaaagagggggcagtgagataaaggcaaatacccccaaaaccacagaagctgaggatgaactgctaactcaggacccattgtttaagcaacataaacacaaggaagaaaattacagggaagaaattacaggctgctattttcataacccacaattttgaggcataaatccataatatttgtcttccgtgtaatttcccccagacactgaggactgcctcatcaatccagaaaccatactggacaacagcttgtttgctgaaatcaaatggagtctttctttcactgtaggcatctggacatctggatgcctccaggaagatataggccctgactctctcccttctcactttttccccaaaggagggcacactgaactgttgaacctgctcgcaggatgctcaaggtcatcttcaaaagcagataagcagcccaaccagtgggcgctatgcctagaggaccttcggccacctacttctctctgctcatcccttaaacacgttctggaactgtcatctcttcatcagacttcctcccttcagtctaaatgatgctaagatttagattttggcttgggaaagggagagatcccttggtctcaccacagccctgttagcgaaagagaaacagagtttgaacaagcctgacttataagagtggatatttgttgtcttttgtgtgtatatctacctccagacctcaaggggaatagtaattgtcaaggcagaatttaggtatttggaggtttactggttattgtacctactactacttctgactttcatctctccttgtatctctaacttcttttcagttcctcggagatatcttagggatggagactttttgttatcctggaaatcaagctgcagcctggaaaatgaatagctgttcactgctaatggagtgatccagctccttgtctctttttcttcaaccctatttgagttgtatttaatactggagaacccaagaaggggagaaaggcagaagaggagttttctcagcaataggttgggtgggttagtcaccactgcttaccattgcacttctcttccaaggaggcctggtggtaatactgatacatagttgatctggagcaaaactctgcataccagccagaccacggacctcttcccggctccctgcttccttgtgggtgaggaatagagtttaacatcttatctaggataaaggacagctctctttgaccttctcttgtcaggagcttcatttattgttggcagaattcaatttcctggatcaaagagaagcttaagaaaggcttaggcatatcccagcactctcggtaaaccatgcttcactgaagtgcatttaaatgagtcacagacatatggcttacatttcacttaaaatacacatggcttaagaaattggaggatatcgttctttaaccaagtatttggcagatccaaagtattcaaaatgtttttccaaactcagcatacagctgggctccccattccctgcagctgagatcctataattccgttagaccagtgctgaggaaaccgttagatagatgggtggggacatcagaatttgcagagagctgcctccaagtggctgaaattttcttcaaatatatatatatatatttttgaagtaccaggaactggaattaaccctgctgcattgactctgaggcagtgaaggcataagtggatttaaattctaagtgctaggttaggcaccttgccccagagagacca

SEQ ID NO: 29066 - DNA, 790 bp, Bovine  19866881177672
  misc_feature (1)..(1): n is a, c, g, or t
nctgattctcttgttctatggcagaaaccaacacaacattgtaaagcaattatcctccaattaaaaaaatgaaggcaagatcactggatcctcacagccacccagtgaaacaggtatattattctcgagaaaacagaaaaacaaaaagagctgaaagactttgctcatagtcctacccctgtgacagagctggtctggaaccgggcctgaaggactccatgctctaaccgctaccccatccttcaccatgacagcccttgtaagatttcacacatttaaaactgaggcattgaccggagttggtctgaattagactttagttgactcagatccagggcaacctgagagttatgatggttctccagtgccaacccctttatagctcagtcttccccagtccccatattatttactcagagtctatttgcatttgcggaggaagctgctagtggagaagctggcaggaaccttaatgaagccaggtgggacccattgaaatgggaatgtgtcgaactaagttatgaagaaatgaagccagctgtcagcaggcttaatgaaaggttaacagaaatcctgcaatgggtggctggggagactctgtctctctaaagaaaacaaaaagttgagaagtgggttccctgcttggaggcaagacccgaaggaggaagccgcttgtaacccgaaaggctgggtctgagatagagtttcatttagatttgtaaacatgttagagtctcaagaaaaaaaaagaaataaagaactgtagttctcagctctctagcatcaaagg

SEQ ID NO: 29067 - DNA, 2028 bp, Bovine  19866881178325
  misc_feature (1)..(1): n is a, c, g, or t
natccccttcttctcctgccttcaatctttcccaacatcaggatcttctccaataagtcagttcttttcatcaggtggccaaagtattggagcttcagcttcagcatcagtccttccaatgaatatacagggctgatttcttttaggattgactaaatctagcttactatatataaaaaataaactttaatccctacctcataccatatatatgatgaaatccagaggaattaaagacaaatttcaaaagtaaaactataaacaatagaaaaaaaaaacaggcaaatatagtagtaactttggaaaaggaactctcaaataagaccttcaaagcagaagtcttgaagataaagtttggtggattttaatacatcgttattaagtatttcagttcattgaagtagtcaatggacaatgccggcagaggaatgacgtagcagaagaaattacttgtaaatttcagatatgacattacaaacacacacactcagattgagagacagaaaggaaacaatttgaaaaatgggcaaagataagagaagtcagttcactgaaagggaaacgcaagcaaatgctggtaggtgaggagactattaaagtcaaaagtaggcagagaaatccaaatggaacaaatacatttgtcagcttggcaaaaattatagagggattatattgctaacaagataatagagaaaccactttcatacacagctggtataagtgaaactatgagtcattacagagagagcttcatcaatacatgttgaaattaagtgtggtactgctgctgctgctgctaagtcgcttcagtcgtgtccgactctgtgcgaccccatagaaggcagcccactagtctataatttaacaattctttgtctggttacctacctctaagaagctatttctcaagtccatgtcaggccatatatgagtttgtttattgaaattttttttgtgttgcagggagttggaggtaaactatgtgttccatcattaagaaaattgatggctctaatatggaatatactataatgatatacagcagttagaaacaatgaggaaaatgtacatatgataacatagttatagctcaagaacatcagactgagtaagcaaagaagctgaatgagatctatggcaaaatattttgtgggtttaaaacataatatacaaagaaatactatatatctttcaaggatacttatatgtccaatgacatttacacaatgcattaaataaaaactgggatccatgtggagataaaagggaggagctgactcattggctaagaccctgatgctgggaaagattgaaggcaggaggaggagtgggcgacaaacaatgaatgattggatggcatcactgcctcaatggagatgagtttgagcaaactctgggagaagcctggtgtgctgcaatctataggatcacaaagagtcatacacgacttagcaactgaaccaataacaacagcagacctaagatgatattatgccttaaactgtactatgaaatcaactctgtggcagtgggaaccatacacacatttactcacactgagaacacttattcattcaacagcacttactgagcacctatttgaagacaaaatcaccaaatctcaccacataaaattaaccatgtttaacattttgtatacctgtgcttttttctccacctccttctcctatttctgaattcttgactaacaaagattatactattctgctgaaacacattttttcctattgagtgatatcattcccaatgctacaaaactagctttattcccatcctgaaaaatgacccattctcttgaccactatcatctgcctttctacttctggtatcaagacaacattttcaaataacttactttcacattcacttctcaagttaggacagttgctacttcttccaaacttccatgaaagctgtttttttcagaagttgccaatttttttttaattttaagaaagcggtattttctctgtttaaagtagacacagtttagtagtagtaccctgg

SEQ ID NO: 29068 - DNA, 1530 bp, Bovine  19866881316579
  misc_feature (1)..(1): n is a, c, g, or t
ntcttgaaggctctgtcctttttcacctttgtacaatattgatggatcaggcgtgcgtgagggtgagggggagtccaagacacatgacatgaggcaggtttttccttcctgttgccagtgactctgttgtagtagaaaagcgagatgcaaatacccactctttaatgaagcatacttctttccctttctgtttcctcttctcgaatctagtaatggggtgggatatggggagccataaacaggcaagggatgagaagatttcactgtcatatattattattgctagggtgtcccagatggctcagtagtaaagaatctgcctgcagtgcaggagacctgcgtttgatccctggatcctgaagatcccctggagaagggaatggtaactcactcctgtactcttgcctggagaattctcttgagagcacagagcaagaattagaatcctgctttcagattctgataggttactccttgtccggtaaccagtacaggtatgatgagcttacggtaatgaaaacctgatgaggatgaaaaaaattgctgaactacgttgtaagtgtatcagtgcaatcaaaggataagtgggggttaatggttggtattggcattaatagtaataacttggttctcagttgtctaacagcttcagcaaattgaaacccactgctattagagatgggttaagtaatataaagataactaggattggatggtcaaaacatgcagcttcagaatcattccttagtcttgtgtgaccttggaaatcctgtcactttcccatgtctgggcctcagtgaacccatttgttaaatggacttgaaaagtgcttgttccagtccccctcaggttgttagaaatgcagagaggtatttttgactgtcacaatggtagggcactacatggctggcgtgtagctaagaaggcaggcaaacatcttgcgatacaggggacttgagtgcacagaaagagtctcatataaaatgctaatggcaccccagctgagagacactgcaatggtctaatctgagttgtattcagaatagtccatgaataacagctcaggagaaatggggctaagggttggaaacaagaaaccattgccagagaacttcttgatctgatttgattttttaaataaggcacttttataggaaataagaaaacaacactttcggccagctttaaaattcctcatgggttatactggcctctaagacatttgtaaatcccctttttgtacttccttgttctgtttctcaagaagcacttggactatttcatgagacacacataaccacgataaaaacaaagtgctctcatttcccctagcctgtccccgggtgtgtggagatcgccccagccgtaaagtgctctcatttcccctagcctgtccccgggtgtgtgaagactgccccagccagagcagagtgaggagtccaatgtaaatagcagacccctgcctctgcatgtggctaggagattacatttttcagaacaaaatcaaataatgttctagaaagcagtcac

SEQ ID NO: 29069 - DNA, 982 bp, Bovine  19866881428796
  misc_feature (1)..(1): n is a, c, g, or t
naatgtgcagatgggaaaatagaccttaactcatatattcccttattaactatgtgtgtgtatgtgtgtatatgtgtgtgtgtgtgtgtgtgtgtgtgtatgtgtgtatgaagaagcgtccctaccctagtccagactgacactaatttactgtctaaatttggcccagtttactcccctgtagcacaaaggggatggatcagatattctttaaaaggaattctagctctaacaatttataattctgtgaattacagatgtttccagattcaatgtatgagcttcagttttctcagttgtaaaatgacttttgcaagatggttgggagagttaaagtgcatagaacagttcctggagtataataccagaacaaggactattaggactatcatcagccattattatcacatgccatggtatgccatccattagaagtattaataccattgtctgctttcttctgagatatgttgactgtgttaggaacgtccttctttctttctgtccatatgatttgaaggggaccttacagaagataatcttgacacacagggtaggttattatgaaaaatattgactgataacttgtatctttgttatgctgcattagaatttgagtgtctctgacatataactacttttcgttttggaggtggttcgtttcttcccttaaaacaattcttctgtggactcaatatcgattgcatctttaactagtaacaccttagaatcatggaaatatcattaacaatgtcttagaaaaggctcctgccccaaattcaggtcactcaatatgtgccatgctataaggtatcaagtacctgcttgcaaggatttcaccctctacctaaacgggttacacagaagacagactttgaggtccatggctgagtgaaaagagagctactggagatgtcatgacattgcaacatgagagttcaaaggtggggaaaaaccacattccacagtttgtgagagggaa

SEQ ID NO: 29070 - DNA, 759 bp, Bovine  19866881690503
  misc_feature (1)..(1): n is a, c, g, or t
natctttggatttaccaggttgttttttatgcatgcattagtaattggagtttcaatgattggaaaaatacgtgttactccttttactttcagtactaaaaattccaacttgtggaggtcacttttctagtaggaaaaaagttcgttcctatgccatattgaaaatgaaatattaactcctcagattgacaaacatgaatggtaaccccaggatgcgtaagaagatacccactctttcagaaccataaatatcaagagtggtaacaagatttagacaatgtcatgacctaaagactaaagatactctccatcagctctgctcaatagaactttctgcagtgatggaaatttaaaatcttggctgtccaataaattagccactagcccatggctattgaagatgtgaaatgtttactcattcactgtggtttagtgtgactcagagctgattaatgttgtgcaatttgaattaatttacatttaaatgtaagcattcacatgtggctagtggctactgtattggacagcacaactccagataattctcagattataaaatctgagtctttttattctataacttccaatcaatttataaccaaggagtgtaatctattgtccgaaattctaagtaaactgtgcttacagaatgttaggcttggggctcttgattattttttttccttcccctaggaatagagtaattaggactttctttgaggtagggaaagacatgagggaaagggaaatgagggatga

SEQ ID NO: 29071 - DNA, 1385 bp, Bovine  19866881978114
  misc_feature (1)..(1): n is a, c, g, or t
ngtgatacctgcagaagatttttaagaataaaatacgtttttctgttttttctacttagccattccagttcccacatccctaaaacctggagaagcaatcaattaacagtgtattttctaaagataattttatctctaccttctagatacaattcttgtgtatcttctagagataatctatccaataaggaatggccacatagtctattcacatttttttttttttacttagtacatagagagctgcgtccttttattcagcttatggagtcccaatgtatttgggtgcacgagatttaccttaactgataggatttattgaagtatttatgggttgttattgctctaacagtgctgtaataaatatccttgtaaatctacttggccaaatacaaacataggacacattcctaagcagtagtatggatgggtccaatgacaggtacacttaaaattctggtatctccaaacggctttccattggggttgtacacatctgtttccccacatgtataatatggttttctccacaactatactattattcttgttacagtattatcatgccaacttatcatattaatttttcactcttttccaatatgatatatgggaaaaaaatcccatctcatggttgatactttgctcacagctccatcgtccacctgttgtgttggattgttcttatccattcactcactgtgagaatttaaagcatcaaggaactaggaggaatactgtctactgcctcctgctgaaagtccgccttgaggcaaggcgataaaaaaaggtaatatctggagatgctcttgtaaagcctgatcctaagcaatccagagtgtctgaagggggaggctggctaggaagcatcggggtggaaggagggtggtccgctcgctggagagtgccttaccagggccccacagctgctggcactgctcctggtaggtgaggcacatgccattgtagcagtaggcctggccgtcctcgcaaggggtgccgtccatctggtagaagttggtggggcactggggggacttgcccgtgcagaactccgggaggtcgcactgccgggcctgtttacggcacagcgtgcccggggccaacagctgagccgaggaacaagaagcgggggataaagtcaatctcccacctgtcctcaatcctcccagcaagggctcatgagcatcactcccatggaacagaaaatccctcaccattatttcagagcactttttacatgacctcattagcttaaaccaccataaatcatctaacatgaaacatctaacacttagtttcaaggtggttttacacatgttaactctacatagcagtcttaagatcaggtaagaaataatatttatgcaactatttacagttca

SEQ ID NO: 29072 - DNA, 744 bp, Bovine  19866880609927
  misc_feature (1)..(1): n is a, c, g, or t
ntgacttgatcacttgacttattagcccacatcaatccaaataaagtgtcttctgttttttggcgtaaatttaattcaattcttattcatgcttgttcaaatctaatggagcttctctattaagatggattatagcaatatacaatttctaaattttcccattttgagcctgattttttcccatttctatcagggagaatgccagggggaaaaatgagttaaatataaacattttaaatgggcatgaactaattttctctgatagagaagaaatagttctacttaaagagaacaagacctcacctgcaatatcttgcagttcttctgttcctcacctctgttctcttctagtcatttttccgagactctactttttgctcatcctgtcacccttactcttctacttttcctgatatatcacaatcactcttactccacacactttgattttatttgttcatgtctctaccactgtaataattgagcatttcccccatacatcttatattaacttaatatgttttctattgctgcataacaaattaccaaaaatctaatggcttaaaatcataccgatgtattagttcacagttttgtaggtcagaaatccaggggcttcacctggattctctgtttaaggtcttgaaaggctgaagtcaatgtgtctgctgggcagtggaagctctggagaaggatctgcttccaggttcattcagattgttggcagaaaccggttccttaggg

SEQ ID NO: 29073 - DNA, 700 bp, Bovine  19866881286144
  misc_feature (1)..(1): n is a, c, g, or t
nattgcctgattcacctaagatggcaaagtaattagaaacatgaatctaactcaagcagtctggttccatagcccatgctgtcaaccgttacactatgctgtatctttaactgtttgattaactcagaaacaattttatgcatacatattaagaaagcattcatgaatctggatttcactaagaaaatgatgcaatatgggggccccagtaaataggggctcctatagagtatatttgttggaaaatcatgcatataaggatgactggatgttcaagcaatttagattccagcctactcagatttaaaatacaagaacagtaaaagcttcatcagctcgaaattactttttaaatgatgtgagggcgtttcaagtcaatttgaaaagattaggggataatatggatttgccaagtactttgacgtaccaaggaactgtgagggcacttgaaagattacacaagatatttaacagctttaaatcttcaagtttttaattctttgccttatttttttccccagcatttcaccttctttattgacttgtgcctgcagtccttctggttagccatttagccaggtaatacctacagtgaaaattaacattaatacagtgccaatacatttattatgagctgtcctcttacatcaatattttccattggctgtcttttttaaaattaattaatttactttaattg

SEQ ID NO: 29074 - DNA, 2047 bp, Bovine  19866880341515
  misc_feature (1)..(1): n is a, c, g, or t
nctcacaggttattgaaggattcaaggagttattatacataaaatccttagaacgaagcctggcacatatatttgctattattcctgtttctgatattctttagtggactggatttcaaagccattttagaaaacgcatttcaaacttctctaagccaggactatttgaaatggggtctgcggactggtagccatcctgtttgttactgatctgtgaaaatataagcagattctcccaggatataaaccaactattcggttgatttttttttctccccaatgcaagattctcaatgaaggaagtactatgttgattaacattctattgtaagttccttattttactgcaaacaagcaattgtctgcattatacatacagatgaataacacatatatatatataatgtagaaccatagcttacatataaggtaagtatatataatttgtctgcattatgaaaagaaaaagatgcagtactaccaattccggagtaaagtctctttctccaaaccaattattcagatattccaagacactggttactgttgcctaaaaaaggggggaggggtaagagatggaagaacatcattagtaataaaacactgacaagttcaagctgagttacattaagttcagtgagaaagcaactctgtttaaaatggacttcttctttagacttaaagagaaacctttaactctatttaataatttgattagatggaacactcagtgagatgaggctgttttgagaaatatttttatatattttctattatcaacacggtttaaatcctaggatttagttagtaactactaatgtagttcagaactatttttttaaaattccccactctcttaaaaaaatgtctttgcataaattcagcttatttgcattaaatcaaagtacaaatctaaacacaaagttagctagagaaaattaattttaaagctatatatcgatagactttatcaaattctctagcttattctagtaaagatgctgctgctgctaagtcgcttcagtcgtgtccgactctgtgtgaccccatagacggcagcccacgaggctcccccgtccctgggattctccaggcaagaacactggagtgggttgccatttccttctccaatgcatgaaagtgaaagtgaagtcgctgagtcttgttcgactcttagcgaccccatggactgcggcccaccaggctcctccgtccatgggattttccaggcaagagtactggagtggggtgccattgccttctccattgtgaagatacatggcccttaaaggtcatcatggaaactttgagtaatacattggtatccatagtaaattggcagaggtcttatcctctagcagtttcatcagttgagtttagtatctattgatggtctttgtctgaaatagttatttctttgacttaagataagggtgtcttccttctgagaattaagactctttggcttttacctaagaacatttggaagccactgaggatgtaggttcagtggaagattgaggaagtgttggtgccttgattagattttaagaggtcactctgaatgaagtgtggggatcaagacagactagaatggtcataggtagatgggctaggctttccctctgggagtcccagtgaaaaatgatgaccaattatccaagtgggtggggccagagatggacagaagtagatggttttataataagaagactttgcctatggaatgcattgatggctcttattagagctgttcccttattatatggaacatcttgtgtacaatctaactaaaaatgcagcaggaatggattgatataaaatgatgaaattttcacaaaacgtgtattaaatcctccaactcctcttgtcaacttggagatggcagttgtaatagcctgttcagcctcatcagccattccagcaaatacactggtggggaccaccgccatggctggtaatttattcagaccaacagggaaagccttgaaaaacctcatctcccacaatctgcagcatttgttgatcagcaaagtaccaacattta

SEQ ID NO: 29075 - DNA, 1719 bp, Bovine  19866880366524
  misc_feature (1)..(1): n is a, c, g, or t
ntgtaagatgctgctgctgctgctgctaagtcgcttcagtcgtgtccgactctgtgcgaccccatagatggcagcccaccaggctcccccgtccctgggattctccaggcaagaacactggagtgggttgccatttccttctccaatgcataaaagtgaaaagtgaaagggaagttgctcggtcgtgtctgactcttagcgaccccatggactgcagcctaccaggctcctccgtccatgggattttccaggcaggagtactggagtggggtgccgctgccgtctcccaagtgtaagctgaggtggatgataatagtagttccacctcatagggttgttatgaagttgttatgtgtggcacataataaataaaatcctgggaagcttacgtcactctcctgacttggaatctatcacagatctgttgtttgtaccttcactctgctgtggaacttactctcacagttacaccttggatccagtcaccgctaggaacccatctgcttttggaccactacctttctcttttccactgtcctacttcccaagttccatcatcttcagctcctgaagatttgtggagatttccaatgttttgacattttcttttgcctcctgctgagttaactttctcctctctttcacctgaatcttctagacttctacagccagcacattcagttttcttgccccatgtgttgtacaatgtcaaatcctgggtcaatccaacagaaagtcttccctggttttattcctgggcttctgaaccttgatagaaaccaggaacatggtggctagatgtcactataaaaagttagcatgtccaatcctaagctgacccacacagtccctgggtgatcctcatggtgcctgtctcagctccctcttctacttactgtatcaagttttcccagcatttatgacttttctcagcctcctaagccagacctttttctttaccagtgccaggaggtatgaacacttcacttctaccattaatttttcaaaatagtcttcttcagcatatattttttagctccctcctttttccagagcccaaggttagttccaccactgatcctgtctgctttcattgcctttggctgtccagtcctgcagtggccttttttaagtcttctgcatgttgagtctcttacttaatacaccctaatactatgccgtatggtttcgttcatcttacgaacctaacctcatgactctctgtttccctctagttgatgcttccttgtgaagcatggctgaactgtcttcagttcctcacctcgtgtgaatccctcagcttcctgcatctgcttccctcttattttactagtggccatctgtttgctgattccattgaacccttatcctccattttacttgaccactttactggatagttagagatttcctattcaaaactccttcttgcgttttcctgttctggccgctcattttaaaactcctctgtggactcatttctcttcctgcttcttaaatgctcaaaagggttactttcccagtttctcttctgactcacaagctctatttacacactgtattccactttaaaatcagcctgtaaaccaaagactcctgattttatactctagctccatatccaaattgatcatgtgatttcctagaccattaataaacccagactgattcctatttagaattcagagctctttggatcggcctctgcttaccgtttaa

SEQ ID NO: 29076 - DNA, 1136 bp, Bovine  19866880381155
  misc_feature (1)..(1): n is a, c, g, or t
ncagaaagtgaagaggaactcaaaagtcctcttgatgaaagtgaaagtggagagtgaaaaagatggcttaaagctcaacattcagaaaactaagatcatggcatctggtcccatcacttcatgggaaatagatggggaaacagtggaaacagtgtcagactttatttttttgggctccaaaatcactgcagatggtgactgcagccatgaaattaaaagacgcttactccttggaaggaaagttatgaccaacctagatagcatattcaaaagcagagacattactttgccaacaaatgtctaactagtcaaggctatagtttttcctgtggtcatgtatggatgtgagagttggactgtgaagaaagctgagcgccgaagaattgatgcttttgaagtgtggtgttggagaagactcttgagagtcccctggactgcatggaggtccaaccagtccatcctaaaagagattcagtcctgggtgttcattggaaggactgatgttaaagctgaaactccagtactttggccacctcatgcaaagagttgactccttggaaaagaccctgatgctgggagggattgatggcaggaagagaaggggatgacagaggatgagatggctggatggcatcactgactcgatggacttgagtctgagtgaactccaggagttggtgatggtcagggaggcctggcatgctgtgattcatggggtcgcaaggagtcggacacgactgagcggctgaactgaactgatagggaagtactctggtattaaatcaatctgtgcagttaggccagataattctcctttctaagttgattttgtggctgaacttttattatattttgaatgtggtttgtaagtaagacaaatgaaagataagttcggagaaggatagtatttggcgttatgttcattgtacggagttagatattttttctattttgaagttctattctctttgttctaacatttattttccatcttaaaaattttattaggaaacatttaaaaagagtttgttttaccatgacatatcggccaaggcagtgtttctaactgtggtcagatgcagtgtggagtaattcttcacagtaataacgatacttgactctcccaatcatattcg

SEQ ID NO: 29077 - DNA, 3503 bp, Bovine  19866880396444
  misc_feature (1)..(1): n is a, c, g, or t
ncgtgtctgactctttgcgaccccatggacttacagtcctggaattctccggccagaatactggagtgggtagcctttcccttctccaggggatcttccaaacccagggttctaactcaggtctcccacattgcagtctgattctttaccagctaagccacaagctgaattaattcctttctttactattattctatctaggagatgtataaggtgctttgaaatggtagaatcatgtagctgtgaagaaaatgatgggataaaatacaaagtgtgcaatcatctttgaaatgacactttaaaaattaattttaagcagtttgcatggtaaaaatttatatctaagatgttttcttggaaattagatggcttaaattacacagttctgatccgaagaacctgtattcatatatgcgtatgttaaatcactatctctttaagtggattaaatcattggatagaaggataatgttagttgtaattacttcattaaattgagtatacttgtaatgtctccaatatgagaaacttatgctaatacttttataatttacttagcaaggatttgaattaattttatttgtgtgaaaactgcttaattttatttcatggcatatttatatgatcttaaaaaaatcttagacatttgacatttattaaattagttagaaacctgaagtaaattttttctcactggttttttttcctacgtttccacctttatatatatatgcatatatgtgtgtgtgtgtgtgtgtgtgtgtgtgtgtgtataagtaagtaaatgttagtcgctcagtcgtgcccgactttgcgaccccatgggactgcagcccactaggctcctgtgtccatgagattttccaggcaaggatactggagtgggttgccatttccttctccagggaatcttcccaacccagggaccaaacccaggtctcctgcactgcaggcagattctttaccgactgagctacaaaggaagcccatatatatatacacacacacatatatatagtggtaaattcccactccagtactcttgcctggagaatcccatggacagaggagcctggcaggctacagtccgtggggttacaagaatcagacatgacttattggactaaaccaccaccaccaccaccaccaccaccagagataaattatattctctagctttcaaatatgctgtgttttatttttacaggagataggaacaggtggcacttgtcagtggaagatatgtggactcagtcccactacaaccttagccatatattttgaagttgtcaatcaggtatgacttttatatttgaatattgaaatgtatatttgaaaacgtaatttaggccatgagtatttccagagctatgatcaaaagcttgttctgttttgaaatttttctttgtcattttctgtttctcaaggctacactccttggtgagaggacatactgtataataagagatgtcagggagagctgcaaatacccaaccttggacaacccagcttttagtcttttgttttaaagctgtagcataaataaaatcttaaattctgctctagttatgcatttttgtaggtgggtatctagttcctcctaggtgtcgcaaggtatatactgatatatgagtccttttgaaagaaagtttaagatatcaaaatttatagaaaaagattggaaggtaaaagatgccagtatttggaacgatattttcttctgctgcaggagaacattatcatattaaagaatgatataacgtataaatattgatataccagtagttattgggcataaaatgaactatgaagtattagtagtgagcctgcctaaaatatatgcagtaattttcttttttaactattaaaatttgtgaaaaagatagtggctcttattgacagacagtaacaacaacaacaaagcaagaatggctgttgtcaaagggcatgaagaaagtttcccttttgaccgtcttgtttctttctgaggatgattatcatatattactgttggtctcttctcattaatggttttctgttggtcatctgttcatcatgtgattatcttcctaaaatctgtgttttcatcttatgtacgtaggggaggaaacttagctctttttcttttattgaattgtagtcaatttgaaatgttgtgttagtttcaggtgtacagcaaagttatacatatatatttttctattctttttcagattcttttcccttataggttattacaaaatattgagtatagttccctgtgctatacagtaggtccttgttggttatctgttttatatatagtagtgtgtatatgttaatccccaaatcctaatcccccaccccagccttcccctttggtaaccataaatttgttttctatgtctgtgaatttatttctgttttgtaaataagttcatttgtatcttttttttagatcctacatataaatgataccgtatgatatacgtatttctctgtctctcttacttggtatgattatatctcagtccatccatattactgtaagaggcattatttcattctttcttatgttagttccatttctttttatccagttactgttaggcagaattgcctcacatatgctttttttatcttttaatttctttacacttctcctttcattttgctttttcatgtttctctgaattatattacttgaaattggtttactagcttgactcagtcccctcttatccttcataattttgctcctctccccaatacatttctccttcatgtggtaaatcaccattgttctgtatgcccttgaaataagcatccttctgatagattttagaatgaattgttagtgctagaatatgcaatccatgagtatatgaaaacattgtaatagactttgcttagattctgctcttttatttttatgcagcataatgctccaattcctcaaggagggcgtggtgcaatccagtttgtgactcagtatcagcattcaagtgggcagagacgcatacgagtgaccaccattgctaggaagtaagttgtatttgttagagatttaatttatgtgtcatgctccccaaactggcttcctattttgagtgacattttggagtgaagttagtctggaaaggattcttagatgaggtgagtctagacgtgaacagacttttggtctatttttgtttgtcttggacttgattgtctgggtaggaagtattggtcagtataaacttaacctgatctaggtatggtttagaaaatgcacactgaaggaaggcatcatagctctccttttattgaaatgtatttaaattccagcttcatttctaaaatcatgagactattttggtgagtgatggacacggcctaacgtttcaacagagtgttgtgttggatggcctgttaaatagtagagggcattagatatattgtcctgctataactttgctctgacttaaaatccttgaatgaatgttaagggagtatattactcttttgaagaaaaagtgcca

SEQ ID NO: 29078 - DNA, 1686 bp, Bovine  19866880487098
  misc_feature (1)..(1): n is a, c, g, or t
ngagaaaaaaaataagattatcttaatttatcgttggtatttgctatacattaaaagttacaatatattcattttggtgagcttgtatgtgttaaaagtatgaattaaatattggcaacacctaaaaataaatggcttttaaagattgctttcactgtcaatttgaattgattcattttcagaaagaagttaattttattgaaattggaattactgcacagtttagctaaatcatgagctattgtatcttttcttaaaacagtcaagtggattatcgagcaaaactctgggcttgcaacttttgttatcagaggaatcaggtaagaaagcccccaatgtagatgttaatgctgtaatactaatactgtaggaaaatacatatttgaaaataaagattacttttttataggattaaataaataagtgattaaagtatctatttttaagtaattaagtgatcaggaaataatttgtttcagtttaaaagttcattacttggtaataatttgttaaaatattttgcttttttctgcctgtagtttccaccgacttacgctggtatatctgaactgaatcagcctgctgaacttttacctcagttttctagcattgaatatgtagttctggtaagaacataaaagtaactttttaaggaagtttaaaatatccagtaatatagcaatactttataccaaaataattattcaattgagctgacttaaaaggcatcattcttcattctcacattgaattgattgagcatttcaaaggtaagaactgtcaaggtcagtttgagcaaggtaatttctattatagttatttgaaaggtggccaggattttgggtggggaggtttgatttgctatatcgagtaggttaataaatagtaaagtatcaattttgctttgtagttggaaggttagttacagatacttggtcaatatgaaactggagcctaatgatatatcccaaagtctaataatgaaattactcttgaattggttcttgttaggaaaataatttttcttccctttctgaacagctttatataatttattttaatattaagtattaaggtaatgtcttttatgaatgttgtagagatagcagaatatgactcacttgagtctgtcactgatttgtccattcggactagtttctagttcccttacaatgcaattcagattagatgattattttataaaaatcacctaattttgctgttaagctttaaagttactgtgttcttgttttaaaaaaagtgcttgttgtaagaaatgaaacttcatgcagttaagtaaaattgaaagtgaaactccccttcttgtaacataactaatgttcataaacttaatttttcacttgatgatgtattagatatataatgtttcatttgtaaaatggcttttttagaattccattgttaaacatataataaattatttaattagtcctctattgattatcctatgtattgagctgaagtgttaaacttttaaaacaacattttttttaatcacaatcttttttaaaagcgtggtcctcagatgcctttgatattcctctatgtggttgatacttgcatggaagatgaagatttacaagccctgaaagaatctatgcagatgtcactaagccttttaccacctacagctttggttggcttaattacttttgggagaatggt

SEQ ID NO: 29079 - DNA, 993 bp, Bovine  19866880499748
  misc_feature (1)..(1): n is a, c, g, or t
ngtttgctcatgcgcagttacgcccccttaggccggcctcttgctcaactccgcgcctaatccgcctctacgtgcgcctgcgctgtgaccccagctctggcgcatgcgctgggtgggacgctcgtcattgaaaactatggcgtgggtacctgcggagtctgcggtggaggagttgatgccacggcttttgccggtggagccctgcgacttgacggaaagtttcgatcccagcgtacctccgaggactccccaggaatacctgaggcgggtccagtgagtgttggaccctgtgcgggtgggccggttgtccttacgcccttgggcagagcgcccgtaccccgctcgaccccaaagtgcgataaagccccagtactgtcccgtccccatactctgtcagaacaaaatcccttgattacatctttgtgtgagcgagtttctgtgaacttcattttattaaacctgattactcgtgacaagatacatgctcttaaattgctttcagtccagataattttagaaatttattgtttagagcttccattgcaattctgaagtttgtaattttatgttgaactgtagaagttggatcgcttgttaacactacacgtgaacaatagtaatcacgtttttttgcatttattacttgtttgtaggatcgaagcagctcaatgtccagatgttgtggtagctcaaattgacccaaagaagttgaaaaggaagcaaagtgtgaatatttctgtgagtgttattatatgtcaggggatttttttttttttttttccttccccgcaaattaaaagatggaggctcaccctaagaaagtatgagacaggttaagttacaatgtaagatttgacttatgtatgttcagttagacaattgcttgtactttttcccccaaaaggacaactggcgtttactacctccagagaggctttcagtaaccctgacattcctggagattgctcataacattttaggagcagatccggt

SEQ ID NO: 29080 - DNA, 1252 bp, Bovine  19866880516437
  misc_feature (1)..(1): n is a, c, g, or t
ngagggtgcagctgttggtttgtttacttttattaaacccactcctcttattgatttcccacactgagaataactaacgcactttaaaacggtaatcaagtcatcacttcctagttgaatccaacccttcatctactccacacctgaacccacacagctgaatgtgactggagaaaaacatacaactgtgctgaatgatcttactttaaattcatgaccaccactttcctaacaagcctgaaccctccatttgaacactagatccaattccgtctctcctgctcataaacagcactctcacaatccctcttccctaccacatcgttaatttgtccactgggacttgtcatgcagtatttctatcatctttttttttttaaagaaacactcatgattccacttccctcctctactatggccccatttcaacaccttgaaacagaagaatatacttgctctctccaatttctttcttcctgtttaaacttactccagattatgctcatgccaaagtgcttttgccaagctctccaatgatacccacaaggaaaatccatgttcctcttcttacctgaattagcaacttttgacatggttgagcgctatttcctcctttaaacactttttttgcttgactttcagggcacatcttcccaaagcttcttctcagtctcttagctgctgcttcctaatcacccaacctttaaatgatggagtactttcaggcttacttgctctggaactgctctttcctatacttgtctatatgtatatccacatctatctacctatctaccataactcctatttaggtcatgccattgtaaccaaaccattctaaatctcagtagtttaataaattgttctcattcacgttacctgtcaacagtaggttgcctaggggctctaccccatgatgtcccttctctgggaaacaagctgatagagcagctaccatctgaagcattgccaatcaccctggtaaattgtgcactcatctcaagagcttccacccaagagtaagacatatcactcccactctactttaattggacagagcagtcatatgaccaccaggactaaaaaagtacagttgtaagatgaaaccatattaaaagggaaaatggaaattgtggtgaatagcattaataattaccaaaactcccaagttcataccttctgcctagactcccacttaaactcttgatttatgtattgaacctcctgctcaacatctccactaagatatcta

SEQ ID NO: 29081 - DNA, 1987 bp, Bovine  19866880535014
  misc_feature (1)..(1): n is a, c, g, or t
nttcaacatgatgattcaaggtgatttattagtattgatggtatttattcacctataacctgctaataaacagaacgatgagtcattactgtcagtgtatgagcttcctcagagagtttttgttaatggccagtgacatttactgtgttttgaggtggttgttcacaagatttggaagaatttgttgactgcaaagtgtaaaataataaactttttcagatgattgcaatgggcaaatctagttaattttgaagtatacacttggtatttaatgtcatggattaatttttatgtgcaagcagttattaggtttaaaagctattctcaataaaatttactcattttaacaattttctttattttaaaaatatactattctcttttgatcagatatacaaagcacgtattttataaacatcaatatctttccaaagtgattggctgtttttctcaaggttcagtagaagattatgaaatccataacttatccaatgactaaggataaaaattgccatcaattttagatttattctttggatattatgtctgtatctctaccctaatggctagacagtccagaaatgagttgcctccatcctggcttgggagttatactcaggtggaggagagggaaagggatgggtcgggaccctgggatctgtaagtattgagctaaaatgtaaaatcctgctttccatttctttttcagaatgtgatagatactattgggataaaaataattctctgggatgaaataaaatgaaaattattctagcattagtactaaacttctgattagttaaatatggcagtgattgatgaaaatatctagtattggtaggagtgttagtaatggaaaaatgttttcaacctgtctgtgagacagcattgcattattacctagaagtcatttcattaaaggtaaacttttattttattctctagattcatatttcacttaaagtcaaaattgaaaagtatggtgattaatctcagtggaatttgtgtctctgttcccataaatgttgtctaaatttccccagatgttatgattaattttcattattgcttttagcttatctttctttctagttccccattttcttttttctgatctcaccctgttctataagaacaaattccatttcttatgtaagaaacaaggaaggactcaaattacttgtaattgtagagtttgttttgaaccttgttccccagtcctttttttggctgtgtgtctccattttctggggcttctcaagtggtgctggtggtaaagaacctgcctgccagtgcaggagatgtaatatatgcaggtttgatccctaggtcaggaaaatctcctggagaagggcatggcaacccattccagtattcttgcctagagaatcttatagacggaggaatctggcagattatggtacataaggtcgcagagagtcagacctgactgaaatgacttagcatgcactgatgcaaggggtaagaaagcatctatctcaagaaactaatgtaaatagagtttaagataaggtcactgtctccagaggggaattacaaacatataaatggtaaaagaaaagagtcttttcatatgcaataagagagttcattgaaactactgaatgtggttagactcagggttccctaattaactagagcaaacatgtaacattcttcaggttagattaattaaacatttgtggaatagagttcttacagatttcacaacactgggctaaatacctggtataccaatcaaaacacatattttccacctcttaccacctcatttaagacacaacaagagtgtgaaattatttttgtacattaaaaaaaaaattttattgtacattaaaatgaattaattaaattcagttcatcaaattttattcacattgcattaaaattttttattgttataacataatttccattgttcctggtaaagacaaatagacacttaaaaaaaaaatcatagttattg

SEQ ID NO: 29082 - DNA, 1652 bp, Bovine  19866880610372
  misc_feature (1)..(1): n is a, c, g, or t
ncatgtcacttaggaactaaacacttggtgtttggcaaggggagatattttaaggcttgagagttaataggtgaactgtgaatatatatattttttcatacactgggatatttttgtctttgaagcaaattaaagccttgtcttccaaggcagggagttatgtgcaacatactaggattatcttggtatatttttcaaaatctttttctgtctagatattttgatagatgatgagagatattcatgttactttaaatatgttcatcgattggaagatagttgacagggcagagaatgttcatataagtcagagaattaagaagcataggcatgcaagatgtttattactttataataataaccccccttgtataacccccctttatacaattgcttattatctctccctcatatttattattacacttatttagctaatgcttcaacttttgttggtttcaccagatttaaattttcatacagtcagggactatttatatttttcaccattacattcctggcccataacagatacttgaactatatagctgctgatgaatacaagctaagaatacagacatccaagttacacagtaatctgttttgactattaattagaagtgaagtattctaggctagtttccccctactttgctcacatagcactttgtactttgctctcttatgatgtctatttcattatatcactgttgacctcatagtcttcccaactggaagttttgctttcaagggaagagattttgtgttctttatttttgtgtttctaatgtctatggaagcaccttccatgccataaatagttaatacatctttgtaggagtaattaaacagacatcacagaaataatctctttacaggaaatgctggggctctctaaagtaccagttactcaagcaacacgtggtcctcaggtacagcagccacctccttccaataggtaataaatatgtcaaaaagaacttcacagttttacagttgatacatctgtcttcacccttaacttgaacacaggccttcagtgatccaataccgttaaatatttttaggaatataaatactgaattagtatactttttaaagagttgtggtaacatcacattgctgaaatggttggtttttcatcatgacaatgtaaggagttacttcagttttgatatagtctttaaaatttttttttaaatattggagtatagttgtttttttttttaactttatgtggggcattttatttatttatttgtttgaatggtactgggtctttgttgtcgcacggacttttctctagttgctgtgagcgggggttcctcttcagtttcggtgcaagggcttctcactgtagtggcctctcccattgccgagcacaggccctagagtgtacgggctcagaagttgcggaacacgggctcagtagttgagactcacagtagttgagactcgcaggctccagggcacaggctcagtagttgtggcataggggtttagttgctgtacagcatgtgggatcttcctggattcgaaatcaaacctgtgtctcctgcatcggcaggcagattctttaccactgagacaccaggaaggcccctggaatatagttttgatatattcctgattttctgtttttaagttcaaaa

SEQ ID NO: 29083 - DNA, 1724 bp, Bovine  19866880613235
  misc_feature (1)..(1): n is a, c, g, or t
nttttaaagatcctcccccatctaacgtttattaatcataaagggaagagaaatgagagtaattttacagtggagacttctgcccagacacattgttaatgaatgatcaaaagtgatcatcatcaataatggggcaaatgaaaatcatgtgtcacctgataggctataaaaagaacagagcattacttctgtgatcttcctgccaatgatgcaagacctcaatctaattgtgagtctaccatcaagacaaacctaatttgagagacattctatatactggcctgaattttccaacatgccaaggtcatgaaagcaaaggaaggctgaggaaatgtactcgggtgaaggagactaaacagacataatcactacatgtgcgtgcatgcatgctgagttgcttcagtcgtgtccaactctttatgaccgcatggactgtagcccaccaggctcctctatccacgggattctccaggcaagaacactggagaaggttgccatgcccttctccaggggatctgcccgacccagggatcaaacctgcatctcttatgtcttgcgcattggcaagcaggttcgttaccactagcgtcacctgtgaagcccaatcactacatgcctctgaattaaaccttttaagcaaaaaaaattattgagataatcagtgaaactcgaatgagttctgagaattagatggcagtaatatatctgtgttatgtattgtataattcaatggatatgaattttagcaaactcttggagacagtgaaggacagggaagcctggtgtgctgcagtccatggggtcgcaaagagtcagatgcaacttacaaaatgaacaacaacaacacaacaatacatcagtgtcatgtattgtataaaacatcagtgtatatatatatatactgatatatatatatcacatattttaaaacctgattttaaaagttgtattgtggttatataggagaatatcttagtttatagaaaatatagctaaagtattcaaggagttaggaacatcacttaatcacaaatagttcagagaaaaaagtcctttgaaacttttctagtaacatttcaaactttaaaaaaaaaacttttttttacaaaaactcttctaattattaatataaagctaagatacgtcaagtttaaaattttcaaattgtatttcataaaattctccttatcctgccactcttaatatttgggtaaacatcattccagaagcttctctacacacaaaaggatacaccacagatcaaactttaaataaaatcatgtatgtcctatcctgtaacctgatttttccacccagcatcatcttgtgcacaccagtccatacatacatgtacgtatttacattccaaaataaagttactgtcactacctcaaggagtcctacagctatggaaagtgccaccccagaggaacgcaaaggtctctttccctgtggtacaggccaggggtctcgctgaagctctcccagaaggtctgtgagattcatgtctatcttctgtactggctgtaagaatctacaaaacagaacaaaataaaaagccattgataaatgtttgtgggtgaaggtttaagaaacaaattgtccactttcttaaaaacagaaaaagaagctgaatacaaggcagaccaaatggttctcaaacttttgtgtatatcagaatcggtgagaggggtttgtactgacacagattgctggttccaggg

SEQ ID NO: 29084 - DNA, 1043 bp, Bovine  19866880676210
  misc_feature (1)..(1): n is a, c, g, or t
ntgttaactgaaaaatgccagctcagtggagctgtaagtaatgttttgattttaagtgagtttccgcatcttctcatataagaacaatttgtatttccttcctgtgaaatgtctctttacatcctttgcttgttttttttttttaaattggggtcttggtcttttttagtgattttcagcgcgttttacatttagggggtaaactacttttaaatgagaaaaacaaaacgtgacaccaaagaggaaacaataaatacctattcaacagaacagacaacatggtatagggagttaccagtaatgcagatgtatgaacatctgcaagcttgggggcaggtgaatcctgaaggacaagtaacagctggccacatactttattattaaagtcatatgaaatataaataatctttatatttataaaatataaattaaatatagcctcaacatttcactgccagaaaatgcaatttattaagcatttttaagcacctgagtcaagttttcctttgtttctctgactactcagaactcattgtttgacccttgcctaatcattaaaaaaaagtcctatctagctcaaaaaattattaaacagctaaagcacatactgttttagaaaatacgctgatataaaccagtcatatattatttgctttttaaaacttttttacaaccttggaaaacaaaaaagctattatgcttctacgtttagcaaatgggcttacaaaaagtcaggagactggatttggcctaagctatattctgctaagtctctatactgaatcttgcaccaaaactatggcctgttttttgtttgtttagtcacagtatcacttacttgtacataatcgattccaggactttcacttgcaggtggtccaatagccccttcagcacataacctttcacctagacaaaattttttccagccttcttcatcttcagatcttggctaaaagaaaaaaaaaaatgaatttacttatgtattttctttaatactgaacaatgaaaaacaagcgaggattccttcatattcccaccag

SEQ ID NO: 29085 - DNA, 1767 bp, Bovine  19866880685014
  misc_feature (1)..(1): n is a, c, g, or t
ncatagtcaataaagcagaaatagatgtttttctggaactctcttgctttttccatgatccagcagatgttggcaatttgacctctggttcctctgccttttgtaaaaccagcttgaacatcaggaagttcacggttcatgtattgctgaagcctggcttggagaattttgagcattactttactagcatgtgagatgagtgcaattgtgcggtagtttgagcattctttggcattgcctttctttgggattggaatgaaaactgaccttttccagtcctgtggccactgctgagttttccaaatttgctggcatattgcaaagaccttaggcaatggcaaagatgctggtggacagtgtatcctggcctgaaggtacccaaatccattgacaagaaaccatgcacactacgttagccaaaccccaaacccaaaacacttctaaatgcagagcagaattctgctccacctgtcagtctgcaactgctgacagcatacaaattctatgataaagtaattgtaatcctcctaattacttttataaatgtaaacatgtggtataaatcacagaaactgcactgaacaggaaaggtgtttagcctttagggttctagaagattctcattgacacctctgtgattctggactaattaactgttgagggattcaagtcattcatgtagataaaaatgtctctccttcaggtacaaacagatttatgtttttaattccctggtattcaggtgccttttaaagttaaaagtaattaatatgatattttaaagcactgggacttagaaaaaagtctctttttgcatgtattttatttttcctccttatttctgcctaaagaaacataggcacggtttcagcctcattgctcattttaatccatgtgctgtccataggaaatgcataatgaatgtattgatgaattaccatgcaagccgagaagcagcatgctggtttgcttgaggattcaattaaaattgaacaatgttattttgaataataaaatgctgttttgaataagaaattcaagtaaacaatgcaattagtaaaaagtgatgttgatgaagctgagttaggtctacctttatatatttatattaaatatagttcttatatatatcacaaataaaatttcagaattgaaaaaataatagcttgtgggaatggaaaatttatattggaattaataatatatttctgaataacagccaagatgtctttttagtttgcagtaagtatataactttccttgataatacaggcttaataaaattttaacgtttttatagtgctatgtttggtgataattttgaagattatccctgcccagtaggctgctgtgttaaatgtatatctgtaaataaataacatgtatgtcactctctgtcgtctccataagactattatactatacatatgatctgatttttttttcaaatgggaaatttttgagctaagacctgaagattagaattcacagatgtaagaaatatggatgttggcacgtttgtgaaaagcagaaatggacattttcataggatttgcctagaaatgtggccagggaagggtagtcagtaatacttcaaggcagagactcccagacagagagtacttgaatggaagggaagggctgctcctgtcatgaggcagcctttgaagtcacctcactgtcctgctgctttctgctcacctttgctctcttctaaccccctgcccatcttcactctcttacagtccctgcccagccacctcccta

SEQ ID NO: 29086 - DNA, 2029 bp, Bovine  19866880734002
  misc_feature (1)..(1): n is a, c, g, or t
ncatatatatgctatctggaagaactttcagttcttcttttattttttactagtgattgattgattatagggaaaaaacctcactctttcctcttattctcagcaaaaagtgtcagccgcgtgatttagaaaaaaaaagtaaacttatttggtgtgatcaaacaggaaatcagcatctgcggtttcaggcagatctctcaggcttcagtattcactgtctatacttatcttcctctgttcttcctctttttgaactgttagctacccacccacgcccccctcaagatctctggcccataattttgctctaacaactaccatattgggatcgtaacatttctgcatattataagctttattgacatacaatattgtgtaagtttaaggtgcatgatgtgatgatgtgatacttatatattctgaaatgatggagttaaaagcttcttatatactactttggttcaggcatttacagtctaattctcaaaccagaacagcagttactataggaaacggattctttctttcctgtccattttggtattttcagagcctggcacaatattagtacttaaaaaacaatcgttgactggctggctgagtattctaagagctccaaatgacttggatggagaagccaattttaagtcttcgaaaatccatgatacatgtacacattcagactgtctcaagacagaagcttaattgatggtttttcttccctttttctggtacaagaggatgtctgcatatcctttcaccacatagaaaaatttaagatcaagacagttacctagcaagaaagcttgttttgaagtgtctaataatcggggttccaggtttaatgggcaattagctcacatgctaaagaactagacaattgaatgtgaggagacagtagaaataagtacctcttagagaaacaagatctaccccacattaaaaggaagagataggatgtgaatggtaacagaaggatgaggtaagtataaggggccctcagaagtctggaaacagtccgagggaagttgtccaagaaagataaagggccacagtctcataaaagttgagcaggtgtaattaatggactttaagaaaactacttcctttgcattttatctctgtaaaacaagtattatatttccctttcataaacactccttaaaagttttcctgaaaatatatgaatataagactagaggaaaattttcttattccactctactattcaattttcccctcttctccctaaaatgaaaagggagcaattgtgagaggacataacaaactgaagaccctgtccaattatggcaaatattttctagaaatcctaggaaatagaacattcataaccatgagagtgattggtgatgaccaaactagaaagcaatagaagagattgatgtctgataatcagtattgaaaaggcagtgctgagatttaaaggcagagttctagagagaaatgagaactgcctgctacatctggatccatgtagctcctgctacagagtacaaatattcaaaaccatgaatctcaaaaaatcccataagttatatcactattacaaaatgcaattttgtagaaacatctattttatgtgacagtatccttaaagctcataaaatatttgcgttgcgggcagacatttttttgaaaactgaaactaacttcataactctgagcaaccttctggtaggaaggaagtaaaacatctaactttaggacaaaacatctgccctgtccttatcccgagggaaagctttcttcctagccaagtgttcttcacaggaacacactaaaagctgtgagttcttaaaagtccaacacatctcactgcaccacatccatgctgcaatggtctagagaaaagatcaaaggagttatgagactagaaaatctaacctgaaagaaacacatagcagctttaatgtgcttatgaaagggtgcaaatgagggaaaaggatgggtcaatagagaacacaaggaaatctgaatctctgagttccaatattaactccattactat

SEQ ID NO: 29087 - DNA, 597 bp, Bovine  19866880842642
  misc_feature (1)..(1): n is a, c, g, or t
nctaacatgactgaagcgacttagcatgcatgcatgcattggagaaggaaatggcaacccactccaggattcttgcctggagaatcccagggacgggggagcctggtgggctgccgtctatggggtcacacagattcggacacaactgaagcaacttagcagcagcagcagaaacatgtgtataacatgtataacgtataccatgtgtaacatataccactttcaagtggaaggacacatttctaccctattttgttccagctcccgtattactgtttttctttcaccatgtgattaatagtacttcacaaaaatggcatttgaaattatctaagaaaacatacatattcacctacaacagatgtatttcttcttcttaaaaacataacacagaaggaagaagaaagtatgatttctttcatgctcactgcctcatcttctagattcttggtatcaacatcttaatttgtacaacattttttaaatgatggttctgttggttgaaaagtgctcttttctggcaggcctttcatctgaatgtgaactatttttcatttggacagagttccttttataagttagaagaatatattactt

SEQ ID NO: 29088 - DNA, 933 bp, Bovine  19866880861528
  misc_feature (1)..(1): n is a, c, g, or t
ntattctttgattttataaaaccaaaaattcagtaactaatgagaaaaatcatatttgacattgttctttacatttccaaggtaaattttacagtgcttttgccttattatttctaccagtttataggtagaagaggaggatatgaacctaccaagtcacaaactttatgcttcctgcctttatgttgaattttatacaattcaaacttttattttgctgtgtttcagttattttcttgtctctgagttaaagaactaaaaccataaccttgaattgtgggaacttttcaagggtactgttctgagagaataattggcattttgcttaattcctgggtatgcacatgtactctcagagtgattgtagccaccttaccaatttcttaggtgttagggacaactgatgagtatcaaagaggtacagaaatgcctcccagagggtaaaatacagtcttctgtcttcagagttcacttctccagagagggctaggatacctgccttcttgatcaacagtaagaacgtaaataaaaaattattattcaaaatactaaaaaagaaaaaaaataagtacacattcaactgtattgtaggttaaattggctgaatttcttctataggaaattgtacttagaagttcaaaacaacaaatataaatatgcatttttagactttaacgtggttgtcaagttgagtactacctattaaaaatgctgtatttcatactccttaggaaaaatgagacttcagggacaataagattatgataatagctaatagactcagtcactaaaaatacttaatcagtaagcataggtacattgtcaacatctgatttacactttcctggactatataaatattttgcatgaggcttttttgggttgagggcagtacttttcccaaagatgcaagccagagagactttgtacaag

SEQ ID NO: 29089 - DNA, 779 bp, Bovine  19866880876684
  misc_feature (1)..(1): n is a, c, g, or t
nttccctgtccatcaccaatctaaaatttatagcctgaaaacatgatttattcactccttacaacttttcatatttagcaacatagagcagaagtggaagcttttaatgaagctattagacactgttgtcagttctaacaaaacaaattaacagagatggcgtgcgggagcccttctcttatcttaccaacttcgccacttagcacacagagaaatccttcctcctatcggcgccagcggttcaccccaggcaaggaactctgtgaccatagagctggcggaatgccggggtagaggggaccggatgttgttttttcacctcccggcctaggggccggatcgggtttccacgggctgggtttggttcccgttgctgtcagactttctcgttctgccgtagggctgagtggccctggggtgagctcgccccgggaccagactcgctccattaccaaccttcaggaagctgcgtggattcctggtctcctagcaacgagggcccagccgcggactgggcccggccgcggactgagccagccgcgtagctgtccaagcgtttggggcgctatccagaatccctaagccggacccaaacgggagccgaaaccccgagcttggaaaaataagcaggaaatggcggacgaggcgttgtttttgcttctgcataacgagatggtgtctggagtgtacaagtccgcggagcagggggaggtggtgagtgctgccacacgccctgacactccttgtttccactcagttcttttcttcaacccctgtcc

SEQ ID NO: 29090 - DNA, 885 bp, Bovine  19866880978387
  misc_feature (1)..(1): n is a, c, g, or t
ngcttgacatggactctacataaatgatgcaattacagtttattcctctcccagtgacctgaactagaaaccttctatgagcctactcatagtttggttcactctaaggtggactcattatagtttcaagaaatcctcaggccagatactttttactaaatcatatagcccagagcttctaacagtgtggccaatgactgtatcacagtcatctgaggatcgttttatcattcagagttctgaggactacacctcagcccactgagtcataacctgggaaagtgtaatcctggactctgcattcttaatgaactgcccaggggactgctgagcactcttaaacttaggaatccttgagggggcatcttctgtcttttaaaaaaatgagttgcatgcatggcgcatgatccctaccttttcctttcacatcttccttcttttctacctggcatgggagctataaggagctcctcaccttttctccatttatctcttgctttttctgctctctttttttgctgcctcctttctgcctctcatgtaaggaagaaccagagttacgcaggaaagagctatttgctcctgaatatgtgcagagtttctatagcacttgcataactttcaacttggtaattgtccagtacagtcattgaagaggtgctgtgcatacttcacaggctgctgagtttcaattccacagaaatcatcagtcattcccccttctgggctggatactggcatctctgtcagtgagagtcaccagaccttgaatgtgaacattcagggaagatggtgttcccgtcagttgccaggtaaggtacagatctacagccttttgagcctcattcagactggcctctcactctttctccacttatttaattt

SEQ ID NO: 29091 - DNA, 1743 bp, Bovine  19866880983914
  misc_feature (1)..(1): n is a, c, g, or t
ntttctaaaagataacacacatgaatatcttcatattcttgagtagaccaaaaaaaaattttttttttaaataggaaacagacagcagtcatcataaagaaaagattgacaaattaaactgttacaaataagaacttctgcttaccaagacaccacttgaaatataaaggcaaaccaagatatttgtaatacatgtatctgacaaaggacttgtatccaaaatataggaaaaatatatataccaaaaggaaaaagataaccaaagattttcaaaagataaaagataattttcaaaatgtgaaaaaaaattaactaggcaacatgaaacaaaaaggatatatccaaatggccaataaaacatcaaagggtgctcaacctcatcggtcagggaaacaaaacccgaaatcataatgagacatcactatgcaccgaccacaatggttacaatttagactggtaatatgaaagcaactctcatactttgcaaacaaagcattaataatcttaaacttacacagaaaacctgcactgaaaagtaaggatcctagaggatcctaacatggatgtccacattttcaaaaatgtcttacctccttttgaacaatgctaaatttttcaagcagtttacatttttcttcaatcagtgtagaaagttctatagcaagctttttctctctccctaaaaaagagttaatgttatcatgtttttaagcttatttaattacaaacaacaatgatgtgaactaaaatagaaaaaaagagcttacccacataaagccggcttctaacctgaaacaaatttttaacaaaaattacattaaaacaaacatacattcaggcaaatataacttatttaattgctactgacaacttaaagtgtttcttattacctttagtataaacgtaagctagccaaaaagtgttgtatttccattgagaaaataatactacatattaaagtccccccattgaagattcacattatttattagcataataaaggctctgaaataactctaccttaaaaatacctgtttcatttcatttagcccactgctcctcaaacatatttgaccccaaaacaaactacttaaagaagcccctatcatctcccctagtactaatatctaaaataacacaatttgaaaaatgttacgatggggccatggatctgctgactataaagtaaaaaaacttttttcttctttaacctctctttcaaacaatgaagggaaaatttcaatttataaaggggtcaggcttaggactaaaaaacaatggggacatgcctgctcccccttcactccccaaatgggccacaagggccagaataaataagtgctgctgctgctgctaagtcgcttcagtcgcgtcggactctgtgcgaccccatacacggcagcccaccaggctcccccgccctgggattctccaggcaagaacactggagtgggttgccatttcagtactgagaaaaaaaagcaattgggacttagataatctacacaagatatacaggaataaaattaaatgaaacaagatttaaaagtcaaggtacagtataattagttagataaggaacaactagtgaactgaaacagattcagaaactatctcaaaaagtaacaggaggaggaggaggcggcagcaacgaatctcttataaatggtgccgaagcaggacccgaagcctaaattccaagaggtgagagagtgttgtgctttcatgggcttcttctttatg

SEQ ID NO: 29092 - DNA, 1374 bp, Bovine  19866881030590
  misc_feature (1)..(1): n is a, c, g, or t
ngagttaaaggattacctttccttgtaaggagaatgctgccttaagaattgcatgttgtaaaaaattttttggaaaatacagactgtttgtttaccagacactcttgtacttttgcataattttgtaagagttatttatcaaaattatgtgaggttccaaaatatgtaaaaacaataataataaaaaaagattaacatcccttgtcatcttttttaaatatcctatactcttcagtaagaatctgtatattttaataggtaaatctttaagtctgttcccttctgtatcatacattgcttttgtagaaataaatgtgcatttatttcattagctttgggatgtcctcgttgacgcttgtataataaataccctcatgataccattttcagcttttatcactagatactaaacatgattagaatgtttttgaagatttcatcacttttatttgccttagacaattattttgagttgtcaaagtcagatctttccagctttgatgggaacatagtttgttcttcagaatcacttagcacatttttctaatctcccttgttgttttaatctaagcatttccccatttttcctgttttctcgtatttaaaccatatatttggtagataaaacagtatggcattttctttatgattatgggagcatctttgtctccatggttacttctgtgatacagcatatacatctgttaaagaaaataatcactttctaggggaaggaggtagaaaagtatttctaaacttggattttaagtttgtggtcttgtcttaacttttgtgttggccctatctgaaacatgccaatatgtgttttcaagaatttttgtttaagtatttgtgtgaaagtttacaaaatgaaggaacttcatctacacttgaatctgtaagcaagataacacgcaagtggtaccaaatgattatttgttgttttataaatttgtatgaatttggagtatctgttgcccattactatatgtgtgcaaataaatgtggcttagacttgtgtgactgcttaagactagtacttgtattaactttttgatgctttatacaagagagcacttaaattgcagatggtctttttttgagttcataattttttgtcgtgactgtagctttaggcttaattttgaatatttattatgccatctcttgacaagaaaacggtaagagttaaaatgtcaacgcatttccagcattgtataaatgttagttaacgtggtaaaagaaagatctctttaaaaaatcctttcttggagcaattattaaatagtaaacgtgtagatcttctcaagctgcaaagctagatacctgcatccctgggccagttgtttctaccaagagtcactttacctagga

SEQ ID NO: 29093 - DNA, 1515 bp, Bovine  19866881037768
  misc_feature (1)..(1): n is a, c, g, or t
nagagaagatgcacagagggaaagcagagccaaagggatggagaaggaggcagagagtccagtgacactgactgaccctctggacacagctaggccttaattccttttctttcctgccttaggaaccagtgcagttcgtttattagacttcttcttcttttttttttatattagacttcttgccagcaaaagagaagagaatgtgggcctgagtgccaaatgagttttataaacagaaagagtcagggagtcagagattaagatcagagggagctgtgcaaactggggaagttgattttgaagaagtggacttatctgggctgggaagaataaaggtgtaggctgagaaaaggagggatggaagggcagaggagaagtgtatggaaagaaaaatttcttccattaatgaaatactgcaagcaataacatgtgagagggagtagattaaagcaatctcaaagcctagttaagtcttgcagaagtggaagttaactagacttcttatcccaaatcttcatgccttcaaacagttctttttcatagcaaaggcagcctaaattttctctttgaacagtatttggaaagaaaaatgaagtggagaaagacagtagttattaactaattcttccaaagagtggtctggataataacaacaaaatggtttgcatccatctaggttgaacagggcacctcttctgggttcagtccagcaagtctcacagacacaataacatcaggtacaataatgtcaaatctggcctttagcatttaaaagggaaatttgacctttaaattttaaaggaaatgagaaacaaagggattacataattaaaaatctgtttctgtctcttaaaagcaattcaatttaggtcaggagccaacagactcctttccctctaattgttttgtcttggctcctggtacccagttcttgtttctcctgtgaatagctcattaatgttgggcagatgttctcattgggtgccccatattaaggggaaataatagaggcaggattgtcatccaagagacgttaatactgactccaaaatagaatgatgaacgagaacatggcctctttcatgcctcttagcggctaacccccagctagggtttgttttctatttgacttctttggtaaacctgctattaagaaacactgggcagggacttccctctcagtcctgtggttaacactcgatgcttccaacacagaggataagagttctgcccctggtcggggaactaaaagcccacatgccacgtgccccaccccaccccccaaaaaagaaaagcatggggcaaaaatattcagtcctattcagttggtaggatgctgagactgtccccacctacccaggtcatctaatctttaacattcagaaagagagaaagtagaaatattaaaaaatatcatggagatggacatttgaatataattaatattaaatcaagagcaaaccactaagccaatcacttataattctgacgatacatgacaagtcattggaaaag

SEQ ID NO: 29094 - DNA, 948 bp, Bovine  19866881111070
  misc_feature (1)..(1): n is a, c, g, or t
ngacacgaatcataaaaaaggaacagaactagggcttccagagtaaatcatactatttcctctacaagttttatcctgtcttttatttagaacttggataagccatcagatatttctagaatagtagagtcatagcactaagcagacttaaggaaaggaggctttattaacttcatcttgctttttgtttcctttgtagaccttgatcataattcccttttccttgaaatgtcttttggacattattctatactttttggaaaatcactaaagaattgttccagagaatcataggaataacctcatgaaccctcagcaagacagttttaaggtgaataataccaaactctctgcttcaacaacaacgttttatcttctgttgaatcttcatctcagtgatttgcaatggtactcatcaaataatatgatggaaaaagggatgtggctggagatgaggccaaagaaggatggatcttgacagatggaactaacttcaaagagaggagaaaattgattttggtttgtgctaagtgtacttggaaatagaaggttgtagtctttatcccttgagtgtattagtcttcatatatcactaagtcccttgggtaaaatggctactaccactgaggtgcttgtcacatcagatttatctaatgcatttgctgcagagttttattcttctcggtcaatgtggcatatgaatccatcttttttgtgtgtttttaaggccttatctcggtcaaaaaaatctgtattaaagtcacaaagtctctagagcaaaccttggagaaaggtgtgtgcatattgttccaggttgattgttattgaaatgtagatgcaggacttactattgtgagattaatgaagaaaattacccaccattgcccacattacttggcaatttattctctccataaggagagaagtaaaattcaaagaacagcaaag

SEQ ID NO: 29095 - DNA, 1566 bp, Bovine  19866881231313
  misc_feature (1)..(1): n is a, c, g, or t
nctttacaaactgcatttcttaaactgaaaataccagtatcaatagtgtacactgagcctgtggcagctttctctctacttcctaatgggatagacattgaattccaaagtcctgcatcacctgctgagaagttttattctgggaaccttgtatttactactgactggttcaatttgattagattttcattcataatgtttacaattccatagaagaaataaatgaagtaatctcagagatcctatcaaacatttatgtagttctctaaaagatgggtttaacttgtgcgctgtagtttttgaagaagcattttgaaaggaaatatgtaaaagcatacctctaaagtttagctaatagagattttgatgttgtgatgacaaggagcagataaggagcagactggaaccatggagacttaaacccagtttttaaaaaaattttgttaaggtgtcttttcttctcttgggttattatgtatttgctcagtgtttaacacacatgtattgtgcatccactgtgagcactgacatggattccaggtacgcagatagacacaaaacagagctcctgacctcatggacgttaaccctggggggaaggtggatatacagaggaagtagacacacaaatctgtgtatgagtgtttaatacagtaagtgctatgaaagaaagtctccctgtagagtcctagggtcaagagaacgttcatcatatttgagaaattaaagaagccatgtctcctggggtgtgaaaccaatcaggataacattaaaaatgcttttataatgctcttaacacactagacccagtgccaagagttttactgaccttaagtttttactaccaccttgtgagatcagtacatttattgtcttcttttcatagatcagaggcacagaggcgataagcaagttgtccggtgtttcatgggtagagggtttgaacacagaagatcttcatcactgccttacaagaggaagagggcagggcccaggcaggtcacacaggctggtggcttggtcttcccttcgctttttatcataacctgtggcttcaaagttttaatcactgtgtgaaagaacaggaagttacctgacttaattagataaaaatagtagtgaaataaaagaataattttttataagacagcgtgtaagtgaactttcaaaatgcacagccatattgtcatttgcaaagatttctccatgaagggttgcatatggaagaaaatagccacaaagtattttcacatcttggcatggatgattctttttctgatcatggtattaatatgcccttcctataatccatgaaggatgtgtaacatacaacccaatgaggagacctagctcttttgtattttctaaggcaagaaagctgtgcaggtgagtttaaatgtcatagcaagttgtgaagaaatgggcgtgttgtattttttttttttttttggtcatccagtgtagattagtttttctgtgaatttatttcaagctttaaataattaattattataaacatatatttaaaatgtttagatttaatttcctacttatgccacatgcatt

SEQ ID NO: 29096 - DNA, 747 bp, Bovine  19866881295410
  misc_feature (1)..(1): n is a, c, g, or t
nattttgatttaattagcctgatatgccccattcacctcctctgcacattctcattaaaaaaagcaaatgccccaggtgtttttaatattcagtgcttctcaaactttaacttcatcagaattacctggagggcttgttaagcctttgctaactgggcccttccttgagatattctgattcactagatctgggaagggggtgagaatttatagtttttcagaagttctcaggtaatactgatcgtttgcagatctactgccgagccagtacatgcgttcaatttcattgcaatgctgttttatgcagtacacatatgtattttttctggctgaagaaagtgggtgtacacaaaagtccatccattggtcaattggtaggaatggtttcagaggtgggaaaatcaacactgtgaccaagtgcagagaatatcacttgataaagagataaacctgctaggagaaaaatgtcttcatacaaaggatgctcacttacagatttactagtttgaaattgtcctctaggaagagaagggatgatttaggggtacctggtaagcaatgatatgttcaataaaggacatttagaaagaaagttttagatttggaagggagttcagcttctttttctctggaaatatctccctaagcaacagaatgaatgattcacctttccaattccttgggtatcagaatagctaaagcaacatagcataattttcagaaatagaaccctattaaactttcaca

SEQ ID NO: 29097 - DNA, 2371 bp, Bovine  19866881378819
  misc_feature (1)..(1): n is a, c, g, or t
naaggcaaaaataatttgaagtatataattcatcacatcaaatgtaaatggaataaagactataactcccaattttttaagaattcagttatattcttttgaatagagatgtaactgtaatataaagactaaaagaatgaggtaaagagaattgctatatattattaaaaattcttattcaccagaaagcattacaaatctaatcttgtaggcactgaaaacatagctcaaaatacataaagcaatattgtaagagttttaaagagggatttgctaattcactattacaatgagaggtttttaacatactcttctcaaaacattgataggacagccaaaaatcagcaagcaatataatttacaagcttcatctaataaataactaatagaatattgcactcaacatttggataatatgcattcttctaatatattcatgaaacagtgatggaaatttatcgtgtatatgactaaaaagctaccttcaaaatgtttagagaattggtacatacagacagtgctctctgggcacaaattcagttataaattaaagaaaaaagataaattttagaattgcataatgaattttaaaacccatagatagtcttcccaaagataaaaaatataaacctgatcaaatctctatatccatctaccaatgtcctggaaatattagcatagaagaacatgctaaattatatgacaattcaatcactaaaactcagaccgtgatgaaatctacaggacagacaacccagctcttgagacacagaaatttctagaggtgggagtacagaatggaggagaaaatataaatttaaaagacattccaactagtatcaatgtatggatttaatttgaatcctaattcatacaatccatacaatacttttgccacctgatgcaaagaactgacttattggaaaagactctgatgctgggaaagattgaaggcaggaggagaaggggatgacagaggatgagatgtttggatggcatctcagactcaatggatgtgagtttgagtaaactgtaggagttggcgatggacaaggaggcctggcgtgttgcagtccatggggtcacaaagagtcagagatgactgagcaactgaactgaactgaatccatacaaactgttgggggagggcattgagagaaagttagatatccaaatacttactggattttgatgctccctaggttcgatccctgggttgggaagatcccctggagaaggaaacggctacccactccaatattctggcctggagaattccatggactttgtagtccatagggtcacaaagagtcagacaggactcagtgactttcactttcacttcactttttcattagtattactaaatgatatgatgtatggtatctgcttcaaaaaaagagagaagatagtatggtatataagcaaaacaagattgcttatgagccgaccattgccaactagctggtagaagcatgagaagtcattaaattattctactttgtacatgttcgaaattatcagtaatgaaacatttaaaagaaactaacgaatttattttttgttgtgtgtgtgtgtgtgttttgtctcccccttgttttatttttattgtatcggagtatagcagattagaaactaacaaatgtagcataagaatgaaaattacaagccagtctccctcatgaccatgtgtgccattgattcactcatgtttctcaactccatgcctgcccttttataccgtgttctgtactgctggggcttgaagtctacaaaccacatttcccagcttccattgccagctggctctcctttagaatcagctactgggaatctaaagctactgttggaaaatcagaaaggacaagctgaaagattctttctttgggctccaacagtgtggagcgagaattttaactcctgaagcctggaccaaagcaccatcttttttcctggtcccaatcctggtcaagacagcaccttttgaccaaccaccagttggtccagaaccacctgagacagcttctccaatagcactgtggcaggtgtgtaatgggtttcaactcaggggcatccaaagcttcttatgcttagatatcacccccttcttcctctatactcctccaggacctctacttctccttctgcacctttaacaaatgttcagccagttccctaagttgaattccctttattcaaaatacctagaagtggtttctttatttctctttcttaggaagagcgcttcagtaatgaagttttggaattgagttgctggcctgttggtgcttaagtgcaatcataatctcttacagtagtctcttactgtaaatccacaacttgcaattccattacaatttcttcagatcat

SEQ ID NO: 29098 - DNA, 1826 bp, Bovine  19866881484873
  misc_feature (1)..(1): n is a, c, g, or t
ntcatttctttctttcttttttttttttcattccaagtcattttcattgattcttgtgggttctaaagttagggaaaattccctgacttctattttaataaaaactgtgttgatgaaatgatcttaataatccaatccactaataatgaaattttattgtagcaagaaagtttcctggagtattttatatctggatttttaaattcttcacctgatatccactttcttatttagaggtatatataaaagcctaaaataaggaaattcagtaattttcagaggatatcagcaaattagtggcaaacatgagataagaattcacagctcttgtggttcttctctggcatagccacagacatgccataacctctcctgaaaaggacaatcaattttattacatgttttcacaggtgaattcataagaacttgaaaaactacataatgaagggagacaacagcactggaattaagagcttagagactggagccaggcagactgagctcaaatcctgactctgccgcttactgcctatgtgactttgaagaagtgactttagctctttgagtcttagtttcctcatttgtaaaatacagataagaacagaacctattgcacacatggctgtcatactgattaaatgagttaaattgtgtaaagcaaatagaacaatacctgacacacgcaggtggcctataacattagtatctattttagaaaatctattcttttataggctacatatatagttttattatattttattctatattttattctacattcacagttaacataggaagtaaggtatcaaaaatgtgacttaaactagtaataagccaatagctcctttttttcttcctataattatacctgattttttttccactttacacattctccacctcaattcacccaatcccagatctatttctcctagtaaagacaaaatatatatgggttttctaatttatatactgcgaccttatttgaaatgataaatactaaatgctcaactcaatcttatcaaaaatttccagttgactgatctcaatttttcaactgtaccctttttctctttaacatacacccaggattgggcagagagggccacgttttatatcatttagcatatgaagcactacagcatcagaggcctccagcaccatcacagaagcagtgctgcagcggcgcccccttcaggtcatccatggataatacttatactggactctcgatttctgacaaaaagaaaactaaggtattagattccataatttttagcaaaatgcttgggtatcatgttaactccctaaatttcaatcatcaatttagcttaatggttaaaagttcagattctggagttagaatgacataggatcaaatccaaacccttgtcacagtttatgtgacttggggaaagttaatctacgtaagcatcaatttactcttctgaaaaataagattaacagtactcacctcacaagtgttttaataaataagagtttatgaaaatcttagtataatgactaaaacagtgcagattcagcttattattatctataaaaatattaacataatttctcttataaaagtcatatgtcaagaaaaaccttaggctcttggtttctttcttactcctaattatcacatttatttaattttgacatttcaaacaccattacaaaaaagggatgctttcaaatttaacaaaatataaagactgagaaacactgatttaaatacatcagaccaaaatttcattgtttttagacacatgaactaattcaacatagactgaaagatctttgaaatagttttaaaccaa

SEQ ID NO: 29099 - DNA, 705 bp, Bovine  19866881718809
  misc_feature (1)..(1): n is a, c, g, or t
ncgccagcagtactataactcattcctgaatgaagcttatctaacacaagtatttcctgggtaacatacatcatagcttcctgtgcttaggacgctagataacattgcagtactatgctagctggccatttaaaatagcaaaaacaccaatgaaaagcaaaaaaaataagagaagtgtggcactggatagaccatacagagggtacctgtttacagtatgagagctgaaacaggacagcagagtgtccctttgtttgacctcagctgggaacatgcgcactgggtgactcaaatgtttccctctctacacatatccacaaaggactgcaaaaatgctgcacgtattgatttggagttataaataaattttagtgagtcggcagattttctagtaaagcatccatgagtaatgaggatcagctgtattcctttacaagacattagccagaactgggtaacatggtctgttctcagaacaaccagtgtccatgggcatgagatttttaccagtttagaccagtgatgatttatccccctggagttggcaacctgcatgctctgaaatcaaaagatctcttgttatttcaacaaatcacagttcccttggcagggaagagtgaagtggttgttgggtaagcaatggacgatgtctgctgtatgccctaacaagtgcttggcgtctggaagggacccagtacatttttg

SEQ ID NO: 29100 - DNA, 2566 bp, Bovine  19866880473169
  misc_feature (1)..(1): n is a, c, g, or t
ntgggtatatctttccttttctcctttgcctttagcttctcttcttttctcagctatttgtaagccctcctcagacaaccattttgcctttttgcatttcttttttcttgggaatggtcttgatccctgcctcctgtacaatgtcacagacctccgtccatagttcttcaggcactctgtctgtcagatctagtcccttgaatctacttgtcacttctactgtgtgactgtaagggattttatttaggtcatacctgaatggctagtggttttctctactttcttcagtttaagtctgaatttggcaataaggagttcatgatcagagccacagtcagctcctggtcttgtttttgctgactgtatagagcatttccatctttggctgcaaagaatataatcaatctgatttcagtattgaccatctgctgatgaccacttaccaactgaacaacagcaaaaggaagcttcaataccccacttctattaaatcttaaaattgtattttttaaaagaaaagcaaactcaaaaactgttagataaagaaaaaagatatataaacaaatttagaaatgaaaaaggaaacattacaatcgataatacagaaataaaaaagaataaactaaagacttcaccataatacctgatactataaaactcctgggagaaaacatagggaaaaaacttcttgacactggtcttgacaataatattttggatataattcaaaatatgatatatgttatgaaagcataggcaataaaaaccaaaacagacgagtggtagtacattaaattaaaatgatttgcatagcaaaaaaaatttttttaagcatttttagtaatgtgaaaaaaatttttgcaaaccatgcatccaataataagttaatttccaaaatatataaggaactcatactactcaataccaaaatacaaatattacagttaaaatgagcaagggtctaatagacacttctctaaaaaagaaatgtaaatagctatcaaatacataaaaatttgctcaatatttctaaatctcagggtaacacaattcaaaaacacagtcagatatcaccttacaccaacttggtgtatcttgcaactatcaacaaaaggatggaagataataatttaggcaaagataagaagaaaggaaacccttgtgaatctctggtgggaatgtaaattggtaccactcttatagaaatcagtatgaggattcctctaaagaggtaaatagggggtgccagcaattatccagcaatcccacttctggatatttttccaaattaattgaaatttatatcttgaaaatatatcagtttcccttatgcaagatttgtggtgattgttcagttgctaagtcgtgtccgagtctttgcaaccccatggactgcaggactccaggcttccctgtcctccactacctctcagagtttgctcaagttatacaaaattaatagagaccttggagaaggcaatgacaccccactccagtactcttgcctggaaaatcccacggatggaggagcctggtaggctgcagtccatggggtcgctaagagtcagacacaactgagcgacttcactttcacttttcaccttcatgcattggagaaggaaatggcaacccactccagtgttcttgcctggagagtcccagggacgggggagcctgatgggctgccgtctatgggatcgcacagagtcaggcacgactgaagcacatatctatctatctaatagagacctaatgggtaatgcggtgatggtaggtaatgatatgaaatacttgacatttgcggcaaggataggtaatcagtaaagcacccctagcatccactctagtagttatagaggttgtggtatatgaattagtttgactgtggtgtgctttttacagtgcatacatttatcagaacatcaactcatgcaccttaaacacataggtttatatgtctaagatatcatcaaaaagctgtattaaaaaaaactgatgaaatggtttagtaaagggactcagttcttgctaaatgtgataagacaacagctttaaataagacatactctcatagtatataatatatcccaggttacaaggcaaatacattaaagccagagcttatttcttatttcacaagagatattgtttgtttggggaatgtgattgagttgctgtgcatattacaagtttaaaagttctaaatagtatttaaattttcattgtgaaaagtcttagaaatacttaaaaaggacaagagttggggaaatatactttattttttgtttttgttgttttatggctatacaaagacaatgttataataccaaaactggttatatttttttctctgaaagtagaaattcataaattctcacttcattactcagaaaacttagtaaatttgccatcagtttttcaaagcctcattaaacttcccagaactttcctagtagaacaaaggggttctgttgaagtcatgagcaatattgcagtaatttgataattaatttaaaagctcattttattgttcctgggtactttttttaaagtgctgtttttatga

SEQ ID NO: 29101 - DNA, 796 bp, Bovine  19866880610988
  misc_feature (1)..(1): n is a, c, g, or t
naactttgtttacatggaatgctgggtttgagaaatgcttgatttattactgtgaaaaagtattcatcctaatacagatgtagaattactgctagaaatcagcaatgtggagaagctttaaaagcacaggggagatcttgtgcatagctctttaaggtaagtgttaatgttctataatattaacacacgcttcacactgctgtcctgatgactctccgtaaagaattactttattcattcctctaaaactcttgtttatgatttacttttattgcctaatactttataaattataattcacttctttgcacatttgaagttgcttttaaagataaatagaatactataaatgttatatattttatacatattaaaacgcaatgaaaataccagaagtatgaaatgtaaatatatttatttcatttttaattgttttggtgggatgtttgtaaaatgtaaattaatatctgtgacaacaacttgtcactttgttctttaagttcattaatgtactactaataaaactgtacctttttttaatgacacatacaggaaaataaaaacatagtttttactacatctgtgttttcacttcctgggtttgatttgtagagttcacagatgtttagagcatgtccttagaagacttggctgccatgaacagggccggtggtgagctgcttcccttgggtgcataaccctaagaagacaatttctggcccaccagtatgaaatggagcaggaccctatggcccttccctccgtgtcttttgcctgcctttcatctgtggaaaca

SEQ ID NO: 29102 - DNA, 984 bp, Bovine  19866880715700
  misc_feature (1)..(1): n is a, c, g, or t
ntggcaatagactcaagtattcttgtgtggagaatcccaaggacaaagaaacctgacgggctacagtccataacgtcacaaagactcagaaaggaccgagcaactgagaatgtataagctttcaaagatttgcaaagatttagaggtatatttcacctagagatatgcttagtggacatgctctggtagtggtttagtcactaagtcatgtccgactgttgcgacactgtggactgtagcccatcaggctcctctgtccatgggattctctacacaagaatactggagtgggttgcgatttccttctccaggggatcttcctgattcaggaattgaacccaggtctcctgcattgcaggcagattctttactgactgagctacaagggaaagctgtggggattaattgggaaacatagcaaatagccctcctttagtatttcttgaattacattttgttccaggtgatagtcactgatctgtttctaatatgaaaaataaaacaagtaagagattatttgaaaatctgatatcacacaggactagtttcatatgttcctaatgaaaaaaggaagtttttatcaatgccataaatcatttgcacatggggaaaataacaatattagaaaaagtaaagaagactcaccacttcttcatgtctgcattttcttacattaatcccatttatctgcaaaggaaagagagagagaatttgaagagcatactgtgaactgactgtatcttggtgacacatggaaaataatggtaaaatgtatacctggagaattgcgtccccaataaagagcagtcctgacagttcagctgtgaatggagaaggagaattgactatgccttgtctactttcttcacacagaagtaagagttcttaattcaataaagccaaaactgattgagggcaaaggcaaagatggaggaggattaaaggaaaaagtaattaaagcaaaaagtaagatggtctataagg

SEQ ID NO: 29103 - DNA, 1543 bp, Bovine  19866880823172
  misc_feature (1)..(1): n is a, c, g, or t
nccttgttgttgtcttccgttctaatataaagtgacatccccaggtagaacattggtaaatatttcataccagaatatgaaaataagatgagacgtttcaagggcaaaacttaattcattaactgtcaagaataaatttaaacaacttgaaaaatgttcatgacatttcctgactactatctgaatattcatgtatttgtgaattattgaactcacattttaaaacactattcccaaaactagaacaaaagatatctgccctaataaaacctcaaactttataaatgacaatttgatacagtgcaaagaaagacattttaatgacatgaatatgagtcactgacttgagaaaatgaataaattctcctaaaatattacttttattcaattgacaatataaagccaaatgatgaacttgatacatagaaggtgaatactcctgtatgaaattacattgtcttagtaagcagtatcaagactttacaattaagcaaatttaataaacacccaaagtgccaacatcatgaacaagtgctgatgggagctatgtttcagacagagcacgcctagaaaaatcttctaaaagactaatattatctcctgattcattgttcaaaatggtttaatgatgagaggggtaaaaaaaatctctttcctatatccacgtgtttgtggttggaagtaagtagttatttagtgacctcattgtaagaaatggaggctgtgggcatccgctaatttgatggaagagaaagaaagggcaaaaggaaacaaaacatgtctgagtcctatcttttgggggagatgaacgagccaggaagaggactaagaaacttaacggatgtgttctgtgggaaaagaggtgatcggggatctttaagtccatggaattcagcttagtacttaagtaacatactttagctgctcctagagaaggggagggtttggtctaatgattgtcagatagctctgggcagggggaaaacatcctctggctgcttgaaaaggctgaaaacacgtaaagagacggctgctcaattttctgattaaaatcatcctcaatccctgagctcaagaacagaccgtgaagggataatgatctcccagcttgctttgagagaacaagtaaaagctgaccgccagctccattttatttgctgcttccactgacctttaaagagtaaaaacgtcatctgaatttttgaggacaaagtgaatgcgtattctggttttcactgtttacagggattggaaggtggactgccaaacagttatctttcaggatagaagcctcagattttaagctctttctattacactctaggcaaacagagatgagcctggagttcagaaacctgaaccccggatcctgtaagtaaaggacagcagaacttcggagaaggctgcgtgcagcactgaatgcccaggggagggtgtccttgtgctttagcgccatcgttggtgcatgggatccaggggtgagtgatgggggaagcacccctcagcacagaacagcacagctgcaccagtcctcgaagccagg

SEQ ID NO: 29104 - DNA, 927 bp, Bovine  19866881524941
  misc_feature (1)..(1): n is a, c, g, or t
nctctttcattgattaaattgactccttgcttaccattgggggcttccccaacagctcagagggtaaagaatctgcctgcaatgcaggaggaagaagacacgggttcaatcccagggtcaggaagatctcctggagaataaaatggcaacccactccagtatttttgtctggaaaattccatggacagaggagcctggtgggctacagtccatggggtcccaaagagttggacatgactgagcaactgagcatacacacttcattgacttcagctctgttcacaggttttggaatcatatgtatttagaattattattttaactgccttagcagtcaggcacatatatcctcaataagaattcttcctggaaaataaaatgtgcattagacagataacagagatatgggggcaaacaaaaaataacactgttgttgtaaccaagctaagtgagtatgtaagattcatcatctttcgtgccattgttcacttttattaaatgcattgggtacctccccaggcattcaacttcttctgaagaagttattatttctttactctagttgacaggaaattgatcaaatctgcttgtagaaatctaaatgatatctgtaatatcagtgagttgatcatgttattttgaacctgtctaaagcatttttccagaactaaagtcttataaataaaattttaagaagtaagcttcatgatattttcaaccagtaaatatatcatgttatcttaaaagaatggagtacaaacaattaagtctgtacttatgtatatatataagtacttgtgtatatatatacttgtgtatatatttgtacttgggtatatatatatgcacaaacttccaaggtggctatataatattttatatatatatatgaaatgtagcaaaatatattctatagtatatcataca

SEQ ID NO: 29105 - DNA, 771 bp, Bovine  19866880555691
  misc_feature (1)..(1): n is a, c, g, or t
ncccctgaaggtgcttatggtggcaatattttaattatttttaaattatttttgaaagcttaatttcatgcttaaaattattttaaatgcatttcagtgaaatatatttaatttttctaacaaaatgaattgtgaaagataaccccatatacttactgatattgtactgtttttattcccttaaaaatctcattttcagatgtttcaacctaatattacaggtgctgaaaaaaaatgcaaactcttattcccttagttttgctgaaaaacaggctaaatgatactttcaagtagtctaggttatgcctcttgaaaatagtttctctgaaagttttatagaatttgaatggaaaatgttttttgtaataaatgttattaatggctaacatttattgagtgtttattacttattaggcagtattctaaatgctttacatgttttagttaacttaatccttacaacattaccatgaagtaggaactcttattgtattcacattttacagatgaggaaattgaggcacagagcaattaagtagcaattaaggaacttttggcaagtttgttgtttacaaacaagcaaatttaaaaaatgtttttgctgaagtatttgtttgctgaagagcttcaagacaataactaaattgtagatatcatttggggcttttatataaccaaatagttgataaaatattgtcaacccctgaatgccttaaataccacccacctccatccaattacaaattctaaagaattttgtcttgtggaatt

SEQ ID NO: 29106 - DNA, 1189 bp, Bovine  19866880575291
  misc_feature (1)..(1): n is a, c, g, or t
nggtgcctttaccttctttgcctctgctctgccccatgatgtctgtggaagcaatgggcttcctctcacaccaaattccatcaagattttagggcgctttcaaatcctcaagaccatcactcaccccagactgtgccagtatgtggatatttctaggggaaagcacggtgagttgttgttttctcatattttgtgttctctaccctgaaaccctgattaggttataatatacacagtgtatcattttggatgtgagagctggactataaataaagctaagcaccgaagaattgatgcttttgaactgtggtgttggagaagactcttgagagtcccttggactgcaaggagatccaaccagtccattctaaaggagatcagtcctgggtgttcattggaaggaccgatgttgaagctgaaactccaatactttggccacctgatgcgaagagctgactcatttgaaaagaccctgatgctgggaaagattgagggcaggaggagaaggggacgacagaggatgagatggttggatggcattgccaactcaatggacatcagtttgggtggactccaggagttggtgatggacagggaggcctggtgtgctatggttcatggggtcacaaagagtcagacatgactgagcgactgaactgaactgaacatgatacacagtaagtgttaattgctcagtcctgtctgactctttgcagcccaatggactgtagcccgccagactcctctgtccatgggattctccaggcaagaatactggagtgggttgccatgcccttcttaggggatcttcccaacccagggatcgaacctgggtctcctgcattgcaggcaggttcttaccatctaagccaccagggaagccataataataaatagtaaacatataaagtaatcagagtgtgtatgtttgcttgccatcacttttcgctccagccaaactgagtcatttgagttttcctgactgcatttgaatgattcatatttctcagatctgagaatcaggatttttaatattctttttcagggaagcccctatcctcaagcatatttcttcatctctccaaaaaggaaatgaaagactaatgttagaaactttgtgttctgtcgcttatcatgtctgactcgctgtgaccctgtgggcggtatcccaccaggttcctctgtccgt

SEQ ID NO: 29107 - DNA, 1166 bp, Bovine  19866880599596
  misc_feature (1)..(1): n is a, c, g, or t
naataggcaaacatttctagaggaacatactttatatgcaggactatagacttacaaatgatgcatatatattcttaaaatatcctgattttaaaattaataatcaagataatttgagttcattaaatacaatgtaaggataaaaaaacctttcaattatatttttctactctatctagtctattcctctattcttttcacataaaattgccaaagattcttaatgctcatattttactacataacattcagaaggcactttcattcttttttcctaatactgttaatcagcttccaaccttctcttttctcttttacctcaactcccagaagagcagcccaggttaaacctctcataagaggaggaatgtcgactcttgcctctttccagatttgattttttttatatggataagcctacagataaaaaaaaaaagatatgaaaaataccttgaattaccaatgccacctctttagtctagccagttctcaatataccagtgaaaaagttcaaggtgaattataatgtttttaagtgcctgaaattactttggtgttattaatacataaaagttagcagtgaaatagttctctatcttctgtaaatctcgtattacacaatgagaggagttgattctactgtttttagtcatccctctctatcttgtgctctgtgagaagtaagaaaaagactcattctgaggataatattatcagtttcatacaggtaaagtaatataagtaaggctctttgtaaaatagctgatgatatagaaagtattaaataaatatgttattattacagtttctcctatatctttgtatacaaatttgcctatttgtaaatttgtatgtcatgagaaatttctagaagagacatattaggataaagggtatggatgttgttaatgctcttgatatataccttcaattgttttacaaaatgtttctatcaacttacacttattccaaaagaatgacaggttccaatcttaatatatcttaattactttaatttggtatgcaagaaaaggctattttacttttttatatattttacttttttacatttctattaatagtaatgatacattctctaatagatttactgactagttgtatttctattgtgttctttatctatttcccctgtttagataatagtg

SEQ ID NO: 29108 - DNA, 1357 bp, Bovine  19866880611071
  misc_feature (1)..(1): n is a, c, g, or t
naatgctgtgctgcactcttaaaaatttgttaagagatctcatgttaagtgaggtcacacacaaataaataagactcaaggaaacttctgctgtgagtgcgtgtatgctcagtcatgtccaactctttgcaaccctaagaactgtagcctgccagctcctctgtccatgggattctccaggaaaagaatactggagtgggttgccagttccttctccacgggatcttccccaccaagagtgtacccgtgtctcctccactgcaggtggattctttagagccaacatgtagattttatgggtgcctgcatatatccaaactcaccaaacatatacattaaaatacttacagttttcttgtatattaattataacccaattaaaatgtttaaaaataagttaaaatgagaaagtcctattcctatcagcttcaaaccatcagttctttacagtatttgcaaagtttccaagaagagatgttattcaggttgcaagaaacacaggccaagaaagagaatgagaggtcaggctcgcagacatagatttggaagtcatccacagatggatggtaactaaagtcacacatgctgtttcctcagatccataatccatgatatttaagggccactccataagccaaaatacctatacagtcagcaaaccaaaggaggaaacacacttctggattctatgagttcaagatgttctttcaccttataaaatccgatcattcccacagaaattttccttttggtctaaagctttctttactaggtattagcctgaggtaaaaatgtttagaaagaggaagcacagatgaaatatagttagctactgtgtgatttaagaaatggaaaggaaaaataaaacactagggattaatgttcagataataaaataactgtataactctgtgttatctttaacctaaactctcctcctataatttcaaggtaaaagagctccactagtacagaatttttaatgattcactggtgtgtaatttaagaatttggagaggggtattttcagtgatgaactactgcatttgatgcttttaacttgtcttttatcaattactaaattttaaaactttgttaaaaaatcataacatttaacagcaattttttcttctaaaggaaaaagaaaaaagaaagcttttggaattgaaaaggaaagtaactcatttcactactggcacacatgtttgagcctaaaaggatacaaaatttaagaattaatttgcttcagattcagatgtttaaaaaaggaagttgcattgattaactgcttaccaaaagattattttgtaatagatctaaaaaaaaaaaagtccatctgtccataagttattcataa

SEQ ID NO: 29109 - DNA, 1325 bp, Bovine  19866880697285
  misc_feature (1)..(1): n is a, c, g, or t
ncaatttagactcattgtatttccacattgtattgccagtgtgctttgtgtgtgtgcatttttaaatggttttccctaatagctcttaggaaatggaaattgtttcatttactgcaatggaatggctgccctacaatgtagacttcaattttccttccttgcctgtgtgctgcttatggaataagttgacagaggaggtgagaaagcagacaagaattgaaagtctaacatctgtcccataggctattgacagagctgacaagaggttgactatcctcaaaggcagtgaacgacacatacccatgttttccatattgttccatgacttggtctggaccttcacatgcaaggttcctgcataaggaaaagaagtttctgatagctcttttgctcttaactcttgctgttaaagaactgccaatttgagtcagctggggattacatggaaagatagtttcgttgcatgtggattattttctttttgtttttttcttcttccctttccttcaacttcacagtattgtttcttttggctaatctggtggattcctggaaagtttatgggacttgcgggagtgtgttgccctgaggcaaatctagttcaacttcctagttaaggcacattggtcctggcttattgtggagtgggtctggttttgggccccctgaggaagggagtatcctgtctttcttaataatgaagcaaaaagatgactccagaagagaattggcggccaccaacagggatgctctccagttctccactgatccgtgcaccacctcctgggcagctttgtaaaatctctcatcagtcttccttgcagttttgtttattctgtgttattttgtaaatgttgtgactggttaaccagagtcagaaggttagcgtaacttctgttaaccctgcaaaactgttttgaagtacgtgcatatctgcatacatgtagatatatagatatagatatatatatacatttaccaacattatataattgtcattcaaatcactgtgtcccatctttatcaagctccacaacacaaaagattctatgatccgcatacacacagagttcttccgaggacctagacccctagggaatgggactgaatgagtgagaaggagagactgaatatgtaagatttaatttaagatctactgatgcctgttgttttggtagaaaccacagtaatgcatttttctaaactacatacgatgaacatgtttatttcaaagctttctacactgtctcttgtggaagcactgcagaaagttaccatcaggtagtcattctcatacactttattttattgacagatgaaacaat

SEQ ID NO: 29110 - DNA, 1584 bp, Bovine  19866880703447
  misc_feature (1)..(1): n is a, c, g, or t
ntgaagaggaactaaaaagtctcttgatgaaagtgaaagaggaaagtgaaaaacttggcctaaagatcaacattcagaaagctaagatcattgcatctggtcccatcacttcatgggaaatagatggggaagcagtggaaaccacgagagacactatttttttttttggctccaaaatcactgcagaaggtgattgcagtcatgaaattaagagacacttactccttggacgaaagttatgaccaacctagacagcatattaaaaagcagagacattactttgctgacaaaggttcgtctggtcaaggctatggtttttccagtggtcatgtatggatatgaaagttggactgtgaagaaagctgagcgccgaagaactgatgcttttgaactgtggtgttggagaagactcttaagaatcccttggactgcaaggagatccaaccagtccatcctaaagatcagtcttaggtattcattggaaggactgatgttgaagcttagtactttggccacctgatgcaaagtgctgactcatttgacaagaccctgatgctgggaaagaatgagggcaggaggagaaggggataacagaggatgaaatggttggatggcatcactgcttcagtggacatgggtttgggtgggccccgggaattgatgttgaacagggaagcctggtgtgctgcaggtcatggggtcacaaaaagttgcacatgactgagcgaccaacatgaactgaactgaattattttgcaaccacttttaaaaaatccaaaaaattaaacaattggctactacaagcaaactatatcttaaataacacatcactgtagccatcttaaatgttgtactactttctcatcacttcctcctgtttatctcatttactttggtacccaaactcatcactctgttggaatattcagtatatttatgtcaccatcatttcattgttccctattccttaacatgcatcttttttatttatcaattattagtctttatctcatttaactggttagcatttgacattgcccattgatcacttcctcttgctttataaacttccttcactaggtttccaaggtaacacagtcttctattatttcttttgttattctaccaatctagtttttcctccatcatctcctttacttatatcttatcttctcctcaatttcttaattttgaatgccataggaactaggccttccatctcatctctaaattttcagtttctcgtttatatgatctcttcccatagatttaaatactctttgtatgtcaaagatttgcaaaaaaatttccccagactagttatttcctcccaaatctattcttataggtcccactacttactctataaatttataaattctataaattttctcagacatactaagatacatttaaatataacttaactttttagaaactaaattcctgactccagttaaattctttcttactgtctagtccaaagtccttagtgtcatgaaggacttcattcatttacataccatatccaaattcatcaggagagcataattgctctatcttcaatacattcacactcatccc

SEQ ID NO: 29111 - DNA, 930 bp, Bovine  19866880718745
  misc_feature (1)..(1): n is a, c, g, or t
nacatgtttgtatgtgtatacacaaaaatatccacacatgatacttgcttagtatcttacatttttagataaatgaagtactctatgcatagtgctttgcatacaactagcacatagttggctttcctggtggctcagatagtaaagaatctgcctcaatgcaggagacacaggtttgatccttgggtcgggaagatatcctgaagaaggaaatggcaacccacttcagtattcttgcctggagaatcccgtggacaggagagtctggtgggtcacagtccatagggttgcaaagagtcaaacatgattgaagcggcttagcacgcacacacacacttttaaaagagaatgtggatcattttctagcaaacactaaattttattttactagtactttaaaaaattatgccagcacctttattttggactgttgaatattcttgaggatattagctgcatagctccttttaagagagataagaattactgtggtcagcaataaattccatttaaacatagtgaaataattttgtgaataactgctaggtgactgaatgtttactttctgatgactatctagccacaaatattttctaatcatgttaatatgcaggcagaagtaagaagttagatattaaacattttttggtgtatttgcataaaatattgtgttagcaaatgaattttgcattattgacaggcttttttttgccttttcatactgttcatgctgatgctgaagctgaaacttcaatactttggctacctgatacaaagaactgactcattggaaaagaccctgatgctgggaaagattgaaggcaggaggagaaagggacgacagaggatgagatggttggatggcatcaccgactctatggacatgagttagagttagctccaggaattggtgatggagagggatgcctg

SEQ ID NO: 29112 - DNA, 1953 bp, Bovine  19866880861513
  misc_feature (1)..(1): n is a, c, g, or t
naatttcccaggtgtgaaaagttgagtgggttttgaattaacaagtatcagccaagttatcttagagctgaaaacttaagtgtatgcatatattgagagcctatctctactgggatgtatgatattctaatgaatacatctacagaaacaaatgtaaaactttgtcacagccttaatatgaaggctcatcatgtcaatgccattgtagaaatgagcagaagttaataactggtacttgaacaattcaacgtgcatcatgccaacaagaaagtcaagagtagtagtcagccttttcatttaaaaggattattcttttttcctgcaattattgagcccatggcttggcttgtttctgctgctgttgctaaggacaacagcctgccagataggaaatgatgttgatgaagacataaaataacacttacacacatattttactcaaaaatccagagaattgggaatagggtaagttaggaaggaggtgggagtaaggaaatggaaggaaaaaaaaaaggaggggggaatacatagggtgaaaaaataaaatatacaataatctgctgaaattccagatggctgactttcaacaaattatttcactgttttgagtcctttctgtaattttctcttatactcctatgaattatctctgccaaaactcacaaaaagttaaaatcataagttcaataagtaacaatgtatatataaattactaattcttttccatttcaaagagctgctatctgaagaagatccagttttacatacaggcatattagccatcagcaactatctttcattattatcgtaaaactttgggttatcatgcaaaaagtactgcaagtgtgtactgttaatagaagtgttcctggtttaaacacctactttatctaacctattgctctaaactgagtgatgtcttcacaggcagacttctgggacagacgtcatcacaggaccacacccttggtagcagcatgttcacagaatcaaggcatgaaatggttctttagaaaggcaacagccaccaacagcagcagcctagttttaccaagtgattcttcctatatcacttcctcagcaaaaacaaaaaaaacatatgaataaaactgacaagacatgttgaaagtacttaagttagctatgaaggattaaattttttacatataattctctaataaaacccatgacagaagacagatataggcttcccccgcgggctcagcgggaaaaaacctgcctgcattgcaggagatccagattcgatccttgggttgggatgatcatctggagaaggaaatgacaaccaactcaagtactcctgcctgggaaatcccagacaggctacagtccatggggtgacaagagtcggacatgacttagcaactaaacccaccaccaccatccctctcactttcattagaaaaggaaatagatcttccttaagtaaaattttggaaggcaaagctttctctacaaaacagcaattagcaatattactgttagatgagttaacattaatttgcttcactagtttatgttctctatcttggcgacagttttagtttatacaccactgcacagcacttagaaccaggacttgtgtcataattaagtagtcaaagtacacagctaacacagtacactttgatattcttatatatttaaaggtacaacatataacttccctagaaaattcagtgaatatactcatgcccgttttaacacccttgtcataagcaatagtgagttgctcctccacccaccaagaacctgagaggaaaactgctgttatttatgttacactaacacacagtagttattaacagatgtactgtctttccagtctaagaaaattgcaaaacaatttgaaactttatcagttacattaaaccaggaaaaggcatcaagaacagggctgaccagtagcaaaacacctaaaacagggatttc

SEQ ID NO: 29113 - DNA, 2861 bp, Bovine  19866880946271
  misc_feature (1)..(1): n is a, c, g, or t
ncgttagaagaactgatgttaaggctgaagctccaatacttaggctacctgatacgaagagccaactcattagaaaagaccctgatgctagaaaagattgaaggcaggaggagaaggggatgacagaggatgagatggttggatggtatcactgactcaatggacatgaatttgagcaagctccaggagacggtgaagcacagggaagcctggcgtgcttcagtccacggggtcacaatgagtcagacgtaactaagtgactgaacagcaacaacaatcttctaaatctacatggtgaataggtcctggtttgagttagacacctggaatcattttaatggtaacttgaggtatttataccaccacctgcccatttgactttttcatggacttccttaaagatatcccctgacaccaatgactgattatcattctactgtaggaaatagattatcttagttttctattagtctaaccatatttcccacaaatttagcagcttaaaacaacacacttattatctcacagacactatgaatcaggattctaggtgtaagtaggttctctgcttcaatgtctttcaaggctgcaaccaaggtgtcggctaggtatgtcattgttggcagaattcagatccttgcatatgcttcgtttccttgctggatggaggctgtaaactttccttaactccttgaggcttcccacagtttcttcccacatggggctccccaagatgactacttgcttctttaaagccagcaaaggagagagagacaccagcaggatgggcactaaaatattttacgatgtaatcacaaaacaatgtgcgtgtaaccatccaatggtccatttaaatacatctaatttgtaatacacaaagattatcccaagtcctgccctatgatatgtgcaaatgtgatttgtgtctgttgttcctacatggcaatcaaaagcctcgaattatttatctcctccaagatcagaagaaagttcctcctctgcatacagcaaactttcaaagagctatgctaatcctgggaggaacactttgcaaaagactcttcccactttgatgtgctagcttttaccctacattcaaacgcaaatccctctctattcctacttttatgagatcactgaggaatggagctgccataaatttctcctctaaagggtcacattgtatgcaaagaataccaagttatttttataaaaatgttaagtctctaagtgtttttaaaaatagtattaatggggaattctgtcagtgtgtactgctcttactaccaagtctatatcttttcaagttggttgcaacttgatcatccaagattagccagctgtcctaaacacgactttattttggcttcgaagtttgtgtgaccttattaggacacccctggggtggggggtttactagcagtgctcactgttaaatatcggcttaattcccacccctgaccttcttctataaaaaagctgtaatttccttgggcatgaaggaaatcctcccattggtgggagtggttggcagtccctgttatgagatcactggctattttgtccaaggtgaaacatttccctttgacctggcaaggccatttctaaacccacagcattttcagaggaggtgagcagtgccaacttgcaaaatgggttaatctgtttgtttcaataattttaaaatcctaaactcattgaataatgaacatacgatcttaactgctttaattaaaaaatatcattcattaaaaaaacttctttcccaacaaaactcatgaaagatgtatttttgagtgtacagcttgtgacctgaacgtgtcaaccactcttcttcacttcttcctctataacattagtgtgtctatgtctcagtgcataatgttccataattttaaaattcactacaggatagtagatatttagaaccttgaatcattctttaggatatttcatatttctaatatttccttctatccttacacttttggtgggggataccttttttctctcttgccattctaatttccctctagagttttcctttttattacttgtccatacaactcttggatgtgtggggggatgggggttcagagaggggtggatggtgattggtgttcccccttctctgggctcctaccaacccacaaatttaggaactcttccttttctgaagtagcaaggaagtcactgcattctcctttctttactctccctctgtcttcccaggaccagtgaatagtgtcaggctagacctttggtccatagatcctgttgggtggggctagtggagcctcacgcctgtctctctttgcctgcctgtagtttccacatgtttttctcaatcttataagccctctcagggaagatcgtgctcctggagggcggtggggaacagtcctgtaattgttcagctgctttggctaagaaagtctcttaggcgaatgatgattggtcatttagtcacaaagtcgtgtctgactctttgtgaccctatggactttctgactctttgtgaccctatggacttcagcccgccaggctcctctgtccttgggattttccagatgagaatactggagtggattgccatttccttctccagaggatcttcccaaccaagggaccaaacctggatcccctgcattgcaggtagattctttactgctgaggcacctgggaaggaagccatttgggttgcagatcccagcccccttcttaaatcttgcttagcagtgatacagatagtcttttggtctctgataacagagacttttaaatttattcctcatctagcagagaagggggtgctatgagttcatatcctcaaataccaataaggtgctatcaacctagat

SEQ ID NO: 29114 - DNA, 1552 bp, Bovine  19866881051698
  misc_feature (1)..(1): n is a, c, g, or t
ntttatctcagtgcactttacctacccacctcccattattaaatggaagtgatgataatagtgggacttgcttccagatacaggcagtaagggctgaacacttagatcattttcttcttcgtcattggccagctatcatattctaacactgaagttggtttaggcccagattataatggagaacttttaattagaacagaatgaaacagtaagaaatgttgtacttgtccaaacttaagagcctaatggctttatgaattcaatgtcattcagtatgaaaatatatgcagtacttgtatttttcacccagaaggtacagtctggttgaggagacagatacgaacattagtacaacaaagatgtcagtgaatgctgtaatacaggtaaagttgaagtcttgaaggactagaagacggaagacaaattgtgattaattatatttatgaaggccttatggagaaaggtgcatttgatttgtgacttgaaatgtgcctagaactttcaggcaaatggagatgttaggatgcctttaaaggagtattctcctttattaagggagtattctagtgttcagaatttagctactccagagttgggtgatatgtggctcccaagactagattttatctagttaatggagtcaccccctaataacctcctgaccatttcacctcttctaaagatgatctctggtgtatattatcctgggttttagctgactagtattatcatgctcaacatgtacagaaacctaagtccaagaggtctagtaacttagattctttcgtgtgtgccaaaaattaaagataacatgagctcacaggagaaaaccagaagaaagatttcagggaaaagcaaaatgttatttttcgagataagttgtttcacccctgtctttccaccatcctaatctgagtttgggtatgttatgagtatgtttattaggttttgctggaaggtggaagaatttgaaggacacttgagaaattatataattattacttttccttttcaataaatagtcgaatggttcattgcttggcttccatggcataggctgtatcaggaattaataaaatctaaaataaaagtcttttgcctttgactgtgatataacatctgctgtaatttcctttctgcactcagccaccaggagcttgctggagaaaagttactaaactcaaaatcatcccattgtgtttatgacaaactattgttcttagaccagtttgataagtatttacttcaccttcctttaggaatatcttatttctctaagattcaccagcttccaaacaaaatgttggctgttttactctactaatctatttgacatgcttacaaatgtctgaaattttatcacacccaattcaggttgacctctggaaccccttacccccatattgaaaactacttaattggctccctcagggacacacagaaaattggatagttcccctgcttctaatccactagggaacactatatgtagtcactcacccacttgcagaaagctggaaaattattaccatgtgagtagaaagaagtaata

SEQ ID NO: 29115 - DNA, 1272 bp, Bovine  19866881060321
  misc_feature (1)..(1): n is a, c, g, or t
ngtacttacttatccaagggctccacagttatctagagacatgactgcaagttatttctttcaatactggaattggtctggccacaattcaccagattttctaccttcaatgtggttcataggcatgtttgccttctgcagtaaacttccagaatgaacccattatctacaaaggcatctaaattctgactctagcttcactgttataatgctttaattaccaagaccttagaggaataatccactgagctcaactgcaaaaccttcagatctacaaatttcccttattgcctactataagttcccctgcaggtggcctgcagagcagctgggagggagcagtgaattttgttgctcattttcttctgttgtttttcagtgaaatgcttttgagtctaaaagattcctattggcctgtgtcttccctatttctatttctaaaggactaccaaccactccagcctggcttttctgggaatctaacctcctgcacttggtcccaggcctccagggaatgttgccatggttcactggagcaagtgaagggaaggaaagaggccagcaattacaaacagcttgtgactcattttcagcagcataattgggctcacagaggagggcctgtccactgaaatagttcaaagtcctggagaaacaaaagtttatggtttatctattcaaaagaatactcaacagccattcagacaaggtagtaaaggcatgtccaacttcagggaaagctgtccgtaaagtgttgttaattataagcttctacctggagtttggagagtgagcataggttcacacaaaacaaaagttctgaaagaatacatacccaagtagcagccatgcctattccaggttgaggtataatgtcttcctttgttacttccttcccctccttcttttttttgcttctttctttttgaattttctcaatacttttcagtgagcatttatgacttttggcatttccagaaatgttcattgggttctctgggtactcctgagtacatgttcagaccctaaagcctcttcctgctctggccttcccccacctccctgtagggcctatggaactcgctactctggctctgcagtaaatgagaacactttgaaaatcaggcctggtacctattgtccaagtgatcctgggaagttttattactcaatggccctcatatttcttgtctgtgaaataaaaaacttagtaatgcctatagtcaagcactgtggtcatacaagggaattatgttatccaatgaggccaat

SEQ ID NO: 29116 - DNA, 1620 bp, Bovine  19866881076857
  misc_feature (1)..(1): n is a, c, g, or t
nacataaaaatgacttaaatctacatacagcaatgtgaatggctcttttaaataaatattgttgactaaaaaaagcaaatcacaaaggaataatggcagcataactccagtactataaagttcagatatgtgcttgactaaacaatatattaatattttttagggttacaaacctggtaaaactgtaaataaatggaagggaattatcaacacacaaatcgggacttttagtgataatttcatattcattatttaaactggttggtaggtacatgagtgttcttttaagctttattctttacaccttattcatatttaatagtctgtattttatatttactaaggcaatttttttaaaaacttatgttggtgaaggttaagggaaagaggcagtcctatatactgcttataagaatataaattgccataagggcaacttggaaacacataaaattttaaaattcatctaccttgtgactttgtagtaccatgtctaggaatttgtctttcatctatgtatttatgggaaatgggatatctgtaatatatccatgtaagcattttaagtagtagtcaacttccaaatatcctccttcagagttgtatcacataaattaagtgtatcaatgcaatgaaattattggcagttttcaaaaagaatgagacaaatctatacttatttataagaatgatctctaaaacatattttgagtgaaaaagagtacagaatagtgcatatactatacttccctatagggcaatgatgacaaacgatcaactttatttgtacataaatagtgtgagtgactggagtacagagattggagagagtcttacatttcaatttatatgtttttacagattttgacattcctactattcaaaagaataaatactattttcaaagataaaatttaaataagagttaagtataaagagaagataggcagtaaggaagaaggaaaaacacctcgaaatctggaagtctgaaggcaatgtgttaatacagaggaagaacaaagaaaagagctaaaagtgagataggtttaacattccttgagaaatgtatatttcctcttgattcctagacataagacctgtgttatggtagttaagaattcttcctagcaagagttgttcattttatctcattgagcttttgtatggattatactgtactgatagtaaaaacgtaccactacgtacctatttccccctttctagctcatggtaataaattcattcttaaattataccattttaggtatccatcatacttggcacctgaggtaattgcgcaaggaattttcaaaaccagtgatcatgtgccaagtgaaaaaccattgccttctggccccaaatcagatgtctggtctcttggaatcattttgtttgagctctgtgtggtatgtataaagaaatattaaactaataaaaatagtgtgtttattagaaaaatattttggggtaggaaagctatttagtaatagcatctttttatcttttttttgcaaattgactagatatgaggattaaaaggctgaaatctcaatttgattttttaaaaaaccccacttgacaatttacttgaatattattttggtatacctaaaactattt

SEQ ID NO: 29117 - DNA, 746 bp, Bovine  19866881079285
  misc_feature (1)..(1): n is a, c, g, or t
nagaaagggcaaaatgaaagatttaccaaagttaaaatgttaataggaaggttggtttttggtttttgaaatcgatttgttttattgtgttttgttggcctagttctcaggtgtgtagataatatgaaaatgttgagactatttttaaatttgagtttgaaaaaagattttatatttttaatatagagattattaacagtgaatagtggtggagaggtgtgatgaaatggagaatttttctaatattttcattattctgttaataatcacatacttttagctgcatgttattagtttgtatgtgaagtctttctttctcctcccccaccagatcatagccttcagtgttctgtctgtaagataattgtttaggtgaatttctgtacctccaacaaaactacaggctagaattcatcaagggcaaggatgggcattttcgtaatgagatcccaaactgagtttcctgctgaataactaatcttattaaagcaagccctcattaatcttccatcattaaaatgcagactcctattgcagaaaagattgtgatttctggctcctttccatttgccgtgggtcacagagctctgaatactgagtactgctgtagcttgaaaagttgggaatattgtgcattgatgtgttgctttagattgtatgtatcatggtagttatgcaatttacatttaaatagggtgagtaatgtgtatttggaaaaattggggccacagtgatttttatcattt

SEQ ID NO: 29118 - DNA, 1320 bp, Bovine  19866881163796
  misc_feature (1)..(1): n is a, c, g, or t
nttgcttattttctctctttcctcatttctagtgggactccacatatataatttccaatttagactttctaggcaggagagaataaagcctatgaatcacataacagacaagacttattttgaaaaaaaaaaaaattgttctcaattgtttttggagtttgaatgtcagccctcatcccttgggtttctgtgactatgcatgctataaattctttagtagtaagagtaaagcacttgttctctcactttattagcttttaaacagaaatggaagttgctaagttttatgagtttattgcacttaatcaaaaataggaattaggaattttaattttttagtattagaaattaaatctatttaaacattctgaaattaaaactgcttcagaaagattagttttaaaatcagcaagccatacaatcaatgcttctatcttcttttgcattagattacaggctctataggtattttcctcagccttcacctgaagctgtacatttatgaagataaaataaagaactcttgattactctagttctgctttcagtcattcagtgctgaatggggcttttctaaaagaggttttgtctgaacggaaggtgtgcctgactgatgaaggaaagaatttgactaaagtattctctatgaagaactgactgatgaaagagatttgaccttggcgttggttccaatcaaatgcatcatttgtgaggagtttcttcaaagaaaagactgattgccttatgaaatggtaagaaaagaaggaaacaggagtcactgacaagttcataactttctgaaatttcagtgtgtatcatcaaagaactttaatatgttgcaagcatgttcgtctacaaatcaaatttaggagattagtaaattatacttaggaaaaattatacaactttgctttatgaagaaaataattataatactaaaaaattcagaatatagtttttcttttattagacagttttatacacaatttcactattcactgtacaatttccacttagaggcataaaagtaaaacttcctttataaaatttaaaccttctttagtatcattgatattgatattttcctgtatgagtaggatttcaaattcacagaacattgtttatggacaatggacaagaattgaggataactacagaacaactctgaaaatttctattatcatttctgcctaagaacgtgtacatacaatgcacattaaatttagatgtccaaatatcagaaatcaattggaatgagaatgactttaaaaaaaataatattccatttccaaactagagtcaaaatttatttagcaatgt

SEQ ID NO: 29119 - DNA, 923 bp, Bovine  19866881169519
  misc_feature (1)..(1): n is a, c, g, or t
ntgctgattagatacctgcccatgaatctgcactataacatacctggcagaggaaccttaacactatttcagttcaacaccatttattcattggatactttcttcatttctggcataattatttcttgctgctgttgttgttcaatcactaagttgtgtctgactctgcagcctcatagaccgcagcacatcaggcctccctgtccctcactatctcctggagtttacccaagttcataatttcttaagccatccttactctgcactggtctgagaatagactttggctctcctcatttcatgaattttcagttgatgttagttacagccactgttgggcagtctccaaatagccccttactttgattgtatttttctttacattgaaagatatatatgtttagtggaagaggttgttaaatagaacttttctttatattatgaattaaaatcttagaaccactcccttacttggaatatatgctatagactccagacagcaaattaagaagcttccaaaatatcctcatccatgctaatttaactagcagctatgactgaagatgaactgagagtggaatttaatttttggcaggagtatcccaaagcagccacgctatctgccgcatccaacagtcttggcatgggatcaaggtaattctttctgagggcaagtctttaagatcacagtctcttaaaacgagtactctcaaacatcattggagccctgcatctccccagttttatcctgctaaatgctaggggtgaacgtcaatgttatttttaaattcatgtgtgttggtatagagaggaataatgggaagaaagagactattaaaaaaaaaaaacacattaaaaggctcaaaaagaggttgaacaaagcaaattttattctagtaataaggggacaaccctcttcccca

SEQ ID NO: 29120 - DNA, 1019 bp, Bovine  19866881188100
  misc_feature (1)..(1): n is a, c, g, or t
naaatgtcatcctactggaaaaatacagatactgcaaaaagcagtatgcaaaaagttcagtatgtttcttgtttgtttttaagactgagatagcaatatgtcactcccatgggaaccccgcttcttttttggaatgggcactggtggtcctaactgcatcaggctacccgattagaccttgcaattcttttagaaccccctctgctccatgattcaacaaagaatgatataattaactacagctgacttgaaggagaggctaacgatcaccaagcagaagtcaatccagcccgtgccaggtactgtgctgggcacaaggaatatagtgacactgctcttgccctcctgctggttagtgtcttggggaaacctcaatgtggtagagaggcagttccaccagtgctttaagagttactctaggggactcgaagggctgtagaaacacaagctacaggagtctcagccaagtgaaaaagtacacgggcttccttcctgggtaagtgtcagctaagcttgaacccaaagggtaagtggaaagtgtgtctgtatgaaggagggagatgctgagtcactttgctgtacacctgaaacaatgtcaatcaactatattccaattttaaaaataaaaaaaaagaaggatgatgaatggagtgttttctaggtcaaagaaaagatacaaaaaaaaaaaaaaaaggaggcaaacagagggggtattacaatcttactccagatatccatcctattttcacctactacttatcctcctttacttccaactccagtttctagcctgtcggtagcccctttctctctaatcatccattgctcaacccaggaacctataaaacaaagaaaatgactaaggagcagccactgaaacctggaaccaagcctacattacacttaaaaatttttattttctgcagaaaaaatattttgactactacattttttggagttcattagaaagatctgaaatggatgacaccaagctgtttgcctaaaataatttcccaagc

SEQ ID NO: 29121 - DNA, 1577 bp, Bovine  19866881236708
  misc_feature (1)..(1): n is a, c, g, or t
nattacccagaaaacacttctcaagtgtttctataaacagtcaagtccttgatataccaggtcaaagttggcctttaacctttgccttctatgtctttgctaggcaccaggcttgaagaactggagaagtccttgtatcagcctcccagtaacacgtggaaagccaaagagagggactaccaggaaagaggttagttagctagtttctaggtctattattcataaaagagaagaaatacactttagttagatcagagatcagttaagtcatatagtcagttcggtcataggtcagatagtttgctatcttaaaaaaaattaattttatacctgaggtaaacaatcttgatgatttattacttgtcagatattatatcttttctaaaattatctttaagatcattagtaatctcatgtaccatgcattcatttccatgaatttcacatcaggttattaaggacctgaaaggcatgggaggaatatgatcactggattgagcccaaatgacacaaagagtaatttgcatactaatgtgcaaccaataaaagagaatcttttatttcaatatgtaataaggattaaaagcaatctctgtgctcacacaccatcattaattatgtatagcaatacaagattacaggataaaacatctaatgcagtggtcagtatgaacacttggttttattcagtctctaagtcatgtctgactctttgtgaccccattgactgcagcacgccaggctcctctgtcctctactatctgctggaatttggacaaattcatgtccattgagttagtgatgctatctaaccatcccatcctctgttgcccccttctcctaccgtcaatctttcccagcatcagagtgttttctgatgagtaggctctttgtatcaggtggccaaagttttagagcttcagtttgagcatcagtccttccaatgaatattcggggttgatttcctttaggattgactgagttaatctcctagcagtccaagggactctcaagagtcctccagcaccacaatttaaaagcatcgattcttcagcgctcaactttctttatggtccaactctcacatctgtagatgactactggaaaacccgtaacttttgactagatggacctttgttgacaaagtgatgtctctcctttttaatatgctgtctaggtttgtcatagcttttcttccaaggagcaagcatcttttaatttcatggctacagtcaccatccgcagtgattttggagcccaagaaaatacaatctgtcactgcttccactttttccccttctatttgcatggagctgtctgtggcatagatcatgaacctccttattgcaaaattcaggcttaaattgaaggaagtaggggaaaccactagaccatctaggtgtgacctaaatcaagtcccgtatgattatacagtggaggtggcaattcgatttaagggattagatccggtagacagagtacatgaggaactgtggatggaggtgtgtaacactgcgctggaggcagtgaccaaagctcagtttgatcgtagtaactccttattctgagcctgattc

SEQ ID NO: 29122 - DNA, 1407 bp, Bovine  19866881290785
  misc_feature (1)..(1): n is a, c, g, or t
ntgtaaatgccctgtcagaataaatgtgccacttctgtgcctgccttgtacaaggtcagcaacctctgtagctgattgtccctggccatggtaagccatgcaggttagcctgcacgggcagggtagttgagagaaaaagcaaggaagagaatatgaggaacaggagaagagaaaaacaaataaaaaggagccagaccaatcttttatggcttcacaacacataggaattatgattgcttcagaattcttaataatcacctctgatctgttgccttaataaatatacaaagaattcactttgggtttttcactttaatctatataaaaagaattactgtgtttttgtttgaatgttgtctattaaaaaaaaaaaaaccaagtgccaatttagcggaacctcaagtaatttttttctttaatgtcaaagtcatctcattgctaatagcaaccgtgccagaacacaagtgcaccttatttgtacagagcacttttcacattctttctttctttttgtttgaaatggacaatttgtacgaattttgacctttcttgctcttagaagcatatgtttggactgatttatttggataagatgggatattgcacctggtgtggataagactagattacatcttcaggaaattgaactttttctttttactctttagaacaaacagctttctgaaataaatatgttgggtacagtgttagctttttttttttttaacttcactatgctacatagaatctttggtcttacaataaagtggtttccttttgctttagcaaagtgatatatgcattttctgaaatttaattccttggcatgttcttgattaaattcaatgtttttgggggagttgttggcatgtgggctttaaaactttttattttaatataattcaagcttaaaggaaattgccaaaatagtgcaagagatatccagattcaccaattattggccccatttgctttatcatttatactcttttctttctctctctctatatatgcatgtgtatatacatatatatatatgcatattttttcaaccagtgagaagttgaagatgttttgcccctttttaattcctctacccattttcttatgtaaccacagtacaatgatcaaaatcaggaattcatatactgatacaatattattatttcaatattctatattcaaattacatcaactgtcccaataatatcttttatatttattttttatctggttcagaacacactctaggatcatactggattcagtttttatgtgtctttagttacctttaagctgaaatgattactagacttttgtgtattacctatgaccttgatttttttttttttggatgagacatttttgaagagtatagacaagttatttgaagactatttccatcaa

SEQ ID NO: 29123 - DNA, 1174 bp, Bovine  19866881316345
  misc_feature (1)..(1): n is a, c, g, or t
ntttatctatgattgtacacattccctctagaaaagctcccatttggcctttcagtcataacctattttttcttcctgttggcactgcactcacatttcattggctaggctccaggtctatggagaggaaattgaaaatagagaatgttagaataaacattgtagcaatgagaagtttcttgccaatagctgaagattaagagagaagaactataaaaagcagactaaatatactaattctagtaaaaattagaaaatacatctctataacctctgaaggcattgttataatgctgtattgtgtaaaattgatagtcatagtcttggcctcagtaaagaaagtttaaattatattcaagtttttaaaaggttaacaaatatgcagccagcttaaaaaattccaaaattgtagatgttttcagttgtttgtaattgaaaaaagaaaaagcaaaaatgaaacatttcaaatgactagcaacaagaaaatagataaattatattaaaactctacaatggaaaaacaaagtacagttacatatatatacatggatgaatgttagaaaacagcaagaaatgaaatttgcataaattatgtataaaatacaattccatttacctacagtttagaagtattcaaaactaaataatatagcattagggttatacatgcatgtagcaaaaaaagaaagccagtgcaatgataaacacaaaattcagaatagtgacagtctcagggcagggaaagatgagggagatacaactgggtagggaaatatatataggatttaagagtattagtaatgttttatttcttaggctggacattggatatccagtaatcattttattaccaatagtgttatttataatatatgcatataaaatacatttttatgtaggggatatttaataacacaaattttactttttaagaaggttatgttttagttatctagaaaattttggtttatgagaaatatttccaaaggtttcagatatgtgattcattattattattattattattacaaaagaaatataaaaataaccagatggctatatcagggagctcatttaaaaaacaaaatatattggtttacttacctacagatacctcctttatattagaccattgagtattaatgtacagaaggggtttctatagggggaaatt

SEQ ID NO: 29124 - DNA, 905 bp, Bovine  19866881643294
  misc_feature (1)..(1): n is a, c, g, or t
nagtttatttggtactttattttcccattaattttccacaagaaggggcaggcttggcagactgtaatatcatagaagtaaacatccaatagagtagtaggacttgatttgaaaagttcaaggagaaggtaatgaaggagtagctccttagaagctactagtgtagatagagcaagagctttgcttacttaagcatctttttccaagaatctactctaattaattaagaaaattttactattattttggataatagtaatttggataatatttggataatattttgaattttggatctaggagtcaaaacattagaaaaggagttgaaaattaatgtagaaagaggaggaagaattgtataaggatagaaggaatggagcagaaagatgtatggaaattgctttgtcctcaggcccctttcttggttctttccgtaggttatttagtaatatagcaacataatatggtagtgttttttgcagttaaagaatgaatcagttcattaggaagagagaaataggtgagaagaggaccgatgacagacacatttgtatggatgaacagagaagaggaacttggcaaagaagcctgagagaagcattctgagaggtagaaggagactggaaaaaggagtcactacaggcaaagaagagtggtcaacagcattaattttgtagatcagtcagtgactgcaaaatatgagaaaaatctacttgtttgtacaaataagaaggtggacatgttaaaggaagtgggacaaaggtgggacagaatataagttgcagatggttacagaataagtatatggcaagggagtggagtagaaaactaattctgtgaagagaagaattattactcataacttggtgatgcaggaataaaggaatgagccaatggagggggct

SEQ ID NO: 29125 - DNA, 1175 bp, Bovine  19866880404619
  misc_feature (1)..(1): n is a, c, g, or t
ncaaaggaaatatgcatgagactgcgtcctgctgtttgttgctttttctgttaagagtcctctctgagacatagtttagcgttctgtgtggcagatttacttttgttaatgttgtaagcagtgttttaatacagaatttatgtactgtgattgttgagaatttaaatgtactgttggaaattttacctttggaaaggggaaatttacagagattgtactgttcttgcttgtcttattataaatttgctgaatagttctagtatggggcaaccttacttttcactgtaaatatactgaaactttctcttttaggctgggataaacattcgtatggttaccatggtgatgatggacattcattttgttcttctggaacgggacaaccttatggaccaacttttacaactggtgacgtcattggctgttgtgtcaaccttatcaacaacacctgcttctacaccaagaatggacacagtttaggtactaaagtaaccagatggggtgcttatgtacttacagcatggtagtaatggttattatgtaattctcctttatgagtagatgcctctggagattatttctttgttctttctaggtagaagctgagaaaatggtgaaaatttaaatctgaagtattatgtaatgggcacatattcaattaaaaatcttaattttttacgttgaaggccacatgatatcacacctgtgggactaactagaaataactgcatgctcagatatttattctaatagtggaaatgctgcatgctttctgctctgctttgaataaagcccttcacagtatgatccagttttctagataccgagtgccgagaaaaaagctgtcagtttttagtataatatgagggtaatgacagagcatggaaaagcttatgctcccagcgaaatgaagggcattgacatactgaaaaatcaggcctgctaacaaaaaattaacaaagattgtaactacaagctagttctgcaaaagggagcagaattaaaatgagcaaatgataacaaaacttctaaaagacagctggcaaatagatagattagtgaaaacatgagaaaatcactccgctgtaagactaacaggaattagggggttttggttgaatatctgtactacttcagatttaatacttttatgctcccttttcttagattttttt

SEQ ID NO: 29126 - DNA, 1924 bp, Bovine  19866880414308
  misc_feature (1)..(1): n is a, c, g, or t
nctctaggtttttggagtttgggtgagatctctggaaacaagcaagttgtgtgcttttccagttaattccacgtgctgctgctggagcagttaacaccaaaaggaaagctgctcagaaaggacacatctcaccatcagcaggtagcagtttcctccgaagtttgggaaccgtgctgtcaaaaggccttctcccattttctttgcaaagatgatgccagaactcctaattcccagctgctctatttatttgttttttttctccctcagcagtcaggaaccaggctctgatcacagaaattttgggtgtgattagcctggcctccttctcattcccaatgtggtccctgcacaaaccatccataaaatgtcagcatcttcccctcctgaagtcgaccagcatggggcagggacagcggccggccagcgctgctcttcctccctggtttgcagaagggcacatggccatatggttctgggagatgtaaaaccataatgttactgctgagtgatccacaataaaagcacatgcagccgcgttccccggattcctgtacagtaggctaatccacttaatctcactgttagcttccccgggcggggatttcacagtctcttttgatttagtggtttgtaaaatctctgattaagtgcctgtgccctcccgttattatctgtctattccctacatgagttgggaggaagaaaccagggaagttgaaataggggtcaacatgccctcatccttccctattgggtttttctttattgttgttatttttaaaatttaagtggttttgtgtgtggggagggaggttactgctaatgacagcatttaattttttaagtttttacatgtgcccctttaccttgacatctgcacagggtcctcccagctgaactgaccttaaattgatctctgttgaggacttgtatgttactaggtctactcgtggtctgagtccactgctctgtgtgtctttaaaagtggtaaggagcaaggctgatgggatcagacagatttgactttgagacttggttgtgtcatttgctagctgtggggttgtgggcaagtcacctaacctctctggtctcaatttcctcatctgacagtgaagattaaacaccagtacctaggtgctgacacatagttctcaataaattatgacaatagtagctatcattcattcgaggggatgtagttttgcacaacaatgctttgttttgggacatcctgttaagcccttagctgtgtgtttttctggcacctcctcttagattaagcttgtagaacttaagaacccaagtttttcattcactttgtaattgctaattgcattcagtttgaactattatccacctgattctctgccccttaaaaatgctgataaaaatatttggggaaatttgccttggacagtataattatagaaataatagatattcagttgaaaatctgccagttatattgaagttcttgcttaagttttaaattaagttgcaaactagttgaatttgtgcccatccataaggagaaattcaaagtgaaaaaaaaaaaattcagcgtttttgatgtttgttattgtttggtttggggggtttcatttttttccccatggaattctcttgaagactgttcagactaatgaaaacattttttctgcctcctccttcctcaatacctttcagagaaggggaatttggagtttttttttttttttttccatagacacttctgagtttgaacagtcctatcatccgacccagataatcacgatggggtgatcactgacctagagccagacatcctggaatgtgaagtcaagtgggccctagaaagcatcactacgaacaaagctagtggaggggatggaattccagttgaactattccaaatcctgaaagatgatgctgtgaaagtgctgca

SEQ ID NO: 29127 - DNA, 1901 bp, Bovine  19866880597174
  misc_feature (1)..(1): n is a, c, g, or t
nctgttattttgcggatatttttggcatgtagtgtttgttcttttaaagggactttagacattatgaccttggctttcttacttaaaaatgtgtctatctattatagtaccagagccctttcttgagatgaaatcttagggagaagaccaagatgcaaactaggtcaaagcagagatgttctcagaggacggcagagacgctcagcgcgcttcccatccaccacccctattatattccagtgaacctgaaaacactgccttatagcaaagacggtttttaagagccaagataacaagtgagccaataaaaatcctcataaatactttatgaaatatttgctaacaataaagataacaggagacataagaccctgaaaggcattttcacaacttgaatgggttataatggacattatactattaattgccatttatgctctcttgctcaatggcgactttgcgtggtctctctcatcttgtgagcgagttataagatgctttcaatattattttgattcactaccaaacacatgcacacgaagagatgatgtgtgtgtgtgtttgtgcgtgtacacacatggcaacctaccctcttctttcttccaaatgctcaatgctcttctgattttataacttagatttggttatttccatgtcctaaatccagccttggtctcatagacacaaaagtacttggatttttcaaatggaaaaaattgggggcaagctttatttaacacatctggggaggcgtttttggtttccagcgccagggcccagcgctgatcacaagggaaactctgtagcagtccctttccatttacctcctctccccgcctcaccagacccaagagggcagcgcgggggctccttcctgcggctccgcctcctccccgattctctctcccagagcttcaggctcaaacttctatttcttcactgccatctgttttacctcccttttctttttcccaatccccagcttccttttcttaaattatccccaaccggagggacttgcaatctgtagatgtaaaaatctaagagaaatatggaagtaaatttgcatacaatggaatttggcaaagtgaaggagctcaaagacacaaagagattattgccattttttcaaacatgagctatcactgctggtacctggaatgaccttaagtaatacactggattaaagtttcctcaaaaattggattttttatgtattatgggttattaaatatagttcttagaatttgtggcaagatagtatacttgttttcagctggataaaagctccttttaaatattaagtttttaaaaaatgatttttctggcaaaacttgtgaattcgtgacatttgggagacaatggatgagtcatgctcagtaaatcaaaagagtaattttattataggactccttttcccatcagatctagttaagcagaagtgagcacacggtatatcgaatcctgctccttcagtgtaatgagtgttaggatcaaaaaaacaatataaaacagtctattacaatagttttcagtatagtctacacatccctgggggttcccatgacactctgaatgtgtccatgatgtcaaaaactattttcataataatactgagatgttatttgctcttttcaacatattggcatctgcactgttcgtgcaaaagcaatggcaagtaaaatgctggcatctttgggtgattccaggcagcagcagcagcctgcactgctggtggatgtacgctttcccacactggctggagaaagaaaagtccatgtcgctcaacagtgaccttgataaagcagtaagacaggtcagatctcaacacagtgcatctttgtcctgttctgtgtgacgaaatggcacgaatgaatcaagcattctgctgtgtgctatgt

SEQ ID NO: 29128 - DNA, 2985 bp, Bovine  19866880630761
  misc_feature (1)..(1): n is a, c, g, or t
ngtggaagcctccagtcacctggagtccacctgctcctgctccagccctcaagctgactccaggggcaacctcgctgctcgaaacagcatgctggatgctgttccccatcgagagagcctggctccgcccagtctgctcctgggctgaaggcgtccctcctcctggacttgccccacccccgccccgccgcccagcactgaggccacagcctttaacagcccccttttgctgtcggctttggtggagcggctttgtttaaaattcaaaaaataaattttttagagggatatagttgatttacaatgttgtgttagtttcagctgtacagcagagtgaatcattatacatatacgtatattcactctgtttttagattcttttctcatttaggcccttacagagtattgagtcgagttgcccgtgctgtaaaccaggtccttgttagtgacctgttttctatataatagcgtatattgttgattgttgtgctcagttgccttcgactcttggcaaccatatggactgtggccctctaagctcctccatccatggggttttcccggcagggatactggagtgggctgccatttcctcctccggccgctcctcccaacctcaggatagagcccgagtctcctgtgtctcctgcattggcaggcggttcttaccacttgtaccgtagttagtgagtatagtcaaccccaggctttcaaggtgaaggggctttaacgatcctacaaagacggatcagcaccaacttgttccataataggagggcagctctgccacctgcctgagaacctcagcctctctgagccctggttccttcttctgcaaacgggggacgctcagccttgcccctgaaggttcagtgagatgctggctgtcgacccctttgcacgcagccgggcacagagtaagcacaaggtctggtgtccctgccagtataacccgtgtccttgcctgtgggacagactcgagggtaggaggggcgacaaggaggacttcagaaagccagaacaaagcatgcttggtttttcaccttggtagaagagtccgttcagtggcttcatatattacttatttctttttgcaggatgctttaagggacacagaggagagacttttaagaactacagagctgagattgtcctgctgttggctctggttattttctatgtaacactcatcattttcacttgcgtaagtatcttttgcaaacatctctcattattaaaagatcacctggggcaccaatcttaatgtgttttgtagatggtgcgaatcatttaataatagcaagggacctgttctcagaaccctggccttactgaggtccccagacagtgagactctctactggaggctcccagcttgttctccatctggtggttctgcatagagacgtgcgtggagaaagtgaatcaggaggtgaagaaagtttgtgaaaggtgaaaggatcctcttagggcaccagcaggccgggacatccctcaccgttcagtggtcaagacttcaccttctagtgcttggggtgcgagttcgatccctagtcggggaactgagattccatgtgccttagggccaaacaaacaaaaaataaacagcagaagtattgtaacaaattcaataaaaacttaaaatggtccacatcaagaaaaaagtctttaaaaaagcaccaacagggcttatagatatgctggaagaaagtgggaccttgcccgtccaataccgggagaggtgctcttcttcccataggtggatgagcaagtctgtccactccagtagtggatttgtctccttcatctgcccttgaactcttttctcttagagcaggggtccccagcctccaggccacggattggtagctcttgttcagtcaggggtggcagcagattaaagtgcacgaaaaatgtaatgctcttggaatcatccccaaaccatccccctcaccccaccacctctggtccacggtccctggtgccaaaaaggttggggaccgctgtcttagagattccctctaataactttggtacttcctctacgttttaagcattaaccttgagaagtcagaggtacgcagggtgtggcctgggtggaggatggctggcctgtaacgtgggtgtccttgacacgcccttgagctgttgggtgcagactccagctgagactcctctctgccccccacgcctcctcgtgcatggctgctcacctggagtgacagtggtcgttggggagcagggccagctccagtcctgacccaccaagaagtgatgggtctcgtatgccttagcaggaacaggaagtactgtccatttggggaccaggacatgggtcaccctggagctattccagggccggttcttgttgctcactgggcccttctggtcacttagtgaactctctggcccaacactcatctctctggttgctattttagacatgcatccagcatgagtgagcatgtgccgtgtacagggctttatgtaagcactgaggggatgtaaaaaggctaagacctatgtccttccttcaagaaacttacagcttggtcttgagagttatttgcatgtgagaagataattgttgtttggttgctcagttgtgtccaactctttagccaccccatggactgtaacccaccaggttcctctgtccatgggatttcccaggctagaatactggagtgggttgctattttccttctccaggggatcttcccaacacagggatcgaacgtgggtctcctgcgttggcaggcagattctttaccatggagccaccaggaaagcccataattagaatgacctggtggtaaattttaaaaacgagtgactttagtgttctgttggcaaatgcccgtttctacaggcactgactttccatgcaggaaatcctaatggcagggtctggaaatggccgcagtctgtgactccttgttgaggttcagagataccagtgaaacaatgccagcccaccataga

SEQ ID NO: 29129 - DNA, 1334 bp, Bovine  19866880648368
  misc_feature (1)..(1): n is a, c, g, or t
ncgcctttcgaaatgaagcaaataccttttcggaaccttgtccagcaacagtaatgtgagatggaacagcagcataggcggtaaagcagggggtgggggaggagagaaacagagtcctaaaaatgtctgcaagcctttgagaccccaaagagaaggatgagttcaaggaaacacgtttttttcaccctcagattctctcctccattaattctctccattttaaggaatttaactccctctgagcattaagcttggtacataaactttaatgacttgcagtgacttctactagagctcttatatctatttaaaatgcagtaggatgtacgcttgctattgatttgggttcgagatttgaattgttcttatgtaggtatttgtcaaagaacagatgttttctccatgtgtcatttgagatgggttaaggatgcccaggaggaaatggttgatatagaggtctctccctgagcagacgggttagctataaattgctctgtggttttttcctaaccctgtaatggctggagtaaaacctagcagctgaacagttaacccatttatttaatttgattttgatttttccattaagctctcatgatttatttaaataggttctgaaataccaaattgaaatgtgaagaatttggcatgcagggggggattaagaaccaaaatatgaattgagtgaaatccattttgcaaatctccagacctgtccaacaaatcgctggggagacctgcacagaattacgccttaagtggttttgagcagcaatattacatctgtgtttcttaacacatgggcttcaaggaacagcttccctcctggggctctgcttcaaaacttacagttaaagcccaaagctagtcaaggtgtaaaccttaaagtctgccctagaaacttccagaatctgtggtccacacctttctgacaccaggtccacctcaaggggggaccttttccataagcttcatcccaccctcctgccagaggcagccctggcctaacccgctctctgcgctcatctttccaaggtgcacatgtgagcacatgttagctccccactaacatccaccgtttctacctggccaatagcactttaggcctcctttcctggccagctccctcccttcctgcacacaacctaagcaggaaaggtactgagtggcttgcccctttttcttccccatccttttaaaatccagccctgtgtttgcatagaggcaaaatggagtggtggttcagagcaagtgtctgaggtcagggagccttggatctatttattcatttttatttattgggttatttattttggctgcactggttttcattg

SEQ ID NO: 29130 - DNA, 1027 bp, Bovine  19866880652316
  misc_feature (1)..(1): n is a, c, g, or t
ncatttgcaaggattcggagaagaatcggtgtttacgttttagggacatgctttggttagacagagctcagcagagtacttcaggacccatgtcttttgagtcagaggcgcctctgagttcaagtctcagctttgcccttgaagcagcggcatgggctcagatgggccctttaacatctgtgtgccacgtggacaatgagactttgctcacaaggttctcatgagaattttgaaagatgaagggcttagcacagttcccccaagacagtctactcccagtgaaagaagtattgttattaatggggaagcagcttgtcatgtgcttccgctggaggctctgagtgctgctcctcctgcttcgctggaagccagtcagccccagcccaggctgggcagtcaagtctgcctctgggattgcgggcagggggatgtttattaataatagtaaatgaagcatcattcatctcagctgctaagcatggccatccaaaatgctcatttgcttgtcttaaaccctaactgccgctctgccacttcgtgtcatttccagctatacaatcttgtatatgaccacagaatggccatcgggcagctgagatctaatctttctcagatgctgatgtattatattagcgtataccaggcgttccgtctttctgaatcggttcttataataatgggaatgataatacctgcgcgccgtatctcacacacaggttgagaggcgtgagtacatttaaaaacgcaggaagaggctttgaacccctcgcagacaggcatattatcaatacaaaggttttactatttattacgactgtctatctttcctgggtattccattgtgaagatttgtggatggcacttcatcttttttttttttcttcttcttcttcctttttaaaggataaaattcatttctaactaccttttgaaagccaatttatgctttggccatttgattaataggagtgaggaaaaccagctcccctatcaaagcgcttttgaataattcaatgctcgatattaa

SEQ ID NO: 29131 - DNA, 1870 bp, Bovine  19866880662064
  misc_feature (1)..(1): n is a, c, g, or t
ngcaagggctgagttgtaggagtaatctggatcatttcaaaatctcaagagaacgtaggagctagatctgctctcagaatctctcttgtgatgtaagtttcctgaagcatcaacaagaggtattttgtaagaactcatagcttaccagtggccaataagcacatgcaaaaatgctttacatccttagttattcagttcagttcagtcactcagtcgtgtccgacgctttgtgaccccatggctttgtgaccccatggcacacaaggcctccctgtccatcaccaactcccagagtttactcaaactcatgcccattgagtcggtgatgccatccaaccatctggaaatgcaaatcaaagagataccatttcccacccattaaggatggctagaaaccacaagtcagaaaacagcaaatgttggtagcgatgtggagaaaccggaatgcttatgcattacaaatgggaatgaagaattgtgccgccactttggagcacagtctggcggtttgattaaatttagagctacaaaatgaactaacaattccactcctgggtttatacccaaagggaatgaaaacgtacatccacacaaaaactcgcacatgcatatttataccagcattttttcataatagtgaaaatgtggaaacaacacaaatgtccattaattgataaatgaagatatccattaaaagggatattatttagcaatgacaaggaacgaggcactgacatgtgttacaacatagatgaaccttgaaaacactacgctgcaactgaaagaggccagtcgtaaaagaccacgtggtgtgtggttccatttatacgagatgtgcagagcaggtagagctacacaggcagacgcagattagtgattgccctgggctgggggtgggatgtgaggggacagggtgatcgctaaagagcatggtgtttctgggtgataaaaatgttctaaaattgagtgtcatgatagttgcacaactccgtaaatacactgattcatacaatgggtgaactgggtgaatggtgaatatgtgaattacaccttaataaagctgttaaagagaggaaaaaaaccaaaaagaatccatagtcccctatggctacctatgtaaaactttgaaggcttttcatatgttaatttttgtgatcttctcaaaaatctcatgaggtggaaacttttaatcttccttattttacaggtgtgtgttagtcactcagtcatgtccgactctttttgaatccgtggactgtagccccccagactcctctgttcatgggattctccaggcaagaatactggagtgggttgccatgccctcctccaggggatctcccccaacccagggattgaacccaggtctcccgcattgcagggggattctttaccatctgacccacgagggaagcccatgaatactggagtgggtagcctatcccttccccaggggatcttcctgacccaggaattgaacccgggtctcctgcattacaggtggattctttaccagctgagctaatatacaggaaaagaaggcacacttagggtgcagctgccacatatgcccgagctggggctctccaatgaatcccgtcactcagatacagaaggcctagcaaggacaaagtctgagccatctgcatacacagaaagacagtcttttcttaaactccatatttattacttttgaatctagggggagaggtaggtcagactgcatagacggcgttgcaggagtattaaatagaagaaaatgatggagcaggcaataaaattggttggggatttgggaatttatgagagagaaactgaaataatatgcaagcatgtccacgaaatagtgcctgtctcattcttcattatg

SEQ ID NO: 29132 - DNA, 1108 bp, Bovine  19866880750290
  misc_feature (1)..(1): n is a, c, g, or t
ntcctaaatacttagaggaggttaacatttcggcagtagttagactccagacagagcccttaccctgcctgcacaaggttcttgagtccgcagtctcattctgcctgagcttgaaggaactttgtttctagggaactttcattatggtcccaactgtttagttaaatgacgtctattaacaagtgttgattttcacaattctttctcaatagttcttactatttttgctttgagtatctagtgttttacacctccgcttaaggacaagcctgaatagtttcatttgctttgagagaaaagcaaaaggaaccagtcaacatcatgaatgaatggaaggaaaaaacagtcagaaatgcgtaactgaaagtcattgagtaaagatgggcacaatttaaaaaacagagggaactttcccaaacattgagataaacagatactgttcactgaacagtgtgtacagagttgcctgccaaccattgttagtgttgaatcaccagtttttagtaccaaaaataactttgagagactgaactaacactcttaccatttcatggatccagagatagtgagtcattttcttaaggtcacacagcttgctttctgaagctaacaacctgagcacctaaccactgtcccacaccacctccaaattctgatgataatgtcatggggatgaagacctttagagaacttggcaagaggggaacttgactctaacaccttttctgctgatgttttcttcaaggaaaagagttgctttctttgtaaccaatgcatcccaggtcagcactacatcatagcacagaaccacctgtggtataaggaagtcatcattttcaaggaaaaagacctctccgtggcatggttagctcagatgtgagagtggggctgtgatgatgttgaaaagctctctctacctcaagaaggcagggcttgttgttcagtggctccgtcatgtccaactctttgtgaccccgtggactacagcatatcagatttcctgtccttcactatctcctggagtttgctcaaacttgtgtccattgagtcggctgataaactgcgactcctcttccactgaggtagaaaaataataccaggcatgtgt

SEQ ID NO: 29133 - DNA, 2308 bp, Bovine  19866880810132
  misc_feature (1)..(1): n is a, c, g, or t
naccccattaacgtggaagtcatgcagtccatgggatgtgcctcattcatttcatcggggctgcttggttccttcccagatgttccctttcagcacatataaccattgttttttaaaacttgggataattatagctctgtaaacctagaggacaagattggttggctccagccagctcctcactccttatgtaatagcttcattgtttagtaattgccttattcatggagcaaagggatccatgtcagccaagacatctattcagaacactttccctgtgctggataaacaggagctggagtggtcctacccagagaaccaaaacctctgtgagatacttgctccttttctctactcaaatgcaaccctccttcagaaatggcttcaccttttctttagtaacaaatcagcccccaggtgggtctctgcctctgctggtaaatcctgaatgagtggggtggcccacgtggatgatgaggaaatgctggaccgctgagcaatgagatgaagggtgtggggcgagacacagcacggggcaatggtctatacttgctgtccctgctggggagcaagaaagtttcctctgtccttctaagttatccttctggtctaagaattaaattgacatgagacagatgaacaggagaaaaatcaaacaaaaatttaataacgcttatccatggatgaaggacatgtacactagaagaactgatgctgaagctgaagctccaatgctctggccacctgatgtgaagaactgactcattggaaaagaccctgatgctgggaaagactgaaggcaggaggagaaggggatgacagaggatgagatggttggatggcatcaccaactcgatggacttgagtttgagcaagctccggaagctggtgatggacagggaagcctggcgcgccccagtccatggggtcacaaagagttggacacgactgagtgactgaactgaactgaaacatgggtgaggggcttcccaggtggcgttaatggtaaagaacctacttcccaatgcaagagacataagagatgtgggtttgatccctgggttgggaagatcttctggaggagggcatgacaacccactccagtagtcttgcctggagaatctcatggacaggtgactggtgggctacagtctatatagggtagcaaagagctggacatgaccgaagcgacttagcactcatgcatacatgggtgaaacccaggtatgtcatttgccaaaatggacaaaaccctcaaataccatcttcagctaaaataaaaaaggaatgttgaaggtagtggtttgggacttcaaagggaaggcagtcaatcgacatggaggcggatgagtaaatggtgggtaaataagtattgggccaggcagagatgatgggacatgcagtgaactctgacctttatatcttgatatctaggctctgcctagacatcccccaccagacccagcctgtattctctgatgacatctttggggatagctctgttccggggtatgtgccctctgtctgaattctcttaggtgataaggggcaaggtcaaagtttcttcctgagacttttgggccttggttgttttcagcttgaagtaatccacacgccaaagagacattttggggtgatgagttttgctgccctacattccgaaagataagcgaaaggagagataaaagtgctaagttattttctggaagaatccagaatgatttctgggagctctcctggggactctggggtggaggagctgcacagtggcaggaagaggtaaagagctttcagactttgtggagggtcttcaccagcaagtctagacctccgtttcccagcctagaggatcccactggctattgatcgtatgtgctgccgtggagcacgtgccccagggaaagcggcccccgcccctctggtgtttcagagattccctgggaaatctacttagagggtaaagcccttgagccacagagaaccagtgtcctctaacgttcctggtgggcccaagagcccggggcggaacctcaggaaatggcaaagctccccagtacacaagccacatttcccacctcctcagccctctccctgtcctgatcctacagccccaggagagcaaacagtggagaacaagagaaaaaaacagagggagctttaaaacctaacaacaaagaatgatgcagaacagccactgaggctgtcttaatatggactcagaaggaacagagatgctatgacccatccttgagaatcaatgtgctcatgattgagtattagcaacatgtatgcacatatacatatatat

SEQ ID NO: 29134 - DNA, 994 bp, Bovine  19866880872158
  misc_feature (1)..(1): n is a, c, g, or t
ntttaggctcctagatactcatcaataaaaatcagagattacaacttctgtaggattgtttgtctgtaaatatcaggacatcaatctgaagaggtatgctgctgctgctgctaagtcgcttcagttgtgtctgactctgtgcgaccccatagacggcagcccaccaggcacctccatcccttagattctccaggcaagaacactggagtgagttaccatttccttctccatgaagaggtatactttgcccttaaagcgttttaaattttctctaaatgtttccttatacactaagtaaaaatgaccactactagtctcgaaactcacaactttctcaaaattataaatatagtaaaagccagaaaggtattcttgctatactattattctaaagtaaaaacaaagtcacaaatgaaaatatttttccttttcatctctcccaaaagtgttttgctcacttcccataattctaaggaatgtattctctctcctccatcttcaatagaaatgcctacatatcctgaatatctgtacttaccaaggcccacctgtggtctgactcagtaaaatgtgatcaatccgatgaacaaaatacttcaattaataatgggcaaagatttttaaaggaaaaaaaatcactttctaaattctacatttactatttgccttaatataagccttggtaagcagaaacagaaatattagattaagtgttattgaatttgccctgaagggcttttctcaaaaggcctttcagcctcaatcttaatgaacgtgtcactctgcaacagttacataaagtggctttattgatcgacacatactcaactgtgaagattaggataaagcaaagagcttcaatgtttttttaatgagataaaaatgatgtttgtataggaaaaggagcacactgttaggaaataaagttttacatttattacacatttagggttaaatggatttttggtggggtgtcagacatactaaatactca

SEQ ID NO: 29135 - DNA, 795 bp, Bovine  19866880909790
  misc_feature (1)..(1): n is a, c, g, or t
ncagtgttcttgcctggagaatccccatggacagaggagcctggtgggctccagcccatagggttgcgaagagttggacaggactgaagcgacttggtgtgcacacatgcatggtgcgtcgtagggtttcctaggtggcgctaatgtaaagaacccatctgccaatgcaggagacacaacagacatgggtttgatccctgggtcagggagatcccctggaagaagctatggcaacccactccagtattcttgcctggagaatcccatagacaggggagcctggtaggctacagtccatggggtcgcaaagagtaggacacgactgaagcgactgagcgtggagcatggcacagacaagggagagcatgctgaccattacctggtccaggtggagaaccgccctcccagctgtttacacagcctgtgtggggtcctgagaggggagtcaccacgtgaaggcgtctgggatgctgaaaggcaggtgagggagcgcgtcagttgtaagcagagctcagatgtccagcaatcttaggttggctgttgtctctcttatgggcaagcgtctcctttgaaagtgacgcctgtggggctggaggagagagctctcgtagactcgtgccaccgcgccctttgggccccacttaaagtcagagggggcagcaagagggcagctggggggagtgtgatgcaggcgtaaatgaatgccgaccttgttgggataaccggcgtgcttcagcctctgcagctgtggagtccctggggagttgtctggctacatgtgattttacatatctg

SEQ ID NO: 29136 - DNA, 1872 bp, Bovine  19866880919449
  misc_feature (1)..(1): n is a, c, g, or t
nccggcactcagaggcgcatcgctgcagagcatcgttgctgagagtggaagacggaagtaggaaactgggggttggcccagaaaagacaagaagaaacgcagcgcacaagcttaccggcttcggcggggagggaggaaacggcagataataatacactctagagataaattaataacactaagctacctcgccagggtgttacgagtgttaattaattaattattgtttgccaagcactttgaaggtggaaaggctctgtaattattatgaataaaatgtcagggataataatcgggcagaaggcagtgacctccccggcacctcatttgcatggcacgaaggattcagggatgctctgccaaggcgagacctgccgagacgacagatgcccgtcccgacgcccagcctcctcctcccgcgtctttctggcgccccccggggtccgcggcctctgttcccctggcagcggatgcccgagaagccgggtgaggtgaggtgtttacgagatggcaagcgggagcacgctgatggctgggggtgcggcctgaggaacgcccctcccacccaaaagctttccactgagccggctgttttgtttccgaggagatcactattaatatgcgtaggtttgggtctgtctcttccagagtgggatgggaggggcctgtttgaagtggggggcgaatgtgtgggagaacaagtcctcctgggaagatggggtgccaacttaggtttgggggaaatggccaccaacaggccaggtcactggctcatggagactgcaataaaccacaacctgccccccatgtatatgtggaaagggtcccgtggccctaaaggcaaagaggaaaattataatccagctgggcagagagtagcatcaccaactcaatggacatgctgctgctgctagagtttgagccaactctgggaggtgaaggacagggaagcctggtgtcctgcagtgcgtgggttcccaaagagtcactacttagggacgaaccagcaaccacaccaggcagagagtgagagcgtccagcagagacccgtgctgagctaggctgcatgacatgacgggtgtcagctcttcgaggttttggtcctggaagaaagatgtctgaggactgttgtcttcagcagatgctcccgcctccctcccgcctccttggttgacgaggcaaaagaactgcagaatatttaccagccctggcccatgtgttcgggaaacagtcctgccaatgaatgcctcttcctaccgaccagcggagaagagagaggaacacctccctaaggctcggcgagtttggcgagtttggggcgggggagggacaccaacgtggctactgggtctggacagaattttgcacattttataccagaaaaataaaagaataaacaacgaaaacctcctctatctcctagagacaagaggactccccttgtttgtctcctgtgttcctggtgggagaccctgactaagcgtccacagtgcagggatcttaggagccacgacttcgcttataaagtcagaagagcagacatttttattaggtctagggcttcccaggtggcgctagtggtaaggaactcgcctgcgattgcaggagatgcaggagacacaggtttgatccccaggtctagaagatcccctggaggaggaaatggtaaccactccagtattcttgcctggaaaatcccatggacagaggaggctggtaggtccatggggtccacggggtcacaaaagagttggacaccactgagtgactgagcacgcacaccagggcttggggaggtgcattcgttcctagggcgtcgcaaggcaccaccatctgagtggcttaaacagctcttccgttctccccgtctgt

SEQ ID NO: 29137 - DNA, 2005 bp, Bovine  19866880931138
  misc_feature (1)..(1): n is a, c, g, or t
nccaaattaagccacatccataagtcctgggggttcaaccgcttggcggggagtggggggtgggaaacccttcaactgacaacgggaggttttcctttttccaggaagggttttggcctgtgcccttagtggcctgattcccacctgggtgttgggaaattgaggcagggaccctctctcggtgtccttagggccagcatagaggtcctgtgttgcttaaacagagaggttgctgggaggcacaacctgccctgtaaccttttctttccatcctgaccttctcctggtgctgctaatacaacacaactggccatcagggtccgtgtggcaccgtagcccacgtgtagggatgaaaggctgggctttcatggactggaggacgggcctggtgtggagtcagcctgtgagctggggcctcggctctcatttcctcacctctcaggtgggaggtggcagtgtctacctcccagggctgaatgagatcaccggcagaacacgcctggtgtctgggggtgggtgttatcaatcattaggagcccaacgggaagtctaaccaaaaacttgtcccggagcaccgagtgccgatttgtgctgaaaagtttgctaagttcctctgactcctgttttcccggccacccccacgggggccaggaaccccgcaagtcaatggctttgaggctttgaactgggacttcaaagagaagccagctctgttcttcaaacaggtttataaagagattttgatacaagacaacaatacttgtcagcagtgtccagttaccgtccttccctttgtagttttattaggaaataatttcccagccggcgaggctcctgctggcatgccttgtttctctgtttgcgatcggatctgcccaccagaggggctgcccctcgagctgcagcggtcttgccagctggacgcccagagaaagacatcaccgaagggtctccggagccgatttaccatctgcccctcccctcgcctccccttctctgtagcaaaaatgcaatttgtttgacctctggggaggtttaaaacctcagctccttaattgcccccctccccccattattattattttttttaagaggggaggaaagagggggaaacggccagaaaagaaaagaaccatttaagccatccttgctagcctgccctgcattctcggctggcagtaagaattcccaatagatgaaaactaaggagctcagctcactgcgggtccctagttttcatctgttgggactaagtgggtccttttcgcaggggccagctttcccaagcagaagagaggcgtggttttccagaagtgactattgatttttccttccgtggtacagttatttccctataacttgaaacatgtgatggggagtctactctatgccaagcactgggctggttctgagatccagaaatggggaacacagggttcctccccagacatgtttctcagcaggggcgggggtgagccagttgagaagcagactcttcagggcccttccttaaagggctctgtgtgctcccgctccaggaggccccgccagagctgatggtgggagcttcaaaatggggccactgggatgcatttcctcaaggaaaggggacagatggagagagggagaatggagatgccctgggaggaatatgatcctgagatgggtgggacagagggaagtgggcctaaggggctcttatccccagagaaaaagacaccttccttcctttttatgaaattggggaggaaacgaggatgtcagtcatttagagggtgggagagaagagggtgtgggcaggttcagctttcttgaccttttattttgttgggaagtaggaattttttaggaagcaggaattaatggcatttactggggagaggggaagcagttggcttaatgggacttagaaagttaaaagcagatgtttcttagagaccattaagttccaggtcctcattttatccagtgtaaagccaatgcaggggactcaagagatgcgggt

SEQ ID NO: 29138 - DNA, 2500 bp, Bovine  19866880950972
  misc_feature (1)..(1): n is a, c, g, or t
ntggttctactttgcccttagacactccagtttcactcatatttcagagaggagatcaaaactgattctttgcgaggtcctaaaatgggaatgtgtatgctagtctaatcccttgcatagggaaatgacctgcttttccccaggtttcctatagttctgatggggctataatgaacacttcctgaaaagtagaaatctaagagcatgtgtgtaagtgtgcgtgtgtgtttgtgtgtgtatgggttgagtgttagaattttgtttctaggattaaatggctagatatcttttttacatgtgctaatttccacatttgctaaattctgagtgagtccataaactagtttgcctcagagttgattttcctcattgctatcaattctctgctctggaaggcttcacagataagaggttttgaaactaacacactaactagcaacaagaataatcttttatttggaaaatggaacaatgaggaagctatttgcatcacaaatgactccatcattaaaatattccacatctaacccatttgcagtggaaggtttttgcacggctttgttttgtgtgggggcatctcctaccatgtggtttggccatctgcatatagttatggagtcaccatctctgaggacagctgaagctggtgaaacctaggggaatcacaagaataactccactccatttacttggatatatttcacagggaatcctttgtatcaactgagtcactcccatccagatatccatgggaagttcacataacctcatttccctctgtgattgttactgagttaagcacaagacagaaatattcttagaagatatatggcttcctcttcatcagagctggcctagagtggagaaacagagcccctggggacaaagcaagacactcatgaactctggccaccgtaagacaaacaatggggaccttattcttaatttagtttctaagcaaaggttttcctggtggcctcgtttttctggagcaatcacaacactcccttgatggattagcaacttgccatcgtaccatgagttccctcttgcctcccattttctttcaggagatatggattttttttttcctaattacatatttcttccctaattctgcacaacagtgaaaataaatataacttctatcctcttaaaaacctggtaatcattcagctggaagaagggctactgtttggcatagataaaaatagtctccatggtgacctgcctagaaataatccaaacttgaatttatagtgaggatgacccaaggtctctcatgcttaggaaaccttcaagctgtgatggtgcctagccagatgcagctactgtattgccctggggcttaggagccctgagggatccacatggtttatctgggttgagagaccccacccaaagtgcacggtaccaactttccccatcaatgaaaccttcactgcctcacccctactgcctcatcttgtgaagtgaggaaagctgtctgataagagaagtggaaaagagggaagaaggaggagtgtgcaggatagaaaggaaggggaaggtggtttccatagagacctagccttcctggtgccctcatcctctgatggtctggaagagcagcctctgagagccactagtctgattccccagctgcctatagaagccctaggggcactgagacatcagttctttttccaccgaaaaagagctgttaaattgcccgtggagaacagtgtgtaagctttgcatatatcacaccatctttcaatggagccaatagagccagttttgttttcgtttttttcattattgaaatacatctctgatgaagtagttggctttaacggccatgttaagtgagagctgtggcttctggaactgttggcttttctgaaaatgtgtttgagtgcatataagttgaatgtgagtgtgatgtgtctccactatgatgcagaaaggggtgaaagtgaaaagcgttagtcgcccagttgtgtctgactctttgtgaccccacagactgtagcccaccaggctcctctgtccatggaattctccaggcaataatactggagcaagttgccattccctcctccaggggatcttcctgacccggggattgtagccgggtcttctgccttgcaggcagattctttaccacagaaaggtatgaggctattttaaatttgatatggtcctaagatgagccgataggcagaatgacatttctgtccttccccaggaaatgcctggtattcattctatgctaagttgtttgattccgaagatctactggtttactcatggctcctctgtagttttcttacccaaattccgtcccacgctacttatttgcccgggagaggtcaacatttgaggacctagtacatcaggtcaggctcgaatttctgttacaactctgatgtcttctgtgagcactttgtatcacagagaaagagtctggaggacaggacacagagagctcagagaggtttccacgacattactcaga

SEQ ID NO: 29139 - DNA, 1080 bp, Bovine  19866880968212
  misc_feature (1)..(1): n is a, c, g, or t
ntcctttgttagcagattttaacaatgttaattaggaggttagagtgatcattgttcatctagcaaacaattagggtgattcgcactgtagcttttgagaaacttctgagcaaaacagaggagtttccctttggcagggaggggagctgggaagggaaggagcagccgggatggggagaaggggcaaggctactcctaacatttttgggcctcggaccaaggcaaagcgtgaggaaatgtcagctgcgggtgttgcagctggtggagagcagtgcgggccttgaccttgtgggataacagtatttgcagatgcaaggtccattccccccatggttctcgtcttgataattcaggagactgtggttacagaaagcagagtccggagatctcttaatcatctggttgagtaagggcaaggatggagtgtaggacctgctatctcagaaagaaacatctggcacgtcaaatgtgtgaagctaaaggagtttgagaaaacggaagatgcaggaaggtcacactgacctctcctctggttgccctccctgagacaagtcaaaaagccctcctgtgagagctgccctccctggaccaggaggagaggagcatgcctggctccaaagacaaaggaatgccaagaaggatcggagtgcacaggcctggcgatacgtcccccggtttactcccctgacctcacacccttggccctaggtattccttcgtgactgccctcttcatcaaatctgggacagacacacccaaatctcactttcttcaggtcatctccattttgttatgaaactcctgtgacgtttacagtttacattaaatacatttgtatgtgtatctcctgttaatctttgtcaatttagtgttcagacccaatcaggcaccctaagaggctcaaggaaaactttttcctcctctgcagttaaggatacaacatcccctggaagaggaaatggcaccccactccagtattcttgctggggaaatctcacggacaggggagcctggtgggctacagtccacgggatcacaagagtcagatggactgagcacagcacagcacagcacagttaa

SEQ ID NO: 29140 - DNA, 2396 bp, Bovine  19866880986760
  misc_feature (1)..(1): n is a, c, g, or t
naccttggcaagacttttacttctcatcacccccaggatagcacatctcctttttcggcccaaggaaagaatatccatactcctgttcccaattttgttctctccaagtttatagagtttcacctcacctctatggattgcaaaaagataatgttttaaaattttcatgttctaaaactttatataaaaaggcacaaaatatttttaagaggataaaaagaaaagaaagagccttttccaggaagtattaactcacaaccaagaccaggtcaagtctgaagagaatctggtttcatagctacatatttaaagaattgttctcatttaaaaattattttccaaatattttaggaacccactgtgggagacttttaaattagtggaaaagaatggaactcatgcctcagtgaaatttttattaattgagaattactgttgagaatttggaagagcttgtgtgagatttcaaatggaagaaaattttgaaacattcacaagagttccattagaaagtttgaaaaggtttgaaaagatgtgttaaaaataattcagaaaaaaaaattaggggaaagggagagagaataattaggagagaaggaagctttttatgtggtgtggtgatgaaacaagctggtgattaacctggcaggtagagagaagacccgcagatggtaattggggttgtgagtgctcaggatggtaattctttcccttcttccattcttctgaggaaataaatgctttattgaagtggtttccatgaaaatctttacaatttcttggaagagctgttgattcaagaggcttttgtgactacagacagttttaaaataatttccggaggaaagaagtttttaaagaattaatgccagtttggttatttgtgtggaaataggtgtttagcatccccacagggcattctgtagctttaatggcagtgtcacgtcttggcccatcggagggctgagttgcatcatcacaaaataggaaccatctcccttccagattgaacatcacaatgtaattctagtaaggctacaaaagatataatactgtgtgtcagggcttaatagtaaggaggggggggaagcaaggaaagtcaagctcaatgtcctatacttaacatcctaaaggacttgtatttgaagagagacagacttattttgggctttccaggtggctcagacgatagagagtccacctgccaatagggaagacttgggttcgatccctgggttgggaagatccattggaggagggcgtggcaacccactgcactattcttgcctggagaatccatggatagaggagtctggcaggctacagtccatgggtcacataaagtcggacacgactgagcaactaacactttagacttgttttactaatagttcactggaaaatgcttcaagtctaacaactctgtgcttcagccgccttcatcaggagagaatcagcactcatgttaatgaagaacataaagtattttccatacaggaccttttagagtgaatatacagtatgtatagaatagaccaaacacatctgggaaagagtaacataaaccattaaaggactggatttatgtggtttcattagcattagatatgttaataaataattgtaatatcacaagatcattgaattaagtcgagtattttcactgaggagacagaaagtggattatcatgaatttgattacaaatgctacctgaattatgggcacttggcttacctttttaggagccttatcctaatgtcttttttaaaaaaatgtgtttatttatttttggctgtgctgggtcttggttgctgtggacggggcctgctctctagttgcggtgtgctggcttctcactaaagtggcttctcttgttgcagagcatgggttctagggcatccggcttcagttgttgccccaggctctggggcacagggcacaggggctttagttgttctatatcaggtgggatcttcccggatcagagatcgaatccgtgtcttcttcattggcaggcaaattctttaccactgagccaccagggagcccctaatttccctttataaaaaaaagcaactatgtggttattcagcttttcttttaatattaagtgcacactgtcagattcttttaggattaaaagccatgggtagatgcctctccttttcttcttttttaaacaattatagttgctgtagaatgttatataatcgatgcctttcttttttgtatcagacttccctctcttaattctttaaagaaaaagtgaaagtgagtcactcggtcatgtccaactttttgcgaccccatgaactgtagcccagtaggctcctctgtctgtggaatttttcaagcaagaatactggagtgggttgccatttcctactccataatt

SEQ ID NO: 29141 - DNA, 2654 bp, Bovine  19866880987146
  misc_feature (1)..(1): n is a, c, g, or t
ntgtgtgtgtgtgtgtgtgtgtgtgtgtaaaactaaacgggcatttgaaggcttaagtgtttgagtccatgaaagtgaacagacccatatggtctattgtagaataagtaattacagacttattaaaaatacatgttaattttactcactgacactccatgataatggcttcctcaggatctaatccattctgccgattatacttatctatttctagttcaggaacctctggtcctgaacaaacggctcgagcaagatgagagctgacccaatcctaccacagaagatgaaatcaccacttttcagagatgtcaataatttaagatgactttctctgttgccctttacatactcacttcaagccagaggcagataaaacagaaaagaggcttctactcccctcaccgcctcaatctgaagggaaaaaagtaccaaaatatgctaattttataggagacaagacagaaatttccttgagttgcctccttaaagaatatagtactcatttacttaacaactccagagtaaatcattgatacttgaacatgggttataaattgtatccccatctggtttggggaaaccagctttgacatttctcccagctgttaatgaccaagttacttatcaatacttctcaaattttaatatgcttatgaatcaccagggaatgttgtgaaatacagattctgatacagtaggtgtggatggggcctgagagcctgcatttctaacaaactccttggcgatgctgatgctactgatctggggaccattctctgaatagcaaggacttggctgactgataagatgctctggtgctggtccatgcagactcaagctggagaatagaccaagtatctctattagcagactatcagttgaatacagattataacccaggccttaattctgaatattaaactttattttcttagactttctttctttaaccactgaagtttccttagagctgataaatctgaccagaagaccctgcccttccatgggatgccattctaaagaataattacagaatacatttctctctcttataatctaggcctactcgttgttaatctgaggttaataaatctccaaagctctgttgcttatgagtctatataactcaaatcagtcatgtgtctttttaaacggaaatatatttattatttttgagaattatagatgacatatattccccataataaaaaatcaaacaaggaataatctaacatgtattctccccaatttaaattggtaccccagcaaaatatgacacatcatggacatctgaatagatgaagtatcaaatatgaaatcttggaatgccaagtatagtaatatgccattaaggtaattatagcaataggtaccaggtactgagagtctgctttgcagagcacccgactgtgtgccctggctgtatcatacacttcaagtttgtaatggccagcattcctggattcaaggaaagagacacaagctgattaattctgagcagaaaagtattgaaacagtgtcagaatggaaggctagaaaactgagctctgaaaatgagcaggaatcaaggaaggctgagcggtggggacacagcctggattttgtcacagggtcactctggccaggacctcgccattctcagactctgggcccctgatgcagcctccagaagggactttgctgctgtccccagaagagtgaaaggctcagttttcccgtggggccggaatcctgcctccccgatgggactcacaccatggattcccccagggttgtcatagaacaaaacagagtccacagcttttcattatcttgcttgatccttacaacttggtgaccaggttccccaaaatatggtaccttggcatactgaatactttaaggatttgggaagcagcacttgcaggaggggctttctgattctcccctgaagtaggttgtaaagccctcatgtgagaagtgccctctctaacctggagagaagcatccttgtttcctaagacaacggaacacagagagggacacctaggcttggccaagtctccacccgtccactagactcaccctgtaccctttgtcctaactctgtctgctcttcatcaagcttagcataaagcacccaggtttcagcagtttcttccagtcttcattttctggtgaaggcccctttgtggtgtaaaacttacattgaataaacgtgagttgttgatgttgctgctgctgctgctaagtcgcttcagtcgcgtccgactctgtgcgaccccatagacggcagcccatcaggctcccctgtccctgggattctccaggcaagaacactggagtgggttgccatttccttctccaatgcatgaaagtgaaaagtgaaaagtgaaaaggaagtggctcagtcgtgtccgactcttcacgaccccatggactacagcctaccaggctcctccatccatgggattttccaggcaagagtactggagtagggtgccatcgccttctctggttgttgatgttacagggatcctaaccaagaccctagaaagtcagagggaaaagatatccacccttccctacatggcagaagctgatagtattgttgccatttttgagaggaggatcctggatcctaagggtgaagctatttacccaagaagcaa

SEQ ID NO: 29142 - DNA, 1127 bp, Bovine  19866880995676
  misc_feature (1)..(1): n is a, c, g, or t
ntatgttgaaagggatgaagtggttctaggagtcaaaacagagaactgggaacatctgagaagaccgtgagcaagtccccagagctgattttggacatatgtgtgttatgtgaatattacacaagatctggcttttccaaaggacctgactttgcaaagctgatataatggtgcctcaatgtcactgtacttgagtttcgctgaaatgctctgaagtctgttccatgtgtaattggacatttactactgtctcattttggtcaagcagaaaaccacatgcaggtcagatgagtttagtttcttccaagcctggaacaccctccaccctccagtacgctcaagtatggtgattcggatgagtgccatgtggtgccctagcctcatttctcgatggctgggactactattctctcccggaatggttttgtttgcaatatatttactggtactgccaactcagggcattgcagaatataaatccggtgctgtactctcccaaaggctgagcagaatcttctttctgtgaacattttcaatagtttgcttccaaggtgaggaagtaggaagtacaagagggacaggcatcaaggcaaatttttttctttctacctttacttttgttaggagggaacatttctatcaaggaatacagtttcctttcattttacctgatccagagaaactatggaacttctgttaccgattctttatccataatttatgttcgtaacataggacctggtgatagaggttattgatgaaaacagaaacgggtggctttcttaaaggagggggcagaggctcttaagagagttgtgtcagagtcagaggagcatttctctgtctaaagcttccagtgggctttttctttccttttgcatctgagttattgccacacttactggctactgttcctgaaacggtgaaagaggaagatgcttaagcgtttctgtgatgtcacagtggatctagatattaaagtcttctcttcctcccatttgtatttgatcccatttcacattgtttagtgataagtaatttcaggtctcagtaacccactctagcatataatgccaaggctgttaaggaaataggagaaataattcctgtagtaattaccatagtgg

SEQ ID NO: 29143 - DNA, 764 bp, Bovine  19866881031303
  misc_feature (1)..(1): n is a, c, g, or t
nttcagaccacgtgttgttcaacagtctggaggaacctggaggggcaagagcgttcactgctgccttctgcaacatcccccagaattgggtagcgtcctcttctattaatatccagtatcccagagaggcgtggaacaccatcaattactctccttcagagtgctctctacctgaaaaagcacgatgttcttattgacactgcacttaaaaaaatgttctgaagtaaatctacagcacactctggctctttagatccggaaactggttaaccagtaaggatataaagacacagagagatgctttggcaaggttgcagaacaatttgtgccagagattagaacagaatcaatgctccgttgcagcatattggccaagggcctggataacctccaactattgactttgtcagtcccggggttattggccagtggtaggctctttagacctgggagctcctatcatcttgtctagtccaataaagcccagtttcagtctctcacaagtcaaaaagataaagataacgggttaccccaaaattcacctagcaaggaccctaaatcatatagagtgacagagacttgctagaacctcagaccttctggcagattttgtggaatatgtcctcaactttcctaaagagataagatagacctttgctctgctgtctttatgggtgccccttccatttctcttagcaaccttcttccctcccactccatcccatccatgctctaatattagctgcaaaagcgatgccaacact

SEQ ID NO: 29144 - DNA, 2507 bp, Bovine  19866881051343
  misc_feature (1)..(1): n is a, c, g, or t
ntggcacttagtcctgaagaacttcccactgactccaatcactgcaggctcataagaaatgatgggaggcggtgggtacaaagtaacaggaagctgaaacaggaggactgcaaaagcagtgtattttaaaatctaaaaaataatccaacagtcatgtagatgatttccctgggtcatttctgcttctgtgatcctttttcaaagtctgaggaaaaaatctggatgtcacaaaactttcattcatttgtttatccactcaactgacttttgctgaccttctattacaagcccagctctgtgtgaacagaggagacagggaaggagggagagacagggaagtcagtgatccccaccagagtgataagagccatgcaggatggtatgggggatggagggaaaaaatgaagctgaggcagcttcccaagactggctcatgacttctatggaaccctgacttggggtgattgaattctaggtaccttgatgaagctcaggataaaaaattaaattaaaacaagagctagagaggtggacaagatggagtggcaagcttttgttatccgtataaaggtttcaaatatagctcttctcgagatatgagcaatccttcttggcttccttaaagcacatcctggacgcaaggccaagaaactgtttccttccatcactgagacagaacatctcgtgtgacaacacatgcaccctccccccaacccaccttccacatgctgaaagtcagagctcagactcacactgcccgcccccgcgccggacactaacgacttgggaatcactaggagcagagcctggcatgtgcgggagccaccctaagagaaaccatcccagaagagaggtgctaactaggtgaagacatatgactctgagctccacttcctgattctaatggagggagagtctggcatggagccaggaagcagaaaaggcatgaaaggaagaactaatttggagctggcgcagtgagtgttttctggcttatttaaacacgtagatatagaattcaagcagggaggagggaatctgactaccagatggagatgctgagtgaggtagcatgtcaacaatgaaggcagcaatgcccaggcaggaaaggagacatttttgacagcagggaagctatagagggatcgatgcttggtggattgggtgggttccaattaacctcaggattttattttcacttaaatctcgaggaggcagaggatgaggttactggcttgaccccgtgttaaaggaaaaccacaactcagtcctttaaggatgactaaggaaacaagtcaagtagctaacaaacaggcagaagtaagaccttggaacatgaatgtactgagtgcctggtgtgaggcagagggagtgtgctggagtacagggaagcacagaggagcatgactgcatcctggccctcagggaacagccattctggttgctgtttaatgtcccaaacacagggaggtgcacagaaggcagagaaggtccgcaggtagccgtgatgtggcggaaagctcccagaaaaccagtcgtgcaacatctctcggcagtttgcttgcttggggacctgaagcgagtctctgaaattctccttttcccttctgtaaactagcggttccttcgaggtcacactgaagagtcacgaaggcagtgttacagggtaacagcgtgctggagggtggaggaagggcttggagccgtattctaccagccaaacccacatgtggtagctctcaggggatgtgactttccctggataaaaatgtggcaggacaggcaaaaccactgggagaacttagaggcaacagtcagagagagggcttccctggtggctcagtggtaaagaatccgcctgccagtgcagtgttggatccctgatccgggaagatcccacatccatggagcgactaagcccatgcaccacagctgttgagcctacgttctggagcccatgagccacaacgactgagcccacgggcacaactgtggaagcccacacaccctagagcctgtgctctgaaacaagagaagccacctcagtgagaagcctgctcaccacagctagagactagccccctctctgcaactagaaaaaagcccgcatggcaacaaagacccagcacagccaaaactaaataataaatgaatatgtgtgtatgtactcagttgcatctgactttttgtgaccctatggacacatggggaagacccaggggagcctggatcccaccaggctgctctgtccatgggcttcttcaggcaagaatactggagtaagttgccatttccttctccaggggatcttcctgacacccgcaatctcttgcacctcctgcaatggcagacagattttctttaccaccgagccacctgggaagcccaataaataaatgaaattgtttttttttttaaaagatgtttaaaaaaaaagagagagagagagtatgcatccacctccagcctagttctatagcgtctggaattcattgcttttccctcaa

SEQ ID NO: 29145 - DNA, 1110 bp, Bovine  19866881175973
  misc_feature (1)..(1): n is a, c, g, or t
ngtagcagcaggctatggagaaagatgggagagcagggactaaaccttaatatcctattaagtgacttaaaggcgtgtgtgcatgttcagttgtttcagtcatgttcgactctttgcaaccttgtggactgtagcccaccaggctcctctgtccatgggattcttcaggcaagaatactggagtgggttgccatgcccttctccaggggatcttccagatccagggatcgaacccacgcctcttacatctcctccattggcaggtggattctttaccactagcaccacctgggaagcctgatttaaagacagaggaccaataaaagccttcagaattagcgtatgatcaaattcgccatcaccgttcccctgccgttctcttattcactaaaccagcctcctagaacagacctccgacagctctgaggttcccctgtctctttacaataagggcagtcatctggtccaaggtcttccgagtttctgctgagcctgaactatctttctgttccctggcattttcgtcctccttgaattgttcaactgctctgtctgttccatcgctgtttcttgaaaggttcaaagtggagcacagcttcaaagaagactctgatatttgcagtcttacactggaattgtaaccttgacggcttcccttgggggaatgtctgtgtctgtgggcaacgtcagattgcaatgtgttcagaagaacgtggcagtgaatgcaggacacagaggaagagccacccacgcaaaaataaaggaaataaatttgaggtgagacagaaccactgaggaagaaaggctagcaggaagtgtcctgggaagcagtggtaaaaggtaaatgacagctgtggctggactagcaggaagggtcaaaggttgggtgactcagtttgaatgaaaactcacagtgacatacagatggagaggaattttcccacaggttgggataagcctccaggcccagtaattatacataagccactatttaatttagcaattgatgtgaaaagaataaatagtgatagtatttcagcttaattcaagtaaacataagataaatattttcagtaccctgtataaaaatacccaggacaataaaacaaa

SEQ ID NO: 29146 - DNA, 1703 bp, Bovine  19866881254245
  misc_feature (1)..(1): n is a, c, g, or t
nactgtgtgatgtttgcaggggggaggagagaatctaagaggattctttaaggttccatctctttttggaataagatcaggactgcattttatgattctctgtatcccaacttccactctacgtgaagcagtgttcctgttgaccataaccttgcgtcattaatgattacgtgatgaagtgcatgaatcaggctgaatcacattctcttgctggttgttgtctattcaatgttctcttcttttcttcagataccaactcatccagtgactgactcttatttttgtagctcagggttttatttagaaaatgttcctaaatctgttaaggtcattgccagacaacttgacaaaaaaacacagagattcagatgagcaaagcctcccgtgaagagtcatcctgttcttcagagactgcgcacatgtgggctcagccatgaccctgcaggatgtaccacactcagccctctgctgcggcaggaaggcagctgataacagcacctcgtggaaactctctgtgtcaggccacttggcagtcgcaccaagacacacgtggaagggcgtgtgtgcgtgctaaatcgcttcagtcgtgtccgactctttgcggccccatggactgtagcccaccaggctcctctgtccatggaatcctccaggcaagaatactggagtgggttgccatgccctcctccaggggaccttcccaacccagtgatcgaaccagtgtctccttggctcctgcactgcaggcagattctttactgctgagccatcagggaagtccccatggaacggcagttatgacttaaatcactgaagtcaggatggatcagcccgacaggagtagatgccaagtttacccacactaacctggctggttttctttccccgaacaatctttgttattaaactggtggagtctttccatcatctcctagttccatgattaaggacacaccatgttcaccatcaattctctctccccaggtatatttttaactggcctagttaacttgctcattggtcctccactgaaacgttttaaagcttctaaacctgatttacatcaacaggaaagccaatcactgttttcagagctccagggcagccctgagcctttgctgagtgactggggaccagcagggagcctggggtctggcggcattccttcctggtccctggagtggtgcccacaccagagggccccttaggaaaagacaccactgctctctctggctccacctgccactgtttgatctcctatagggagcatctcctgtaggaagcaccgtacaactcctctcctagtttcaataggcaatcagcacagggaaataaatgaccaaggaatgcggggaacagaggcagaggcagctcaagacaggagacacacacgtgtgtgcacacacaccccctccttggtttctgcttcaggtattaggtcgggggatgcaccgtgaggtccatgcgaagctcgggttcccgcctccgcggccccagctccagcgagcacgcctgtggagtggcctgcagagacatctggtggtagatttatcgctcctgcaagaatccctgcttcattcactcccagcaccgggctgagactaacagcttctctcaggccgagtctctgaacatcaatcccaatgtttgaaagttctgctgtgtttgaaaagttccttcctaaataatcaaggatctacaga

SEQ ID NO: 29147 - DNA, 770 bp, Bovine  19866881273867
  misc_feature (1)..(1): n is a, c, g, or t
nagtaccatgcatggcaggcaccagcatctgagctggagaggatccagggaagtgccaaccgtgggccaggggcaggggtgtgcactgtgcaaatgggtgtgccctggggctgcccccctcctgggtctaccctccatcccaggctaagatgatgagaagaggcaccagttcatgcctgaccgtccacaaagactccagccgccacagcacaacacgtcaggccccggggtccgtctagcagccctgagtggcggctgccctgtctctgggaagactcagtagcaaagcactagaaggctgagctgatccctgtctcttttttgctaacatgtaagtagaagtgaacatgttacttccagcatataggaaaaccaccgagtcaatatctggatgggaaacagaccacagacatatgcccagtggctctgttcacaccatgggcgccgatcacagagactgtgatagaaaacaaaggctaagtgacctaacttgacacgtggcaagaggtgtctgacttctcggcgcgccagtctcgcttaagaggacggtgccagacagtctaggaattcgtggcagacacactggcagaagccatacaccatcaggatgacgaggctggaggggaccaggctgacgaagacgacccccagtgtgaccttcttggagaccagtaagtagatgcccaagggcagggagctgaagtacagcaagcccagcaaccacaccagcacccggatggatgtctaaagaccaaggacgtgcagttcca

SEQ ID NO: 29148 - DNA, 691 bp, Bovine  19866881393516
  misc_feature (1)..(1): n is a, c, g, or t
nagtagcaaagtggtgggaactagaaaagcttctgtgaatttggcaagggttaggataaatgtttccagtccctctggcaaaggtgaggccggcagagggaaacacgtctattcatcatgctttagtgccacttgttcattaagggctatgctctgggggtaaagctgtgctttcctgtacctgagacaatgcctggacctcgtaaacataactgacaacataattttgccgcacaggttattgttgtgttgttccaatatgcttgaagtgatcatgaatcttcacggaatgctgaacgttttcccacgggaaatactttattttgcacacagagccacccggtcttgagagtcccctgctggggacactgtgctactccactgaacacgagggagcagatgtttcagaggatttcgtacagttgggaggaattttgctgactgccagccacatgctagacccttctgcatttttcaggtctgcacgcgttgtagacagcctctctgcaaggctgacatcactgactgccgtccaagggcagaaggtggagcacagggaagggaggggcttgcccgagcgtgccccactgtaagtgacggagctggggtgctgcacacccaggccgtccttgtccaaatgcaaacttctttccctacagcagtgacatggccctccaatgcttctttgagg

SEQ ID NO: 29149 - DNA, 2611 bp, Bovine  19866881465984
  misc_feature (1)..(1): n is a, c, g, or t
nggacaggtcccatgtatatattgttctctgagtacttcagtcgtgtccgactctgtgagaccccatagacggcagcccaccaggctcccccgtccctgggattctccaggcaagaacactggagtgggttgccatttccttctccagggagtcttcctgacccagggattgaaccctggtctcctgcactgcaggcagtttctttacccactgagctacccaggaagccctatttgctttgggatgatggcaacagtgttctacttaataattgcccaggttttagccatgtgactaagacagcctccgaagcaggatgcccacactcaaacaattccaggaaccagacagccagtgtaaaagagtgaagctgatggtgcatagagcagtagagatcagtgggagctgtcacagactagagactgtaaaggaattcaaatcagaaagcttgaaacacgacacgggccaaacaaaacacttctgtggctcagacctggttaaaatgtcaccagttagtggcctacaggctgatcggagctcagagctggaaaatcaggccaattacagatgtcctggatgggctctgctgtcttacatttgtctggctccctgaagagtcaaaaactattattatttcaaaaccagcatgagatatcaccccacccctgtcagaacggctatcatcaaaaagtccacagatgacaaacgtcgacgaagatgtggaggaaagtgaacccacgtgaatggttggtggaactgtaaattgacacccccacggtggaaaacagggtggaggtttcttttaaaaagtgaaaatagaactaccatctgacctagcaattccactcctatgtatataaacggaaaaaacaaaagtattagttcaaaaagatacacgcacccccgtgttcatagcagctttatttacagtcgccgagacacgaaagcaacttaagtgtccatcgacagctgaatgataaaaaaaaagatgtggtgcatatatacgatggaatactattcagctataaaaaagaacaagatgttgccatttggagcaacatgagcagacctggagggcattgtgcttagtgaaataagtcagaaagagaaagagaactactgtatgacatcatttatgtgtggaatctaaaaactacaacaaactagtggatataacataaaagaagccgactcacagatagagaacaagttagcggttaccagaggggaggggacaatatagggccggggagggggcagtaccaactatccgctgtaagtcaggctcaaggatgtattattgtaccataggttgaatatagtcagtattttatacaactctaaatggaaagtaacctttacaattgtatgaaagttaaacatttttttggaaactgttacatttgcctctgcccactgccccatgggtgattggaagaaccagcgttttcagtcacgcttctctgcctgtaaaaccagatgtagaggtgatcttgagatacttcttggcttgccagggaaatctgagtcataggtgtcccatttacttaacaagctgcaagaaacacctcaaaagagccatttcctattacagtgccctacatcgagcaggccctccttaaaaacttcctgatgctcgaacaagctagtttcataatacttgcttccacgtctttaatccaccgtgtggcttttattttaagcatgaaggttttcagtctattatgatgcaaagattacatgtacgggtagcgtgttggggaggatgtggaaagttggaacgctcatgcacggctggtggaaatgaaacatgaggcagtcactctgaaaaagagtgcagtgggtaaacatggagtaatcataggacccagaaatcccactcctgttcccaaaaggaatgaaagcgtatgtccatatgctgccgcctttacgtgccatcttgtcctgaccaatcacagtggtgtgtactaaggggagaattttttaaagaaagagtctgactcaatcttcacaactgtatttactgaaaaataaagtcaaatgtgaaattcactatgaggtttgttcagcagtatctttctgaaaatatggggaaatcttacttaaaagtatgtttgttttactataaaatttaaaatatacacttatgcccagaaggatctgaattgatgtttgctcttttaattaacacataatatatggttttccaatagcccacggaacttatgattaagccatacttttatgaacgatgagactaatgacaaggacgtgtccagacaatttcctgatggtccagtgttcaggactttgtgtttctgtgggaactgtgatcctgcatgccaagcactgtggcgaaaacaacaataagatttgttcacagatatcatagcagcattatttataagagtcaaaaggtggaaacagtcccgatgtccaccaatggaagaatgaataaggtagtgggggtggtatggtttagtcactaagtcgtgtctgacttttgcaactccgtggactaaagtagtatatccatacaatggaacatccatacagtggaagtccatccatacaatggaacagcattcaacagtaaaaagaaataaattc

SEQ ID NO: 29150 - DNA, 753 bp, Bovine  19866881767483
  misc_feature (1)..(1): n is a, c, g, or t
ntgcattctgccagtctcctctcagtacagtttacatccatctgctcctctcgcccttccatgtcacagagttaggtgttgttttgttccctggaggaagcccatattgttccattcctaccagagaagagacacatcaagagcaacaaggaaaaatatggagtgtaagcatgtgtttctaggtcatcaacatgcaaggaaatgtgcatgaaaatgagtgttaattttctgcatgattcagtgtttgcgagactatcgagtcatttcccataggcagcccgacagccatcacatggtaatgaatttctattacaaccatgtaagatggttgaaccagaaaactaatgatcaaagaaatgaacaaaatactaacaaaggtgataacaatactgatgttttaataattaactggcatttacaatgggggtcaattgggtattatagttacttgggggcagttaatacaggtctgattttctcattttaacatttgtggtttcacctgccttaatttttttaaaaacaaaaattctcaatgaaaatagacctagcctaatgatcaaaatagaaacaagttgtatggttaagtagtttgtgcttttatttacgtttttctccttaggtttcagaagtcttttaaaattactccggactgttctgcagaaattaaaataaagactctatctttttggaatttgtgttcagtattaaattatattcttcgttaccaatttcctcattcatacatatgta

SEQ ID NO: 29151 - DNA, 2544 bp, Bovine  19866880631118
  misc_feature (1)..(1): n is a, c, g, or t
ncagaccagaatactggagtgggtagccattcccttctccaggggatcttccccaacccagggattgaaccccaggtctcccacattgcaggcggattctttacccactgagccaccagggaaggccttgtgttctgtaaggtagtaacagtttttgctcttccccaaaatatgtaaacttgttttccatattctcaccaatagccatttctgatcttttaaactatttgctaagttgagtgaaaataaaccttatttattactattattttttaaagtcaaatagctttgtgaagtgaaagtcactcagttgtgtctgactctttgcagccccatagactatacagtccatggaattctccaggccagaatactggagtgggtagcctttcctttctccagggaatcttcccaacccagggatcgaacctaggtctcccgcattgcaggcaaattctttaccaactgagccatcaggaagcccaaatagctttgtactatatccttatcggttattttgctttttgaatggcctgttcaatcttctcccatttttctttgaggttatcttgtgaaagtgaaaagtgaaagtgaagtcgctcagtcatgtctgactctttgcgaccccatggactgtagcctaccgggctcctctgtccatgggatttttctaggcaagggtactggagtgggttgccatttccttttccggggatcttcccaacccagggatagaacctttctcttctgcattggcaggcagattctttatcactgagctaccagggaagcccacatatgtatatacacattacacagaccatgagtctctgagtcaagtatgagctcatcacccccaccagcacatacacaaattcacacactgcacacacacacacaaacacacatgactatgctactatgggaaaagcattgcaaatagcactgcttttatggttgttactcgggacattacacaaatctaaccccacccccaccactgggaacagaaggtatatctgctaatgccgagttttcatagctgaattctaaaatccatttatgaatgggtacttgttcataggctaagtgatccactgatggcccaaagcaataaacataaacttcccttgagaaaatacttgtggagagaacccagattctagttataacctcataaagcactgtattctctcatttcatagcttcacccacataccattttcagccagaatccacccccgggacctgggaatctccactggattccatgttcttggtgaagctgtgtcaaaaatgctttgccagtgggcccttcttcccttgaggctcatcaaatattgctagtagagagttttctggctttgaatatttcctttcctcaggtacccaggaataccgtgtaatttgtaaagataactggggtaatgaatgcgcactgtagtccgctcttcccagtagtaattggcgcacctttcatctcctggcaagcagagtggttgggattaggaccaaaaggcagctatcatctctctcatttcctgactcagacaaaaggcaaaaaaaggtgcctgtctgtgctgataggtgtctgatcaaagcagctgaaagctgtcagaagccagccagcctgagcagcctggctgctgctttctgcagccctgcctttgatcggccagccgtctaactgcggttctatttatgtaaaaaataataagcagggttgtaactgaacagaagaaaggatcattttctattttggttctggtttttgcagtctgataaagctaggaaatgtggaccaattctatccagagtgcatgtgtgttcaactcattcaataaaacaaaaaccacaatcaaaaactgtcaaatcttcatgagataaatttgcagccagcagtaagcaggatgctggtagaaagaaattattccccttggaaggttaaaaaaaccttgagtaaaattgctatagtattggcatctgtattttgtcattagcagcatcgactggctggctataggtttgtaaaatgggaaactggtcttggatttaaaagatttggggtcatacctcaggtcatcagtttctagccatgtgagctgatattcatttctaatcacatatgtgctccaggttcctcatctggtaaatgatacgtgggtacattcctgcatgccagttactgccagcatctagatgaaaacactggcttgtggttgttaaaagcaacaaaggacggctgttggccagaaagcagacagacaagtattaatatcacttaaccccgctctttttcaggttccactgccactgagtagaaccaagtgtctttcatctctgtaataaattttactgagtaagtgaataaatgaatttgagcaagaactaatgaaattctacttggagaaccagaatagcatagagatacatttcagaaaagctgtatttgtatccttattactatgataactagaggtctatctgcactcagccttacatacataagccggacacactgcctagcctatatacatgtcacta

SEQ ID NO: 29152 - DNA, 1818 bp, Bovine  19866880770135
  misc_feature (1)..(1): n is a, c, g, or t
nagaaaatgaaaaatgactctcggtagaaaccagttccatagtctacgagctattaaagtaactctgccttttattttccctaaatttctcttttatacatttacctacctagtatttatctacctagtattaataatctgaaatttatattatatttttctttaatcagtttactcaaaaattttccaatcaaaaccaaaccaactatttattaaaaatctaggggatgaagtacactttaatgacttttacctaaaagtattataggatagttcaaaatatgttaaaatcaaaagttctatgaattttgatttgtacagtgatactaaaggtaatgagtactttgtgcaagtgcttgtatatagatataaaactgcctttccaaaatactttttactcagacctgacaatgtttggctatttatatgatgtttacagagaaagtcttaacttacatattaatatagaattaggttgacacatatgaaacacattttaatgcatattctaatttcaaggaggatagaagaatcattattttctaggcaaacaaaagtacttttccaagatttcccattattttaaacaaggaaaaattctgtcaaacttaaggaatgtttctcaaagcatagacagacatggcagatgtcattcatgttcaaggaaggtgtgagtttaacaaactaccaaaatagcaccctgtttgagtatgttatgtgtataaaatgcatagacagtgataatagtgtctgaagaattttatcaacagtctgagttgaagcaaatgcttcacatattgttatctcaagaaaacagaagtaaacctttctgaaattaacttgccttcacatgcatggagcagtatgtgtattggagaatgaggaggacttgtcttcatcttgtctttctgtattagcggggtctgtgtacttggagacacagtcatgccagtcaaacgtgtctgtcgttcaagtcaccgtgaaagaattgctgttgctcactttgtactcagaaatcatccctgtggtgccagcttctgaaagaagcagactaggtttttggcttattccaaagagagcgattgttcaaagaaaaactttaatgcaaagcatttagggtaatgttatgtaaataagcagtaagactggagccctggctctttttctcttcatttccttagctctgtgattttcgccttgaaagtttttacttcaagtttcatatagcctcattatttttccttggcattttctttaaaacacacagcagctgcacaatattgataactctaagagggatagactatatactacattgctatggcttcaatctaaatggaccatatatagaaactctgaatttgcactatttgtgttgcaaaatcttcacctctattttatattttaaaaattcagggtctgaaatctctatacagtaagtctctcagagtgtctttattctaatgtaataatctccacatttagtgtattacaactgaattggatgataaaatttcagtctcagaaatgattaataagtagtcaaaatgggtctaaaaaaaatttcttccccaataatgtcattcttttttttaaagttcttgtgtctttcaaaataaatccaaactgtccattgagatcttattaagaaaaccatatcaagaaagggacagaattgccaagcataaaattatgggtgacatcacaaaagaaaaaggaaatgatataaatttccaaagtgaaatcaggaataagattcatttaatagaaacaacataaatgaataaggaagacctgaggaatatctgcaacaagtat

SEQ ID NO: 29153 - DNA, 2612 bp, Bovine  19866880781987
  misc_feature (1)..(1): n is a, c, g, or t
ntactgggaagtgggtagcccattttcctttctcccagaaggatcttccccaacccagggatcgaaccgaggtcttccgctttgcgggcagattccttaccagctgagacacaaagggaagcccaagaatactggagtgggtagccttttccttctccaggggatcttcccgacccagggaatcaaactggggtctcctgcattgcaggcggattttttttaccaactgagctatcagggaagctctctcttgtgggacatatactattaacagtagcttctgtgttttgtagcattatataattcaaaataatgtttttgtattttctattttcctgtgtttaatttataagagaagcagaacgacttttatttataaaaacacaaactccctcacgtgcttcctatgcagaacttttccatgttagcctgacccagctcatccagtctatataaagtttacttataaagtaaaattttcacagtattatagaattaaaactgtactttgatattgaaacagatcacggcactggaaggtgagttcatgttaatacataatagtgggtccttgggagcgaaaaatggttcccatagggtgtctttcaaaatattattaaaataaagcaatgctgcagagacatggttttcatcattgcagtggaggtttagtacatctaactgggatttgagtgagcttgaaacacttaacccatgtttctgggtgaaaggcagtgaagggcatggagttgggggcctactgcaggagttgggacagtatggagttggggtctctgagcaaaagctccccaaaaccacactgtcctgatgagccctccacctgccacaggtgtgtcatgaggggggcccagcaatgggacttcagtcccagcatcaggaagaccagccagagcagccaccccatgctgagttctctgcatatgaaagaatctccctgcatcttaaatgtgaacccaagtctttaagctccatatatcccaggaactaaggggccttggccacaccacacaccctcagagaaccaggccctcttgtctgtgtcgagtagggcctccttcctgccttgcagaccaccccctcttccctccattcttttatttcttatcctttgattgtattctggacccagagtctttaaagcacattcaaagccaaaaagaaccatctaccctggagcaaatcagaaccaagccacagctgaccagcatactttgctaaatgcaagccctcttgctcccccagaaccggggtgctgtgcttgattgacaggcaataggattaaaatcaggcagagccatctgacagctgcagtgtaacgctccaggagaagagaaaagccagtgttctgagagccgggcctgaggctggagctgcactccagccagttccgtgtctgcaggtctgtgggaggtagagggtttcccccgcccggccccgtcagtgatactgctccgtgcttcctctgcggggggctgctaaccgcagtgataactcagctcatctcatgcatccatgaaagcgtgacagattgtggaccactgagccgcatgcccgtcttttaaattcaatagtgatcttatttctgttatgatttcatccgcttaaagacgagccagggccacagaaaagaattccatcttctcaaaacagacttttcttggaaacgttccatttacttattagaaattgacatctacttagaatcagcatgtttaattgctttacataatctcagcctcccttttgagaaaacaaaaataatgccagaatcctccccctttactcaaggctcgtgtatgcatggttcctgtagtgtccattccaagtgaaatgggtcagacctgggtgaaagcactaataagatatttccatgcaggtaattgttatcttctctcccctccttttgagaattaagaaattatataaaggataatttcattttctgagtaagtgttttggcagtccagatgggcacacatgcactcttcacaaattaatatttgtttcaaatagtccaagcaacctactcccttctttattaattaaatcaattctcccgagaaatgctctccaagtttgaaaaacttagtgttgaccatggacagtaattcatttatgaacattctgtccaattaaaacagttgtataacatcaaggactttttttttttaatggattactggagtgaagtatccattagttgtgacatgtccacagcccctgtaaactgtggtgtgcaaatatagctctggcacacccttgctcccctggtgagtgtgggcttcatgtgtgaaaatgagaacccagtttgttcattccaaggccatgtgacatcaatctgacccagtgagagaggggctagcctacatctaacgtgaaataagtcagaaagaaaaaaaacaaatatcaattactgaacacatacatatgaaatctagaaagattgtatggagaaggcaatggcaacccactccagtactctcgcctggaaaatcccatggacaaaggagcctggtaggcttgtggtccatggggtctcgaagagtctgacatgactgagcgacttcactttcacttttcacttttatgca

SEQ ID NO: 29154 - DNA, 1672 bp, Bovine  19866881120282
  misc_feature (1)..(1): n is a, c, g, or t
naaatgttgcatactcactttttgtttttacaagcagagtccaggttaagtggctgcagtggcagtctgctaatcaattcctgacactttgaatcaattctcaggctaggtctctgatggcaggcaaaaacagtccatctttgtgtgaatgccagtttctatttctctcttaccctaaatagtgaggtcatttactcaaaaccaggaagggaactggggacgtgggtgtgtgtgtaggttgtgtggttgggggagggactggagttggctaaaattgcatagatgattgctctgactctatagacttcctttgtcagtggagatggctatctaaattgatcactggtttccatgacaaccaatctagataatttgagtcttccacagcagggattttaagggtcaaattatttttaaaattgcccagttttctcctctacagttatcgcctcagatattagttgttagaatgtagagattgcttctttatgaaaaaatattgaaactgcattcccacagaaatattaacatgtcaaatgttatgcacacacattcctcagggatttcttttctgtcccacatctacacagaattgaattttaaagtgattgctttggtgttgatactttttacaagggtagacaatgtttcttatttgtaaagagaataaagcagtcaaaacccatagaaatattgaaatggaagaatatctttctaataattttggcatttccttatacatctcatggccactttgtagattattattctcatacatgaggtgaaaccagcttacttctaactcatctcaactcctgtgaactgtgatttacttttctaaaaagtaaaataattccatctttgaattgaatgttcggtggtcgttagccttataatgctaaatattatcactatctccagacacttcattcaaaacataaggacatatattctataaaatgattttaaggaggctatttgaggaaaatatcgtagcttaaagatctgttttaccaggagctcaaaacgatttgagtcagcttcgtttaaaaatggttggtaagtttcaggggtcatctggaaactgtgggaagagcaggctgaccgtcactgcacgtgcacaactgaccttattatcttcaagaagaagccattccacatgaacatatttgttctgagcaaccagatgctgggcaaaagggacatgtggatttgaatgtgtaatgcagttatcttacaaatattctgactctaatttaaaaatatacagctttcaaactttaaaaaatatatagctgatatgctaggagaagagaatgaacatcatcagttaaaaagcaatgattgtcaggattggtgaaaatgctagatccaactataggttgtctataagagacctgttttgaatatacagacatagataggagaaaggaaagagaaaaagataaatcctgaaaaaactaattaaagtaaatttggagtagctaatgaagtttcagaaaaaatagacatcataacaagaaagatcacagagataaagaaatggtcagttctcaagaaaacactttagtccttagaatgtatgcacccaggaacagaggatcaaaatatgggggacaaaaactgagatctgcaagaaaaaaatgggcaaattccctaaggaaattggagt

SEQ ID NO: 29155 - DNA, 731 bp, Bovine  19866881164752
  misc_feature (1)..(1): n is a, c, g, or t
ncatctaggcatgaactcactttaatgtactgaatctaaaatttgtaagacttctttgttaaacagcaggctgcgtgtgtactcagtcgtgtccgactcttctgtgaccccatggactgtagcctgccaggctcctctgcccatgggattctccaggcaagaatactggagtgggttgccatgccctcttccagaggatcttcctgacccagggatcgaacccacgtctcttacatgccctgcattagcaggcagattctttaccactagcgccccctgaaaagcagaaacctctgattcaggtagaaataaaataaccccagctttctttgtgctgttgtaatatttcataataaaataaatttagcatttacgtagcactttaaaccttttcaagtgattttatatctgttttaatagctttatattagtttgctatacttttctactaaatcactggaaatatttgttgcttcctataaccactaaaactggaaagttcgctcaaatgattaatgatgttgttttatgtatttcctttgctatttatataatttctttaatccagtttacttctgatggcttttccattgctggatgagatgaaaatttgacaaaatttgctaaaacttttacaaatgccataagtcctattaggaattcattattcaaggtacaaaatagaatgcattttatagagcttttaacagtcgccgaggctgaggcaattg

SEQ ID NO: 29156 - DNA, 775 bp, Bovine  19866881264313
  misc_feature (1)..(1): n is a, c, g, or t
ncaaaaacaatacccagttgtggatgtgagtggtgacagaagcaaggtacgatgctgtaaagagtaatattgcattcattaatactccagtattcttgcctggagaatcccatgaacagaagagcctggtgggctacaatccatgaggctgcagagagtggtacatgactgaggtaggaaactacccaggcaggctcctcgttgtgctagttaagtatacaagtgtcagcagcagcagcagcacctgcagcaaagcccacatggagagagacaactgcgtacactggagttctgtaaagtgtcgctcagccttcttcaatgtgtgtggtcacccccaccttagagatgagagcactgaggctcaggaagggtgaggtaacacaggcaagcaaattcagctactaagggacttaaaaaaatcagctccttctccttggctctgcagccatgggactgtgcacataattacaaaatcttttcacttcctaaatgcagcaatgtgagagacttcaggcttaggcagatctaaatgtgctctgaaatgtccagaatggggagaagtgttgcatttccccagctattatggcaccaaatctccactgagcccacgagtgtgcggaatcttggcttggatgagcttgtcttacacattttacagaatacagagcatgcaagggctgtgtctttttaggagcttacattgttttggaatgcacacaacctaggtcattaactcctaacagctatttaaaaaagcacagctctcctcctaatt

SEQ ID NO: 29157 - DNA, 1275 bp, Bovine  19866881277130
  misc_feature (1)..(1): n is a, c, g, or t
nttgagtcagtttaaaaaaaaaaaagaaaaatcattttcccagcaagtatttgtgcttcttttcagatattaaaatatttatcttaaagtaacaggttatcaaatagttgtatgttgctgattacaaatgatgcctgtcttgatggactcagaagtaattcaaacacaacatattggaaattatattgcagataaaatacatctatttatctcaaatggcacagatattggctacggtgatgtttccaaagtcatgaaaatgagttaatagcaaagtgtgtgaagaatacagaagcctgacagctcttgaaggctagggccatgcaattttctctttgttttgcaacaaggaaatattgattatttgcaccctgggcttacctgcatccaatatctctgtttttgtgaactgtgatcatattttgtagtagagttcttaaatgggtatcatcagctaaattcaatttgactgtatataagaaatgaagcaacaaaatacagtaaaaaaaaaaaaaaaaagactcacaaagattgtctgaagactgaaataaggtctttccagtgtaaaaacatctggtttatgataattctttgtcaagtgaaaactgctatgtaacacaagtgtggttatagttcactgtaggactaaagtgaaaataaaaataagcaaaggacaggcaccatcttggagaattgctttgctcatcttcccttgctctcacaccatcagaggcaggtctgtgattccacctgcccaggactatgtgggccaagggcatctgcttgatccaagataggcagtctgtaaatgcttggagatcagtgtcctgagagcagtcatcattgacagatgagtaagggtggctggtggtcagtatggcggccacatcaatcctggggtaggagagctctcagagatggtccacactgtcctacaggctccggagcaggactgagtcctcccgcccacagccatgacctgctccattgacttcgttcccttcctagggtgaccttccaatttaagtgttattcttgaatccttgtatcagagtctacttctgaagggacccaacccaggacagaaaggttgagtatcgtactagaaaaatcaccaacctcagcataaaaaccaaactgtgactctcagctctgctatctctgatgaacaatgatgggatagtggtatctacattcagggtgggtactcaaggctcctggtggacacaggaccaactctgtgctggggaacttccttaagagaaatctacagta

SEQ ID NO: 29158 - DNA, 3600 bp, Bovine  19866880256798
  misc_feature (1)..(1): n is a, c, g, or t
ntattttttttttaatttatttttttattgaaggataattgctttacagaattttgttgttttctgtcaaacctcaaaatgaatcagccataggtatacatatatcccctcccttttgaacctccctccaatccccacccctctaggttgatatagagtccctgtctgagtttccgagttacgagttacgtggcaaattccctttggctatctattttacatatggtaatgtaagtttccatgttaccctttccatacagctcaccctctcctcccctctccccatgtccataaatctattctctatgtctgtttcttcaatgctgccctgtaaataaattcttcagagaattggtgtatttttttctccttgatcctaatgattccctctccctcggtttcacccgtgggtgggaggtcagtgtgaaatgagagccatagaaagaggtggagaatataatgctcaacgcttagggctggggccatgcaggcagctgggttactggcttcctgtaagcctctagggggagggagagagagacccttgagaacggaatatttcctgccatagcagcaaacaatggatgtcagcgattgcggcgctccaacgtgagccaaggtgggagctggtgagccctgaggaaactcgggatgtgaaaatacaggatactgtccccagatagctgaggtgtatatcaaaggcatgatttcagtgagcccagacttttgcatcttcccatatatagaaaagcgctaaattccttaacttgggatattcgttttttttttttttccttaattaacagtaatcttttgatgctcctgatacctgcccttggttgcaaaactccgctatatcctagctctgccccctcgcctcctcagagcagttctctcagggttacttgagatgctgcctcccaacgtgaagtcctaaaaattcacgtggaaaaaaacataactctcaacttttaggttgtgaatatgtttttaagatgacacccttaaaaaaatacattcagtgttgaaccaaatatctgaacaggttttatttcctgcagagaaactcctcctcatctcccatagttggctcaaggaggaaggtgggcatttgtggatgtcttaggaaggacttccctggtggctcagtgtctgcctacagtgcggaagaccagggttcaatccttggatcgggaagatctcctggagaaggaaatggcaactcactccagtattcttacctggaaagtcccatggatggaggagcctggtaggctacagtccatggggtcgcaaagagtcagatatgactgatcgacttcactttcttttctttaggaaagaaaggtatattagtatccagttgctgtgtgacaaattagcacaaacgtaatgattgaaaataacacaaattttgttatcttacaatcacagaaggcagaattccaaaatggatctcactactggctgaaatcaatgtgttggcagagttgtgttcctttgggaggctcctggagaatctcttgtttccttgcctctgtcagcttgacctttgttttaaagtcggttgattaatgcatctgctacctcaattcccctttaccaccagtgtaacataggaacagtttcctggaatgaggacatgggcctcctggggaagccattgttttgcctaccacagacatgaattggtaaagagcagtgctaatcccggatgctacagggtccgagtgagagtggcctctttcattctttttggttcctgggcagccttctgtgttgggggcaccctcctcgccctgatgtgggccaggtgccttccccaggagctctctttccctcaagaaggactctcactaccctgttgagcaccccatatttttgtgggtgcctaggcctagggatatctggaagtaaacctttcccaggctgaagaagagcttagatttagcccttaactttctggggggctgtggaggtggtgagaaggcagaggtcgggaggtccaaactgcaagtgaacccagttcattcattccacagagacaggttcatacgggcccattgaatgctgtgtgaagcttaactccctttgaaatgtcaacctctcaaaacaaggggccatgatttgcttaccaatggtttttcctcagctgaatttattatctgagagatgccctaaatggtttcccaggctctggacccctcttgcctctcaatcctcttttctagttctttccatatgaatcaaacccacaaaccgtgcattggaaggtagagccttaaccaccagacttccaggaaagtcctccactagctttagagggtgcttttgacaaaatggtcaaactttctccacagaactcttgtccgtaggtggaaacccagatatctttatacagcgaaattaaaatttgggagttccttttaacctaaagaaaaaatgtagcatgtcctattacagtggggaagaatatttccttttttctttggagaagaaatgaaacagtctggtggcatagtggatacaaatctgcctaccgatgcaggggactcaggttcgatcccgggtcaggaaagattccacatgcggtggagcaattaaacccatgtgccacaacaattgagcccgcgctccagagtctgtgcttcactgcaagagaagccactgcaatgagaaatccttgcatctcaactaagagcagcccccatttagtgcaaatagagaaagcccgtgtgcatcaacaaagacccagtgtaacaaaaaaaaaaaagaaacagggtgattgtgtgagacagtaccacagactcttgacctgatcctaaggaactttgcgtattgaatttgaatcttcagtcaatttgctggtgtgggctgtgtccatggtgtggttgttgggccaaagatgtgccgatgccctttgcatccttaactttttccccactatcccagggacaaaactgataagtgaaaggttctttaacagttctgcagttttgctgctgctaaatctcaaacagggccatttttaagtcagatgttcagttctgttgcacagcagccctgtccaatagaaatataatgggagccatatatgtaatttaaaattttctagtagccccattaaaaagtaaaaagaaacaggtgaattaattttaataatatattttattcaacccaacatatccaaaatgttgtcatgttgatatgtaatctgtacgaaaaacattaacaagatattttactttctttttttgtgctcagccttcaaaatccagtgtatcttttacactttgagaacttttcatttcaaatgcagagtttttcttggcaacacctgatctgtgtttagagttcacaaaattgagtgttgaaaaagtagattcacataccccaatccttccaaatgtagctagaagttttctgataactgactcaaggatccatttaaaattttgaattaattaaaataaaatgaaaagtccagctcctcgatcacagcagccatgattcaagagcttcctggctggactggatggcacaaatctgagacatcactctacaggtaccaaagccaacatgtgatttggagctggaagg

SEQ ID NO: 29159 - DNA, 1601 bp, Bovine  19866880349412
  misc_feature (1)..(1): n is a, c, g, or t
nctgatataattttatttttctgcatttaatgtcaagttaaattctcatgttgaaagcatacatattatcaagaaacttgattcaagctgaagttcaaagtaatattcaaaccttctgttatctccactgtcatattcaatccatcttctatgatgtcaattccagtttcaaaacccattttaaaagtgaaaatctgattaggttaaaaacaacacagagtaaatgaagaagaagctacaaacaccatacttcccagatttattctgccaagtctgatctagtatccccaaaatggagaacagtctatggtgtcttaattgcctgttttgggcaagaagaccaggctcatgatgcagcatcagaaagatgacagactcctaaagtaagactattccactatataatttaaccaaggatcttctgtgacaggcagaggaacgaggaataagggtcatttacaaaaaagcagacgttagagtcagactctctaggggtggttccctcctacttgtccaccaggctcagtaactctgggtgagctatttttcaccaacgtcttagtttcttctcggtgttaaatgggaatgataaaactacctgtacttcacatagctgctgtgagattaaactggtgcttagtaaacattagctatcattactttgaaaattaagcattcatttttataaaaattcatgtaaaaatgaatttttttatttttcatattaaaaaaccttattcaaatatttaatgagcagctattataagccagtcactgtttctggtagttgggatagctcagtgaacaaaacagacgtctctgcctctatcaagtttacattctagtgatgggaaataaaataacaaaccaatcacaataaataaattacttataacaggtgctggcagctttttctgtaaagggccagatattttaagttttgtggggcataccgtctgtagcaactatttaattagttgttgtagcacgtaagtagtcacatgaatccatgggcatattccaataaaattttattaatatttatgggaactaaaattttaatttcatataatttttgcatgtcataaaatattattcttatttttcccaaagacttaaaaatgtaaaaaccattcttagctccttagccacacaaaaataactgactggatagagatggttaacccaaggttgtaaattttatcctaagaaatgttacacaaaaattacaacaaaattcactagtggctaatctcagcaaatactatcacgtgtcactattaaaaattagtcagtagagatattgataagaggtataacaaatgaaaacattagtgataactataaaattttttaaaaaacaaaaaggatagcagaaaactaaataatgccctcacgtgagttatggaaaataacatcttaatagactcgcaggaagttttacatatgttctcactggactattagaaaatctttcatatttagtaacaagctcaggtaaagatcaggtcatgctacagactgagaacccaaatcagaggaaaggactctctgcagtacagagtcagcccccgcagagcggttacagatgctgactgcag

SEQ ID NO: 29160 - DNA, 2733 bp, Bovine  19866880403494
  misc_feature (1)..(1): n is a, c, g, or t
nttttgatgataaacaggaagaaatactcaaatttggaatatatttggaggtaatggtatcgagtgctgaagagttgatgcttttgaacagtggtgttggagaagactcttgagagtcccgtggactgcaaggggatcaaatcggtcaatcctaaaggaattcagtcctgaatattcattggaagaactgatgctgaagctgaagctccagcactttggtcacctgatgtgaagaactgactcattggaaaagaccctgatgctgagaaagatggaaggcaggagaaggggttgactgaggatgaggtggttggatggcgtcactgactcaatggacaagagtctgagcaagttctggaagttggtgatggacagggaagcctggagtgctgcagtctatagggccacaaggagttggacacaaccgagtgactgaactgaactgaatgtcagaacctgctgattaattaaatatggaatatgaaagacagcaataaaggatgatttaaggtcactggtctcaacaattgtgtaaatgattctgtctttgactaagataagggcttgtagaacagcaaacttgaagagtgtgtcagtgtgtgtgcatgtgtgtgtgtgaaagggagagagaggacaaagattagcagtagtaatctcttggggccaagttggatttgaattacctataattatgcagagttttgggagcgtcgaaccagtgatgctgtaagatcaggagagtatttgagatcatccagtagttgggaagaggtgatggtcacagacagagttctaggttgggagcagcaggacgtttcagcaaagaaaaaggagcagtcagtgaggtagatggaagaccagacaagagtaacatcacaagaatctagacaataacgcatttcgatttcctgctactgagaggttcagtatgaggacagaagggttaccagtggttctagtctaatacaggccataggtaaccttgataagagtcactttggttgggtcgcggtaatggaagcccaagtggggtgacttgaagagttaatgggagattatgggaaaattgcaggggaaaggtcctgagaagctgagagcagatggattcagagaacagagaatgatttgttgtgcttggagagcaaataacatactttctccatatcccaatggcaagaggctgaacaaggtcatctgctgagagagagggcattttagatgtttgagaggattagagaagatgcaaaatagttatcttgaggacttggaaagtgaattgtctggacaagtgagtagcatgcttggcggcgtggagatgcgtgattacaaatctaaagcagatccaatcagcatgactatgatgtgatttttcctgcagaggtggttggctgggtattgactcacagtaagcagatacctaggtttattgaagttcaggactctccaggctggtgtgatgtagacagaaaaatgggcagaagagacaaacatgtgcaagagagtggttacggtgctgatcaaagaagctgaactggacaagaaagaggatgagaatgtgtgcgtgtgtgcggggttgtgggggacagagaatgatgatggtgtgagagagagagagagagacggactggattgagcatctcaatgagatcagatggctggagcctctgatgctgcttcatcagctgctctagatgaagggaagatgtagccaaagggtggagctcactttccagaagcctctccctcaccccactctcaggccaggactctctgagcagcatcttgagccgcaaacactgagggctgcttgcttgcctttgattggctggagtgggggagacaccgagaggacacaggtgagccaggagagaggggatgagatacctgagggctgtggaggctcagctgcgaggtttgaatcttaaaggtgatggagttctgtgtctatgagtgaagagacatggctggaggctggcgaatcccccaggacggcccctggggcaggagccctgtccttcgctcatgacccctggcagtctgccacggcgccttcttttctggcctcatggaaaggccgtcttgacagttgggaaaggagacaatgtctcccttgggctgaggtaattattggtgataatgcggccccagggactgaagctgcatgtgatctagccacaaacatctctcgggtcaaggatcctgaattggtgctgcctaccagccgcagaaccattttgtctccttgactttgcctctgtctccctgggcgcaggcatcgggcgacagccgccgagctcccctagccacggggtccaggtctgtagattcaaggctggacctgggcctcgtcatggagtctgctccacaggcagcttccctggcatgagcagctctcctgctcctggagatggtctcagagcccagtctgtccaatcccagagctgctttctggcggccaagatatcatctgcatacactccgtcagcactgagcacccttctcaccctcccctgtactcacaccacacgaagcctcaggtcacccaccacactaacagaccgcactcaatatacccaggtggcacttatggtaaagaacttgcctgcccaatgcaggaaatgtaagtgatgcggctttgatccctgggttggaaagatcccctggaagaagaaatggcaacccacttcagtattcttgcctggagaatccccacagacagagaagcctggtggg

SEQ ID NO: 29161 - DNA, 929 bp, Bovine  19866880403495
  misc_feature (1)..(1): n is a, c, g, or t
ntctgtccaatcccagagctgctttctggcggccaagatatcatctgcgtacactccgtctcagcactgagcacccttctcactctcccctgtactcacaccacacgaagcctcaggtcacccaccacactaacagatctcactcaatatacccaggtggcacttatggtaaagaacttgcctgcccaatgcaggaaatgtaagtgatgcgggtttgatccctgggttggaaagatcccctggaagaagaaatggcaacccacttcagtattcttgcctggagaatccccacagacagagaagcctggtgggctatagtccatagggctgcaaagagtgggatggacatgactgagcacgaacacacacacactgcacaatccttcatctcagaagtcacagtgtacacacagacctcacctggagtctcagatgtgcctggaccatgctatcctcatcctctatcctccatactctctacaccatacataggctcccacccgcctgtgaagtcttatgcctcagtttcttccactgcacccgacaaacatcccacccataggtcctcacaggacaacacacacggcccctttggagcatcaacagccagggactgtgtcattaagctgctgacaggtggtccctaccagcagctaccctccccccacccagttctgcatgcccagccttctgccagagccagacagtaaagcctgcctcctggcaggcctggccaaaattgtcaggaggttgatgatgtgtctgaaaaggggggaaaaaaaaagacatgatttggaaaatatttccaggatttgaaaacaaacgtatgatatttgatctgttcgtgatccatttgtaacactcatgttgctaaatactgcctgatggagaaaacatttggctaggttgcaagttttatttaaaggttg

SEQ ID NO: 29162 - DNA, 1213 bp, Bovine  19866880477669
  misc_feature (1)..(1): n is a, c, g, or t
ngccagtagcagaggctgttgggattccgaagcaggaaatggggcaagaagatggaggagctgtcacagcccagggccgagtgaggacaccagagtgccagcgtgtagcacactcgctgctgccctggggccaaggaagtacatcctgtgtgggcagtcctgccagccacagcaagccacctggattcatgcccagttagggacatgggtctggatcaccccagctgtcctggccacccaagtcaagtaaatgagatttgggtaatttaaaatcagatttggatgcctactaaaccaagattctctctcaggggatagaactggggctggaggcaagagaccaaatgaggctttgtgcctcctctgcaatgtcccatcttattttttattttctcaagaaaaatgtattcatgggtaagaatgtattcatacccaactacttgggtagtaataaaaagaaacttaaaaaaaaaaaagatcggaccttaaaaacttactataaaaatatcaattgtctaagaagagactccagtgttccttttcagagctggaggtgggcactgcctggttgagaaagtgctcctgacttgccgaatggtttggcatcagctctggtccttgggctttagtttccccatctgtaccaaggggaggtgaacccaatagtctctgagagtcttcggccctgacatcaggtaacgagatgcttcactgtctatttgggttattcggggccttctctgtgctgtgaggattcccttcagaagcagaggcttgggccttggtttgggagtgggtgccgcccacccaggtctgtgggtgacagcagagcagccctgggctctgtgggcagaccagctgagctgccctcctgggggcagggggagctctgccaggcccctgaaagccctcagagttcccaggcctcgggacagtcaggccaaatgctggcattgcagtggggttgattgtgtctctctctgggtttgggattgaacagccgtgacctatgtgtgtcattaagacagagatggtttggttaggtacattggcccagtgaccctgccccccagcaccgatcactatggcaacagttcaatagggtcccaagggcccaagaatccggcttctactgagagtgaggttggctgaggtcagacaaagagggattaatagagccctgttctcattaagccacaaagcaccattatta

SEQ ID NO: 29163 - DNA, 970 bp, Bovine  19866880554250
  misc_feature (1)..(1): n is a, c, g, or t
naatagcatattagtcgagtaattttttaaaaaacttctatttctgatccaacttgttctagatctgctatgttttcatcttttgattaaaaaaaattttgtattttgacacaatcttaggctcataggaagttgtaaaaatagcacgtaaaaccgctttacccagcttcccacgtggtgacgtcttatgtaatggtagtgtaatatcaaaatcaggaaactgacattggtaatgatgcggtgaactagactacaactcaattccttattcagttttcactagtttttacgtgtagttttgtgtaactttatcaccataaaggaacttgcctaatgctacttcttcatttttatactcactctccacccccatccttgtcccctggcaatcactaatctgtttccatctctatagttttatcactctgagaatgtcttatgaagagaatcatatagcatgtcaccttttgagaatggctttttcttttctttttaaagatccatccaggttgtaacagtgccataccatttaccccttctttattttggcatatgctggtcctcatgctaaacgttcatcttttacgactaagctcaagtgtttgcctctcctcccattttggtctaagtttaggctcctccctctgtgttctcgtagctctcatgtttacctctactctgatcacactgtactgttgttaggcgctgggtccagtgttccccactagacttttgagtaatccctgagggcaaagattacatccgagtatctccagtgcttcaatgtctgtcacagagtaggtgctcagtaagtaaatagtggttaagttaataaatatatagctgaagtattcttcttagtgaattgcataccaccttataccagatcagtcattcaataaatgtttaataaagagtaacattgatttattttagggcacaagggatccgatttgtgccataactgcat

SEQ ID NO: 29164 - DNA, 872 bp, Bovine  19866880632546
  misc_feature (1)..(1): n is a, c, g, or t
ncaagccccacccaagctgccaaatccagctccattgctgcctcctctttcatcttttccaacccctgagcccaaagggcttctcccctctaccctgccctgtccactccctccacaactaccctgtattattatcctgtaatctgggtccatgtcttgcctctttcatagtctatgagctccgtgagctggggcatgtctgatgcttctctgggaccccagggcccagacccaacttgcagcagaggccgccacacctggctgagtgactctcactgctggtcctgaacttgggcagcaccttcacaacccagctgggcactgtgctgcctctccaagttaatttcttttcctgtgtgtggtctctccattcattcattcattcattcatcctgctttgtgccagatgctatggtccccatcccctcttcttgattccttgcactactagagaactcatccccaacccctgggcagcccagcagactatcttgcccataaacagtacttggcaaatattgattaacaatcagttgattaatggatgaacaagatattccatatagtggaatattactcagcaacaaaaagaaccaaagtgctaacacatgctacaacatgaataaaccttggaaacagtatgctaagttacagaggccagacacaaaaggtcataaatcatatgatatcatttatatgaaatgtccagaacaggcaaatttatatgaaatgtccagaacaggcaaatttgtagaaacagaaaatagattcgtggttgccagaagctgagggaggaggaaactgggactaactgctaataggtatggggtttctttgagggaggttagaaatgctctgaaattggagagtgg

SEQ ID NO: 29165 - DNA, 1297 bp, Bovine  19866880713032
  misc_feature (1)..(1): n is a, c, g, or t
naatgtaaaacatttcaaggcaaatttcaaataaaaacttttcctgcaatgagaaatcattaatatactattaagactaaagaaaataggctttgagtacaatgttaaggtggcttgttgtttagtcgctcagtggtgtcagaatctttgtgaccccatgatctgtagtccaccaggttcctctgtttgtaggattttccaagcaagaatactggaacgggctgccatttcttttctccagggtatcttcccaacccaggagttgaaccatttcctgcactgcaggtggattctttactgctgagccaccagggatttaaggtatgacactttaaaatttagtgatttcatcattatactacactatttagatatttagatataaaaatctacataaaaatgacatctactaattacaattggccctacccttcaagaaggccgtccaattcggattttctgttatctttcggagtatgtttggtgaagatttctagagcaagatcttcatattgctgcttctgttccgaactgagggtctctaaagattcgagtttaataaaagcttttgaacaagtaccaaaagctctactggcacacgcacagagtgctaacagagagtagatctcaactgcagggatgatgtcttcatagtctctcaggtgaagagctaggaaagagaaggcaatttggattgtgtaaagcaataacgccatcgtgaacatgcatggggaagaatgttaggctggctcagtttaacccacatgaatgttagcaaagttaatgaaaacaatggtaggtgatcagagaactagtaggggaagtagaccacatgaccaccacgttctgtaacacgagccaacagctcagggcctataaaaattaccaccaccaaatgacgcacatggctgcaccacttagaaatatacgaaaaattattggtgtcaaaatacactgcagatataaatataaatatatatattataattgtataattttatatgttttatatttataaaacataaaacatttatatgttccatataaatatgttagaaatttctgtggattctcaaaacaatatcatgtttctttttgtttaaaaaaaaaaagtgaagtatgaaatcatatgttttctctttgtgtttctttgaacagattatcgcttctcagtctgtcttattgaaaaaatagaactttgagaaaaaaggaagtgaaactgagtctctaagttatcagctcagatcatttattttgattaccatatcctatcttcacaggctacagggcatggcca

SEQ ID NO: 29166 - DNA, 1879 bp, Bovine  19866880713849
  misc_feature (1)..(1): n is a, c, g, or t
ntagcatttttaaactcttgcttggcaacaagtcagtattgatttgcagaagtaaatgagctgatggtcatgcaatgatcattcaacatatcggattaacaccccacagtcaatgtcagaaagtcaaggtaaagtgtagaactcagggtcagggagttcaggtataagggggtctttattattccactcagttattaaccacacagttgtaagctctccccttcacactcagaatgcaaaaattaattaataagataatatgaaaaatttattgaataattctgctagttcaatttcatttgcttaattattttttcaggagaaaagacaaagtatttgcctcttcactgacttctctctgtcagcgtgaaattcttgggattgaaacttgcatgatgcttctccttccctacccaatgcacccacccctacagacaaagggagaccagaagtccgcggactcttagtccactcctccaaactccccatctctagaagtactggaaaatccagatcccccattctcctccagtaccacaaacctggagtcatagaataagcatcctctattagagaagaaaaaaatacattcctagtggcagtcagcaggaggcaggggctcttccagcttaatgacttgcaaatcaaaagcataaaaaccagaatgcaccttttgaacctctttcccattctgcctagagtgtcctcataattttctcccatagcgttcctgttatttttgctaccagaggtaataaccttccttgtgcatttttaaaatgttggaggaggagctgtccagtgatctcaaagcatgtgtttttgattctcataagattatggataccaaaggaataaaaatggaaatcactactgccaagatatgaaagagagtttgcatagtaaaataatttaaacctaacatttggacccaataaggcaaatggaacgttttttccatatttttggaaaatgtgcattttcttcacattaagtggtaccaataaaaaataatgattctcactcagtttatttctataaattagattggcttatagttttccaggacatggttttgtatcaagctatatggcaaacacctgggcataaaacccactcagctctttgcttccatgtgggtgaaacaggtcaccattcctctcttctaaatctagagcaaagagcaactgaagccagttaatatattgagttccatctatctgccaagaatgggtatgacatcaacaacttgcggatgtttgtgaagttcctcccagaggctgggcgaccatcttctgattagaaatcggatgattcagcaatacatgctggtaaagacatttgactcatcctggaatcagataaagaaagagagaagatcaaataataaagaagcgttcaaaattacttttatgtggaattcatgcatgaatatgctaatctagggagaaatctaccaatgagaccattgcctggaaatggtgagtggtgggtggatgcaaatgaggacatgggaaatggagaagaggtacggacaagcaggaaaaacaagagaaaagagagaaaaaacagaggggagggaagagattaaatgttgcatctagaactcatgttgtgtgttattgtttttttttttttcaaagttaagttagcagacgatccagttccaaagtagctggaagcccagctcatccggaatggtggcctgaacagcaggccagaaccagaaccagaaatgtcaaaaccagaaatgatggttcaaagctagtgatgctttaagtcccaccactgtacataagctccagccgccgaggaccccctcactcagcaatctgatgtgacagattccttccttccccatttcccaggcctgttggaa

SEQ ID NO: 29167 - DNA, 1487 bp, Bovine  19866880744253
  misc_feature (1)..(1): n is a, c, g, or t
ntgaccatcactggccatccagtaggaccacgggccacctccaaccaggcccacacaactaggctaaaaacaaaggtgtccttcacttatccccctgccatggctccgaaggtcccctgttctctccttgccccatcccactggactggctgtggccatgtcacctctcctggtcactcagtgatgaaaaggaatatgtctgtcttccacattgacggcaccaagttctatcccaccatccagctgagaaagctcagagtcttttcttcttctcctcttcatcctcaggtcccgtgattctgtttgtgtctcttccatcccaacaacactatcttcctggaccagcttctcccttgccttcaaagagacaagagcccacaggcagtcatctctccagccacctcctcaatctatcctcatgaataaacttttcaaactgaagttctgacttaagggatccatgaactagcagataagacgtggttgggaagggtgtatttgtacaaacgactccactactttcatcggaatctcaaacaatttatgctccaacaaaagtggacagacactgtctaccatgctgccagaatgatttttctgcatcatcactctgtgttctgatcaagatgaccttgtgtgcaggaaccgtgtctgaaccatctctgtttccccatcattttctttggcgtctggcacagaggaggaagttccacgcatgttgaactgaattactagctacggcccagtatgatttcaacagcatgtgagcgatgccttgaagaactctccctcttgggcaagaaacccagaggaaactcttggctccttcctagcaagataacagccttgaactctgaaagaaacattccatatgcatcaatttttcaaatgaaagtgagcctagcataggtgcctccagcctgtagaagggacttggggacaaggcgccagctgcagcaggtgattcgccctcaggcgtgactgtgcaccttgtcacagccaagccacctgccccattgaaccgacaacagaaacaagtcctccccacttgactacaggagccagatcccccaattcccaccagccccaaagctttctgccaatcattactccagtcctgggctcccctacagatgccaagctgtatgcgtcttgttcagagatgtttatagctcaagttccagagacaacttggagggctctcaggctgtaatctacttaagacaaaaatccatgacgtctccttggaatccaggaagttcccagggggcattgcaatctgaactttgggatatttgattttcctgcatgttgtgtgcccaggtgagaaatctacaaggtaagccagaagatggccggacccacaaaaatgtaaaacatctatttgcaaaggcaagaaacaggggatcgtggagtcccattcctcgcatgggttccggcagcacaagccaagtgcagaagagatctacagaggaaccagtgtttgc

SEQ ID NO: 29168 - DNA, 1325 bp, Bovine  19866880758814
  misc_feature (1)..(1): n is a, c, g, or t
ntgcttttgtttttacaatttgaattgtttctaatagctttttaaaaatttattttttattttcatagctgcactgggtcatcgttgctgcatccaggctttctctagttgcagaaagtgggggctactctctagctgtggtatgcaggcttctcactgcagcggcttctttcgttggcagagcgcaggcactggggcttgtaggcttcagtagttgctgcatgtgggctcagtagttgtggctcatggcttccagaatgcaggctcagtacacaggcttagttgctccacagcatgcgggatcttcctggaccagggattgaactggtgtcccctgcatttcaggacaaagtcttaaccactggaccagcagggaaaccctaatagcttattttttatatcttttcctttttacccactttcttagtttcatctaagagatggcaattggcatgtactcttcataatattgtgcagaacacttgtctctatttataatgatgtaaatttatagaaaacatccagtttgtagttatagttttagctgaaacattgtcactaagctggaccttttatctaaacaagtcttgggtttgggaagtgattctcaataagtgcctgttttgatttactgtcattaattttaaaaagaaaaactgttatcagtcatgcataatttcttacctgttaaagatagctaataatgttctctatttcccatgaacttacatctttttattctgtggctgcaaaccagactttagcactattttatcaagattatttgctgaactttgacatttagtagaggcaataaagagaaatatacaacattgttatagcagcttcagtactgaagttagttaatccaaatgtgttatgtttttggtcctttagagacaagttaggcatgtagcagatagagaatagtgagctatgagaagaggtttggagcttaaatgagttcatgtagatagtgggttgctgtgcctagttaaaacgagaagaccaggtcttctaagtctctgtgttcatgtgccttgtgggaagttaccttgatataatggtagcctccaaatacagtaccaggcaagccattcacggaacacaaaggattacacaccaaaaaatgatgcttaagtcacatggtttactgaatcaacttaacgtacacagtgaggaacaaggagaaagtgatgggagagattaacactgttagtgaaggatgccagtcaggtacacggattccagttcccgattcctgaattatgtactgttctatgtcctcactctatcttcctcaccagcttcccccagtggtgtgg

SEQ ID NO: 29169 - DNA, 1672 bp, Bovine  19866880806504
  misc_feature (1)..(1): n is a, c, g, or t
ncaactctgagaagcaggcattgttatccccatttcacacatggggaaaacagtccctaaagttggtcatatatattcagtggcagaagggagataaaaatctgtgatggtctgactccaaagattatgctcctccctccaacaagaaccaatgaaataaattctgggaggcaggtgtcccctctaatgatcgaattctctaacagtgagaatgaataccacttagcacacgtggtaggaagtaccttaattagaggcatccaggcaggggattcagtttccagtcacacgcgtctcctccaacacagcctggttaggtcacactcttacacacacacacacctcccaccgccctgattcaccatgcacccaggagatggtctgaatcactgagggggtataacttgaaagtacactcccaagtggttccagtctgtcatggcggggggtattgctgctggaaatcctcagggaaggaagttgggtttggatgttccaaacactcttctaaaccctgaaagccctcagctcttgaacatctatggagcttcgacaggacacacagcactttggctcggcgcctccagaacattccccagagccgggatcagggtatccaccggatcctcaatgacctcaacctcttcttgcacaaacacaacacaggtctggctgaaaggagcagcggagggtgtccagaaatgccctgggtagatcgaaaccaaggccccaggaggctgaactaaaagtttgctgtgtttattctcacttggtcagatccaggaagaaaagcggagaagagtgatctgggctggcaggtcagcaaacccccccaccacgtgccgcccacatcttgttccagctgaggagggataagccattctgccaccatgaccctgccaagaagctgatgacaaaggccaggctgatggctccaggccctgcagccctctggttccagctggggtcactcaggctcccatggaagctcagcctggtcctggggcaaaggaaggaagggtgggcacctggccagcagcacacgggctcagtgcccagccagcagggccactcgtcccctgctgacccagggcctggtgccgatgatgtgcatcgccctccatccacttccctttcctgcttcctccctcctccctcctatttcctccaagcctgaggaccttcatcctctccagttctctctagcgcttgctccagggaaaggagactcaagtctggactggaagcccccttggcagagaaatttcactataggtctcagctgtaacttctgcaagctataactttcctgacccgccaagactgggtttcaggctattctgctgcgtcccaaaaaccttctctctctctttagtcactaagtcatgtccaactcttgtgaccccatggaccgtatagcctgccaggctcctctgtccatgggattctccaggcaagaatattggagcgggttgccatttccttttctgggtaagatgtatggcattgccttgaattatccatttacttaccctctgccctaccagaatataagtaccttgagggttggaactgtcttttttcacccttgtattcctaacacctggcataagagagaaactcgagcagcattggttgaatcagtggatgggagacagatggaaattctaag

SEQ ID NO: 29170 - DNA, 2315 bp, Bovine  19866880815746
  misc_feature (1)..(1): n is a, c, g, or t
naattggataatttattattatccaattaaaaattgagcaaggcatctgaatagacatttctccaatgaagatatacaaatggccactaagcaaatgaaaagaggctcaacatcattagccatgaggcaaatgcaaatcaaaatcacagtaatacttcacatctactagcatggctagaatcaaaatgtcagacaataatgagtatttgcaaaaatgtggagaaatagtaggaatgtaaaacagtgcatccactttgagaaactgcttggtagttctgcagaatgataaatatagaattaccatatgccctagcaattccactcctaggtatacacccatcattaatttagaaaaagatattcttcaaagttccttctcactaagaatatattctcttaaacatcttttcatctgttccatttcctagtgaatatttaattaaatttccaccgtgtaccctttgatgaaatagaaaatccatcgtaaacagataaagaaacagagaattaaagataaaaaataacttgcccaaggttagtcaagcaaaaataaacaaagtaaacaatataaaatgaaatacacacattcacacaaaacacagaaaaacaaaaaactcattaaaagctcattttagtacctaatttctaaattcacagttaaaatggtacaaaacatatttttcaattcacaaacactgtacaaagtaatcattaataaagtcaggataatgggaaagtgttaataacagctacctttatggagtttttatgctgtgtactatgcttggtcgctcagttgtgtccaactctttgtgaccccatggactgcagcccgccaggctcctctgtacatcagggattctccaggcaagaatactggagtgggttgccatgcccttctccaagggatcaaacccatgtctcccgcattgcaggcaggttctttactgtctaagccaccagggagttcttgccacagtccaaataaaggacatttaaggcagtaagagacataggaactgaacaaaaaattagaaactagactgatggtatggtgttaattgaataaacaagttgagattcaaatacaagaatttttatatgctaaatacctcagtaagttgaattatatttaaaaaatttttttcattacaattgtcacgatttctctattcaaaatgtgtaccaactgctatcaaactctagagggagcaagaagccttcctttaaagaacagctgattggaaggcagtcctgagaatggtggcagagccccaattcagggggagccctgagtgagacgaaggagcagcccacgtccaggttttgctcaactttcgctgatcccatctgcactaaatcataagatacctgctaaatattcagtaaattctaccatggatactctgacacaaataactattatgcctttagtgtgatatgaagtaagttcacaaaccttaactgctttctaattttattagaaagcatataaaagcattattaaccagtgcttagctacaattaaaaattatagtcatgtttcctttttttgataaagcctaaataatcacaagttcattattagctgaattcaaaatttaaaagttagtggttcacagcaagtcaaactttggattcaaatcacaggcacttgctttaagtttgtgtacatggtccatcgctcagtcatgtctgactctgcggccccatggaggccttagataaattacttattccagctgaaccttggtctgcttactgtaaattgaagataataatattaccaaccttatagagctacttgaaggattaagagagaaataaatataagtatagtatagtatctggcacagaatacataattaataatagtaattttaagtgccagtatttactgaatttctaaaaattatgccaggtatgttatgtaattacattcgtatataattaatgtatcacatacataattcatacctaccctgtaaggtgggcactatcattatccccacttagcagatgaagaaactgaaggatggaatggttaaataactcgctgaagtcacacgactagaaaaacaatagaagctgggacacgaacacggccaatccggttccagagtctgtgttcttaaccactatggcagactgcttctccttaagggttaataactgttagatgtggttgctattatttttgctttttataataaaactatatatattcactagtcaatacaacaaaaaacaaaaatatatatgacatgtgttcttctgaatcattatggcagtaattttggcaaattcatatgcat

SEQ ID NO: 29171 - DNA, 1413 bp, Bovine  19866880822195
  misc_feature (1)..(1): n is a, c, g, or t
nggcttttttggaagaaaggttctcatagatcttttaaaaaaaaaatttttttttggatgcttcctgctttttagaagagaaaataaaaccaggggcccaaagagtaaagggaattggcaaaagccactgaatgggatataatggtctgtctagtctctgtctagtcagagttcttttcaagcaattcacccaaatttcagcactactttagaggaaaaggtacccagggatattgaaattgagaggtgattcttgtgaatcattagcaatgcaaatagatgtgttttgtttgttggtttgtttttcacagagagaaagcacacacaatccaggcttgaccagagcatctgggacctgcacaggtacctgtgctagcttgtccccaggtcacactgatggcccccacgtcaccaagcccagtttcagggccaccacaagaccctgtaaatgcctcatgttcctgcgtttgtctatgaactcgagctcagaggcgatcctaaggggagttacctggctcaggtatggaatttttcaaggccccagaccagaaggccccaggcagggccccagcggggctgagtcagtgtcaggaggagacatggtgtcagcgtctagctaatgcgcaaatagatcatgaataatttgctggaagcagctgaaggccatacgcgttctacagccatcaaatgtagactgtacattgttttcaaacttatttcattttctcttttgccaaaaaagggggaaaaaaagactcaagttttgggccatgagatcaaccctgttcatctgcgctatggccctgtgttctccgggcctgggcttttattggtgttttgtctgcgatgggctttggccatggaaatgcgaacaaaatgaggtaactcacacttaaatcttctggatatattgtggctgatggctagtgccgctgagtgtcggtggagataggcaggcaggcaggcaagcgcctgattcgagtggccatatggccaggagccagcatgttccacagataaggggttcagaccactggtcaagaatggagaggctcaggactgcaggacaggatgaccttggctgtaggctatggtgtctacttcatgacactgagcactaaacatcatcatctcctgggcggcagtgggacccccattctgcatgtagcacaggggggcttcactgccctgaatggagcacacagcccctggcaaggggggaaatggtcaaacagaaaccacagcctgcttttctgtagcctgtcctcattcacccctgcagaagtaaaggaagagcgaagaggaggagggggtcagatgcgggggtcggagtggtgggggtgggggtaaaggaacacaaaaaatgagagaaattggacatcccagtcgccaggaggctggggaccaagccaa

SEQ ID NO: 29172 - DNA, 911 bp, Bovine  19866880864703
  misc_feature (1)..(1): n is a, c, g, or t
ntacccttttggtatgtctgtggtgttaatactcttgacatgcaaacaaaatttggggtgggagccattcctgctgcttttgtgtggtcatcatatacagaaaagactggatcacaataaaagagttgcaatttacattatcagactaaaatatgaaaacatgctatcaaatggaacatttctggaaatttaaaatctactatcccaattccaaaaaacatacatagtacataggaaaataaacactttgaataagatgaaagtaaacttgcaatatattctcagagtaaaaaattctcaaagactgttcaatgaaggtcaaagtagaagttcaaaaattatctggaatttagaaagattactttataaaacctgaaaataaaaatggaaggaaggtggacctccaaacaaaaagttactcaaatattctagaacaagaaaaagactataaagaaaattatcaaatatttcttcagtgttctctgttactaacataaaataatgacaactaactaccctttctgagctcttggtcctagcactccactaactgctttctactcattatcttacaaaataacaatactgtaagaaaggtcctattactgcccacattttatagagataaaagcaggctcacaagcaggaaaggaaaatgaaactttaaaagatgaaggaagctgtctaaaggttgtgtgagtgacagagcaggctggaactctgcaacccacactcctcaccagcaccccatactgcccaggacaaaaacgaattccagtcaagccaacaacagaaatgtaactgttttttaataagaagtacctttaatatctcatccaaaagaacagatttaatttctaaatcctcaaagttacagatatatccagaagtctgaatgggttcctttaaag

SEQ ID NO: 29173 - DNA, 760 bp, Bovine  19866880875684
  misc_feature (1)..(1): n is a, c, g, or t
ntgactcatttcagaagtggggttcagtccttttcaaaaacagaatcaatgccatctttcatgaacacagtctttctctccccttttgctgcagcccaatccattcttctcagctcaggaagaaccagagaaggaaaccaatcagcaactccccttgtggccctggtgaggacacagggcataacaggtggggggctctttaaagggaatgaagaggagggtccttctgctttacttaggaggcccctctgtcattaatcatgcctgtccctccagtttctaggcccttaccccacccaataaggccaaacatcaagcagagactctggaggtcacccaccttcctggagcacccagggccagtggattccagaatggactcccgcacccgggaaagatgaaatgggggtggatccacatgcgggtggattagcagacatcatcggcagtggcttatgaggtagtttgttgttgttgttgttattttgttagttgacttccctggtggctcagacggtaaagcgtctgcctacaatgcaggagacctgggttcgatccctgggttgggaagatcccttggagaaggaaatggcaacccactccatcactcttgcctggaaaactccgtggatggaggagcctggtaggcttcagcccaaggggtcgcaaagagtcagacacgactgagcgacttcactttctttcactttcactttctattttgttagttaatttatttggctaggccagatcttaactg

SEQ ID NO: 29174 - DNA, 1479 bp, Bovine  19866880914155
  misc_feature (1)..(1): n is a, c, g, or t
nattccctttccttgttgcctaaggtctaatttctaagaccacagttcctatcccctcctccaagggatcttcccaacccagggatcaaatctgcatctcttatgtctcttgcattggcagacgggttctctatcattagtaccacctgggaagcccaatacagacataaaatagaacaaataaagagcttagaacagggcctgatgcctagtcaataaatagtagctattgtcatcatcattgttattattacttgtacagacatagagattgaaatctctatgtggggagggaccgtgcctgcctatttgtctactgagttccaagctcctagcccagtaccaggcacagtgtcctttagtcaacaataaatattcagaagcaatgaaccagggtcctccagactcttacacctctcaggccaggaaaggggctgcaagaattgaataaaagagcagcctgagtacccactttctctctccagccagaagatgtaccaagtaaagtggttaagagtctgtcccacaacaggctggagtaccaggtccctttggggtgttgccatgtccttgagcccaggctacgtgtttccaggagtacagttctcacaaagctagcccttgtgtttgccctgcatccctgggaggcacagagaaaacaatgaaaccatcatcaccaacttccattcctagtctgtgtgtggacagggagggctggggagaggctgtgtttgatttggctggggaacatcatttttctttactgaagaaatgcatgccagaggggctaaaagtagaaggtagttctcacccaagagagctgtattctccagaggccaggctcacagtaatataaagaagctgtatcttccatctgcacatcacccactcctgctttaagattcagttcaaacgtttccttctccgtgaagcccttcccaccttccccttggctcctagtgtgccctgggcctgctgtctccatctgagcatgctcagtggatgccttcctgaaactgcctcacccaccagggcaaggactgtgtcttatttgcttttgcaactgtcttagcagagtagagtgctgctgcattctgaacccaggaatggcagaaagaaatcttttgaagggcattaaaccccctgttgttccagagtgtgaagaagagaaggctggggttatgtgtgggtcctcgtaagagggaagttctctgaaaacttccctgaacttctctgggaacttctctgaaagctagtgctgtgctccctaaggtagggcagtcagggctacaggccactgcactatcagcctcaggaatgtgactccctttactgctgaaacgacctccctccctggtataatgaccagaacgctcccttattccaagccaggggttctcaaagtgtggtccctggaccagcagtatcagcatcacatgttctctacctcagttgtgctgatcagagactctggaaagg

SEQ ID NO: 29175 - DNA, 1482 bp, Bovine  19866880957473
  misc_feature (1)..(1): n is a, c, g, or t
nttagtaaggaccaaaaattttgagcccaggtctatctggtttattccaagatatgacactgctccttgaagaatgcttttatttctgtctactacttctctgactaaataaaggatcttttcctattccctgagtttagaatgtttgtaaacttcttataaaattgtggtaaaatataacttagcctattatgagttggtggtgaaagtgactttgaatgtcagtatactggcattttttacttgcttgcaattgacttttaatctcaattaaatactttttatttcaaggatctcttaatatattttattactgatttttaaatttaaactgatcagatgctattttaattaatagaatagtaataagtttattatactgaaactaatacctattttatgtttctcttttatgtgtagttttgttgtttttgttttgtttctggcctccatttaagaattttgaggtctgatcaaaatttttacctaatttattttacttaattcacttaataaacttattcaaccagtgtcacatacctacatggcatactgtacttgactttagagacactggtgaagaaaacattctgcccaccatcatcaaatttgactttttttgtggtaaatacagacaagtaaaccagtgattgcagtataatgattataatgctgttgacttacttattttatttaacgtagtgatcctctcccttagaattattatctttcctttatgggtttttttgtaccaagttaaccacagactagattatattagagttgtttgggattttatttgctctctaataaattagaaataagaaagttaagaccatgctccacagctttgaagagtacagttgacccttgaaaaacacaggtttgagctgctcaggtccgcttatacatggattgtttctgttcaaatcctaaaagatgatgttgtgaaagtgctgcactcagtatgccagcaaatttggaaaactcagcagtagccacaggactggaaaaggtcagtttccattccagtccccaaaaaaggcaatgccaaagaatgctcaaactaccacacaattgcactcatctcacacactagcaaagtaatgctcagaattctccaagccaggcttcagcagtacatgaaccgtgaacttccagatgttcaagctggatttagaaaaagcagaggaaccagagatcaaattgtcaacatccattgtatcatcaaaaaagcgagacagttccagaaaaaatatacttctcctttattgactgcaccaaagcctttgactgtgtggatcacaataaactgtggaaaattctgcaagagatgggaaaaccagaccaccttacctgcctccagagaaatgtttatgcagttcaagaagcaacagttagaaccagacatggaataacagactagttccaaattgggaaaggctgtatactgtcaccccgtttatttaacttatatgcaga

SEQ ID NO: 29176 - DNA, 801 bp, Bovine  19866880976564
  misc_feature (1)..(1): n is a, c, g, or t
ngggtcgccggctcccaaccggtctcccagggcaccgcggcggccgggccccccgccggtgacccgggaggatgcggtgatcgctgcaactgcaccccgcccgcggaccctaattcaaaccagacccgccgagctccggctcctgacccctcggcggaggcaagtttgggcgccgcggactcggtgcgggagcaagcgggcgtgttggctccggagccccagccaaggttgcgcggcgaacgacggcgggcgggtggaggtggggtcctcagctatccgttggccgccggagagaagccgggccgagctggtagcgggagattccgggaagttggccccggcattctagagacccgcaagaacccaacttctgggctgctgaagttgtgctgcccgcggaggggcgcgagccggcgctgggcaccgccagggcgcccgggcggcttccacgctagtggaccctggaatggcttttcccctcccccgacctggctttgtgctggggccgcgcggagggaaggcgggtcccttggcccgcccagcggatctggaggaaaagggggacaaatgtggagcccggagttggaggggaggcctttgggtaggactccagcatccacctttggcgaggggtgggtcccctctctgagagggacctagccgacaaagagcatcctgaggctccccagaaagtggtctgtctccccagccgccgtccgctggcccgccttccccaaagggggcgctttgttctcggcccctgtaaccctttcctggaaccgcccctcagcgccggcccga

SEQ ID NO: 29177 - DNA, 895 bp, Bovine  19866881043247
  misc_feature (1)..(1): n is a, c, g, or t
nacttcctgaagtgtaagctcccgtcaccagagaagggaagtgtctgtgccaggcatttgatgagttcccaaggaagacaccaagggcacaaagctgcctggcagcaacctgcttctgagccaggcaccgcctgagacatccttgagcttccaggagaccccagagcagtgcttgaggccctgtctcccagtgggagcacagaaaggcagcaagcttggtctgctcttttggctacgacctgagtgcagctaggcagccgcttcatcttcatgaagttgaacgaggctaggaagtgagggagagagaagggctcagggcagtctgtcgccctgaacaccccctcccccaaccctgctccattccagaaggggctcactcatcccagagcctcgcctcgccctctgcctgcagcgcgggtcaccaggggtatcagctggacagtaaagggattagcatgtccgtcccagggcagtgagttaccaggcaacaaacaactagctcctcaaccacagaacactagagatcaggaattacccagttgttcttgctccagtgaataccaaaatgcccctagggggctctcagaactcctctctagaaatagaaagtgtatgctgagggcatttgaatctcagggcctgtctcttaatacagtgcaaagttaaagagcacaaactctggagtcagaaggagtgggctcagatttcactttttacatgctgtgtgaccctggataagtcacttgactttctctgtgcttagttttcctcatctgtaaaatgaagctattaatagtatctacctcttacaactgcttcagaacaattcacaccgtaatatactttcaagtacctacaacaatactcagcacaccgtaaggattgcacatgttga

SEQ ID NO: 29178 - DNA, 2258 bp, Bovine  19866881078995
  misc_feature (1)..(1): n is a, c, g, or t
ngagagggaggggaagacaagaagaaatatttgaagaaataatggctgaaaaagtttccaaacttgatgaaacctataaacccacagatccaaggtcaatgaaccctaaccacaagaaacacacacaagggatagttagggattttggaaaggtcatgtacacactgctatatttaaaacggataaccaacaaagacctattgtatagcatgtggaattctgctcaatgttatgtgccagcttggatgggagtggagtttggggggagaatggatacatgtatatccatgtatatgtatggctgagtcccttcactttcacctgaaactacaacattgctgattagctataccccaatacaaaataaaaagtttaaaaaaacacacacacaacataaaaaatgtacataatgtaaaaaaaaaaagtacaatcaaggaacatcataaacaaattgctcaaaatcagtgatagagaaaaacttccaattacctgaaggaaaaaaaaaaaaaagagaggctttccatacagaagaacaaagttaaggaagacagcaattttctcagtggaaactatgtatccagaaagacagggcagccacatctttaaagtcccaagtgaaaaaaaaacctgacaacctagaattccataccctgggaaaatagcttttgaagacagaagtaaattaaagacattttcagacatgcaaaagccaaaagaattcagcagcagcagaaccatgctggaaaaaaaaaaaaaaaacagaaaaaagtaacacatgtcctctggctgaagaatggtaacagattgaaatgtgtacctatgaacagactgaagagcactagaattgataactaaatgcgtatatttggaagttttaaaattatttttctctttaaaagataattaactgttgggggggaaaaagtcataggtcagagaaagatggaatctgggcagtcacttgtttgcaaagttatttacttatttcattcaactgacgggagggccaggaatataaatcagctttcctgatgccgtgttcggattttgagctacctaactgaatgatgacagatacaaaactcctttctaacggaccagaaaacagttactctttttctggtttccaggtcaaatacttcctcttcaggccttcctttacccattccttgctcaacacagcccctcatgataatatttgcacagtgctttataactgccaacctttccatgtctgttacctcacttgatcctaagaacaactccaagaaggccgtaggccaggaatttgcattttcctgatttcacagatgcagaaactgaagctcagatcccagttaaatttcccaagatgagagagtaatagcttggtgacacgaggaattgaatttcaactttctgactccagatcctgtgctcattccaccattctgcctctcacgtgtccttattccatgttaggtggcaacattctcctgctagtaaattattttctcatacttaaaagtcatgactttactaaaaaaaaaaaaacaaagcaacctcagaaaagcaaaattacaactttttctttcactcaacccttgggcttatttataacatattccttctctcagcaaaaggagacctgaaaatggcacatttagcgtttgcctacaaggaacattggaacgattaaagaaagttccatgatgaccgaacaaattagtcacagattggaaaacagggcgattggtacaccatccaacataaggaataaaatgtacagtttatcaatgagaagtttcttggtctcatttttaacatgctttaaatgtaggcatgggggcttccttggtggttcagtggttaagaatctgccttgcaatgcaggggacaggggttcaatccctggtcagagaagatcccacatgccttggaacagctaagcccatgctccacaactactgagctccaagctctagagcctgcaagccgcaactgctaggcctgtgggctccaactacaaagccctagagcctgtgctctgcaagagaagccactgcaatgagaaacttgagcaccacaacgaagagtagtcccaacttgccgaaacaagagaaagcctgtggacagcaacaaagacccagcacagcccaaaataaataatctttaaaaaaaattaaatgttttaagtgtggtgtggccacatttagatgataccaaatttatagacatgaaattgaagccatgaaagacacttgctccccggaagaaaa

SEQ ID NO: 29179 - DNA, 931 bp, Bovine  19866881095099
  misc_feature (1)..(1): n is a, c, g, or t
natggaggccattgagatgtagatggaaacagctagaagaacagccctcctggcatgcgctggcaggaggacaccctggcctcagctgtgaggtgactagcggtcccagttagagatggagactaaagactcagagataaaatgaaggctcagcccttcctgccaccactgaaaaagctcagttaattctagactcctcttcctcccctctgtgctgagatttcatcagcttttgtaacacaatcggtttcacctggtcaacacaactttctgagtagccactgtgcgtcaagtacccaaggacatgcactgtggacaaaaggatgctctcaggtcaaagggagggactgctgctgctgctaaggcgcttcagtcgtgtccgactccgtgtgaccccatagatggcagccaccaggctcccccatccctgggattctccaggcaagaacattggagtgggttgccatgtccttctccaatgcaggaaagtgaaaagtgaaagtgaagtagctcagtcatgtccaactcttcccgaccccatggactgcagcctaccaggctcctccatccatgggattttccaggcaagagtgctggagtggggtgccattgccttctccaaagggagggacaattttctcaaaagaatctataatgttttctctataaatctataatgtaagtgagccaaggaatacataatctcctttaatatgaaccaatttttttccaaatgctcaaattctgaagtgctgccttgagaccccaagccttcccacctactatgcacacgtgtgcacacacacacacacctgaatgcccacccctttcagtggtacatagcacaatggtgccccacctcttatactgcggctgccaaagctactaaaaggaaaatagagttactagatgcctcgaactcagcagcctc

SEQ ID NO: 29180 - DNA, 928 bp, Bovine  19866881102702
  misc_feature (1)..(1): n is a, c, g, or t
ntcaatgatgaactgtagtgactgtggctgaacacattcaatacacttttgtacaacatggtttccattttgatctttcacacatttgagtacatgaccatcgagctcctttaccatttcactctgcaaaagagaagacatttaaattaccttaccaaacaacataaaagaagatgggaacaaaagtatattcaaaaatttgcttccaattttttatatatcaaagtttaaaattcctgaaagtgtcaataagcagaagccactgacggtgagaattactaaaatattttggattataatgtaaatgatatttgctaaaatataacctgctgctgctgctgtaacctagtgatactcaatttgctatatttaaactgtcttcactgtttgtatcttccactcatctttctcagctgacaactaatataatgatatcagaattctatacttttttctactaagcataccccttccccccagtaatcatcatcatcatttttttggctgtgctgtgcagcattcaggatcttagttcctcaaccagggacaaacctgtgccccctgcagtgggaagtgtggcgtcctaaccactaactgccagggaattcccccaagtagttattactgatgggtatttgagattatcaagcacacagaaaacggtaaggagctgaatgagccctgaagagccgtgtaattttcatgtaatacatcaattatgaaaaattattattgagcacttttattcttctttttaataatcttacagtaaagaacttgattcagggaatttcctggtggtccagtttttaggactcttctgctgctgggggcccaggctctccctagtggggaactaagacccttcaagctacacaatttgggggaggggggtggggaggcagtggtggtgcatgcacacgaatgg

SEQ ID NO: 29181 - DNA, 786 bp, Bovine  19866881110981
  misc_feature (1)..(1): n is a, c, g, or t
ngtcttgctctctcaaaacatcatttcaacagacacttgaatgtacaaagcagagttttaagagagacccagtgtgatttcttcacgaggagacaagacatacatgagaccagtttaaaaagcatcagcctcgcttaacaccaagcccacatcacaattgttgccttgaaaaaacttctgtgggtctttctgctgattgtcactccatgagtcactgtgaagggacaggtgtactggctaaaagcaccttgtaagttagagtctagacactgtggttgaagtcctttcactctcactgcagtccaggttctgaggattgaagctgacttcttcctgcaaagtaaacagattcaggttagtctcccaaaccacactcttgtattcggaagggactggtgcaatgaggcattccccacagggctcccacagttcccagccctgccaagtcactgaccagcctccccagacactggtcacggtgccagcaggtcccactgcgagccgggtctcctcatgtcctgattctcagacggactcagggagggaagcatgatcatgacacatgcagccctgtggccatcagccagggacatccagagcccagtctgctttttggggggctgaagacagacctggcattcatggaagggagacactgaatttccccagcagagtccagacctctttactgggagccttgaaacctccaggccccaaggttacttgagcagtatttggatgtaggatgaaggaaccatgcgtccaggaaggagaaaaggaaaggga

SEQ ID NO: 29182 - DNA, 1138 bp, Bovine  19866881135931
  misc_feature (1)..(1): n is a, c, g, or t
ntagttttctagcagtgagctttggaaatagatgagtacgcaaaaatcaaaatttatgagttcagccagatttttctttttctgctaaaaatatcagtctgcttaaagcttacagtgttggaagagatagaacccactgctaattatctatgagcagttcatctgtgctaccttcttctcccctagggcgaagggccctaggctgggtgagtagggctgagttggccttggagatgaaaggcctcattcccagggtaccagcaggaagatatgtgagtactgcccagctgagaaatgtgtggctactgagaaggagcatggccaatcggggttcatggaggatgatggcctggccagctcccttcagctggctcttgccttcatgtagtggtacttgaggacaggcagtgtctggcagggtgggcctcctggtcacctcacaaaagaatctgcttcctaattcagtgtattccacattgggaagctcaagggaaccagacaagaccctttagtcagcgctgcccctggtccccccaaggtgggctggaaagaagctgggacattgggttcaagtcccagctcggtgtttactaaccctggtgaagtcacggggccccttggaatctcaatcccttcatctctgaaacgggatgttcgggtcgtgctggccttgcttgggttttggccagagttaaatgagaacatggaggggttggtggttgttattactggcataaaaggagctatctcccagctcattaatgtggaaaatgtaaacgtctgcatgcctaaggacaaaggcccagccggccctttccgcattccctccccacccccatattgttgggagtttgttttggtttttctggaacttccagaacaatgggttctgggggttggttctgcagctattcacactcccaggggatgcatttatggagccgaggccacattccaaggataaggggtctgcagggataaaacccagctcagtcttgcagcctggagaggctgtgctgggggcaggaaacccagagacactcccatgtcagccccacagctgcgggcccaagtccaggagcctcacgggcgatctgatccatcagctgactggaaggcagaaaggccaagaggtgac

SEQ ID NO: 29183 - DNA, 1707 bp, Bovine  19866881143784
  misc_feature (1)..(1): n is a, c, g, or t
nttgaagacgcgcccacccagagtgcgtgtgagaatgtgctgaacaggcttcctggggaggccaggtctaagcagagacctaacagattgtgagcaggttcagggggggtagaaagcttgtctcaggtggggacacctgaacctacaaagagccagagggcgtgagagcacagtgaaggcaggttctgaaaacagcacctgcagagcctctgacctgcccacctggagaagggctgtcttcaccaagtccctgggtgacttggaggccatcgcctggatccagatcattcatttcttcatttattcctttaatgaccactggattctgacaacgtgccagggcctggactaggcactggggagacaaaaatcaagggcttagacctctgtggctgaagaaatagcactgaaccatgtagatgaaagaagtcctgcccaagacgacaccatgagacctcagccaccacatgcagagggtacagctgggtcctccttccacccacgtgcctgggtgtagaggcgaaatcagggacactcccgccagccttgcagggacttgcccttgaactggtccttctgcctggagagcctgcctttctgctcccttgtgcacgcactagctcagcacacacagaggcacatacatcacctccactctggtcacaggcacacacccacgcctacccctatgtcctcacacacacgagtcacacactggtgctagttaccaagatggggaaaaccagattggggtggggacagaaagcaaaagttttggcttgcctatgttaattttgaaatgcctggtagatatccaaatggagatgacaagcagatgtgagcctatagtgcagtggagaggtctgagtaggagatgcaggtgtaggaggcatcagcagatgaatggttttaaagcctcgaggagataatctaggtagtgtccagaggagaggagaaagtctagaaccagccctgatgcatgacaacatgtagaggttgattaaaaccaacagaggagcctgtgatgggcagagagagagagaaaggagaaaagcagggagctgattttcgctgaaaccaagagaagagaacatttcactgaagagatgcagccagtcatcccactgctgctggaagatccagcaactgggcagaggagtgaccactggcttcaacaacgtggaggtcgctagagagaccttgacagacaagagtggttttaatggagcagtagtaatgggacgccaacggggttgggtgtggagaaaatgggagtgaaagaggtgagagcatcagatagagcttcttaaggaaattctgccatgaaggcctatgggagcaacagctgctggagggagaggggcatcaaggcagaaattttttgtctgatttgcttttcttttatttttattatattttttatggtagcatagttgatttacaatgttgtgttagtttcaggtgtacagcaaatgattcagttatatcaggagtacagtgtgtacagcaaatgattcagttatacatatatgtattatttttcagattcttttcccttataggtagttacagaatattgagtatgatactctgtgctatacagtaggtccttgttctttatctattttatatgtgcgggtgctcagtcactcagttgtgtctgactctttgcgaccccatagactgtaccctgcctggctcctctgt

SEQ ID NO: 29184 - DNA, 2840 bp, Bovine  19866881222342
  misc_feature (1)..(1): n is a, c, g, or t
ncagccaggcatgtttagggggaggctggacttcttccggagcactgggttggaggatggagcttacagagagtgacttagaataaggacagtttgtctgcccactgctgctgtgccacgtcgtgggggcatggtgccactgctgcccgggaggaacccagaggagcacagactctgaaacctgggctgctcccagagaggaaggagaggaagtggtccagctacacagtttcagttcttcattccacttatcaggggagtccctctaacccaggttgaggagggatgggtacaggggtggagagatgtctttgctattagagctccacccacatggaagtaggcatggatggactggggggacatagtctttcttctcctctcaatagtctagctgcaactgccttgattcagcatgttagagcctctgctctttacgttcagagccccttcccctttcaagaaggctctgagttgctacacccctcctgaagtctttctcactctcctcagagctattgtcccttctctgaatatgtgtgctcatcagcttatactcatttatatagggccttatgcttttcaaaacaattcaagttttgatcagtggttatagcaaatactgtcttcttaggagccctttaagggtctcctttacgtgggccaatgcatgtgtatttatttgtgctcagttgctcagtcatgtccgactctttgtgaccccatggagtgtagcttgccaggcttctctgtccatgggattttccaggcaagaatagtggagttggttgccatttactcctccaggggatcttcctgacccagggatggaaactgcatctcctatgtgggccaatacttgcacttaaactttgtgtttccttttctttgatgttcttggtgtttctaaaattgtgatcatgaattaggggctggaggtcctcaatggggagaagccagcatcttgaactagcctctgaggcccaacaggggtccagccccaacagggactctgtggccagaactcttcatcaccaaggccaagaactacacctcactcagcccaccctggcccttacagctaaccaaaccatgatgttcagctaggttaacaggatggaccacccatttttatagtgagatacattgaccccctgagaccattacatgggctaggaagggaagactgggccgagtggagggattagtccattacagcatgttctggaagggagacaagctccataattgggcctggggggaacattcttactaccttcctcagagactgcttcaggactggccaggaagggccccacaactgtaggcctacatctgaggccattagatcacatgtggaggaagaaagggccaggccaagatggcctccaaagccagactgcgttctgtcagcttccacagaagagttaatattgatccctgtgggagtgaagatggttacctggtcatcactggaaaacaccatcacctggagaagtgggcttcatacatgttgctatggagatcatgactgttcctgacaggtcaggaaatgtgagaaagtggggacagttcaactggagctgttgaaagcccttgtggagaacttagttcctgagcagcgtcttcctccatggaaggactccagatgtgatgagtatccttgtcgccgatgtttctcctttgctaactggagactagacagcagagctgaggtaattcgccttatgtcataaactctaaggcgacaggcttggagggcctttgctgtggaaccgtgagaatgctccctgtttaatgaaggggtcaagatccctgaatcggaacaccactgacagggcagcagggctgacatgtcctggggttaaaggtgtttgaaatttgaaatctgttgatatttatggcatgccctacaggtggtcctggagagagctaacacagtgaccaccaccatgacgaggaagcagaaagcaggtcaggacagtggccaggacctttaggtgctgtcctctgaggaggaagaaggcagggtctcagggtgggcagggctcttcaggtgacaaaatgtgttcttgaagttccctctcagatcttggctttctggctaacaggccccattgtcactgaactcaagccatatggttaagtatactttcctggcccaagttcaaggtgcatgtagaggtggggagtcgctgaggcaggaagactaagatttcttggctcatgtggactttcttccagggcttccttccttaagaaggataaccacacttgttaaacgtctcataaaatgcctgaaaattagcatagccagacactagacaagcttgatgggtgagggccaggtggtttgggccaaagtctttagaactcacgcagatctgcaggcaaggcctcttcctcaggctgagtgagcaaaatgggcccagctgagacgatgctgtgattcacagagagctgttcagagaactcaacagaaaggcgactttgtaggttggtcaggacttgaggcagctctcagaaggttgagctcatcttgggtaacagaagggaaagatgaagcttttcatgggcagaacatgttagggtcatcgctctacaactcggtaggggttggtgctcacctctgccctcctccgcaggacactggtctgggcaacgccgattacggttcaagtgcagacagactcaggtcaggtagtgtaggcatgtgtgagaacagaagtgaggaacagtggagactccctagcaggacatctttgaattagaggctttaccatccctttgaaagtctccagtgacttcatagttcaagcccttattttgcaggagaacat

SEQ ID NO: 29185 - DNA, 1156 bp, Bovine  19866881419662
  misc_feature (1)..(1): n is a, c, g, or t
naatgggtagatttcgaagggtatgtaagtgcagcacttccactcaaccaaaatgtccaagaggagggagatggtaggttttttactggtatttagggatagcaattgttaatgtcctctgaagcaaggtgaaacagaggtacccccaagctggaaatcagaatggagtaaagcaatgctcataaagaagggagaatgaagatgataattttttggcagaggcatctgcaggggacaactacagagaacaaaatgttgatgactaatcagctcctgaatacagcaggaagggtcttaacaaataaagaaacaggggaatttgggagtataccagactatcagtgacattttattattacaaagggaacaggatatttatcttttctctatttttcctgtattattttcggcctacaaatctacagaaactagttatttccacaaaagttttttttaaattatctgttcttttgatttgcttcagcaatctaggattatctggggcaactgcttgtcaactgttagaaacaaaaaatgagtctatgagagtgcctgggctacatattaaaatagtaagctccaaaagtaatgaaacagatcaaataggaaaattaaaagactgaatagtctctatgttcactagatttttcctgagaagttcccatgcccattctttaggcaatttttttattaggtaaatacgatatttcctttttgtatctcattatatcaaaaaagaactatgcacctaaaagttaataggtgttctggaccatccctattaaaaaccttcaaagagttaagaagatactttcttagaaaactggcaaaaatagttagtaatgactggcatgtgttagtttggccattttttcacaccagaaaagaatataatttcatgtggcaggaaaacagacgagaagcagattttaagactcaaggacaccagagaaataaaacatttcttgaggtgtgaataaatgtcccttataaagaaaaggctgtccaattataccaagagaatgagagtaagctgtttttcccctaacgtttcctgaacactctggaaacaccagagactaataatacatgtgtcaacagggtgtcaaggtgggcctcttcgatttcagctctttctcagttacaaaatcagctt

SEQ ID NO: 29186 - DNA, 692 bp, Bovine  19866881765255
  misc_feature (1)..(1): n is a, c, g, or t
ncccccactcgcctcttctgtgaagaactgcagacttgcatccctgccaccatgccacctccctggagcgcccagccccgctggcgtctccccttgcccacggagttctgggcccgccggggaggggacctcacctctgcttctctctctgacttctgcctggagacttgggcacaagggctttctcgcgaacgactgacttttccactgcagacagcacctggcatcctgccacgctgactcaatttctccaagctgaagcaggcccagctctggagagaaggggaccctgctgctttggacgaagatgctgtggctgagggtggacacgtctgtagcacttactggtagacaccagcaggcctgggggcgtgtcctgccgagtagcagggccaggaggtcagggctccgtcagaattcactttgtttcgtggggaggtctaacttagatgtcaacttgtttttgcacatgtttttcctctagtttctttgttcatagcccagtaggctttgttacttttgaggtaagttaagtaagtcgatttggttattccccatctttcttccctaatctacagtcaggagacagcatcagggtttttaagaagactttttcttttttttttttgactaggagaaccaaatccaggagccaatgtctaggttagtttgtgtcttgtctgagtttatcg

SEQ ID NO: 29187 - DNA, 1582 bp, Bovine  19866881898685
  misc_feature (1)..(1): n is a, c, g, or t
ncactgtaaggaccggctttgttgaaggctcttgctagttcacaggagaatgacccagagaaaaggtgacttgttgccagaagaggacctaacagctggacagaccgtgaggtcaccctgctaatgcacagaagcccagaatggaggtgtaggtcacagtcacctgcaggccaagtccctgtatcaagtgcttctacccagaccggtaacagggccctaaatccaccacgattgcatccttcctttgggccactgggacttcggggcttgtgcccagtgttgatcaggaggcttagggcgtgcggcagagggtcaggtgggaggcacctccatctggtcctggaggagggcccaccgaggagcccggccctcgtggggacctctgttggggttgggggtcagggcgcagccctctctgttttccctcttgactcaggaaaccacctgttcctctcattccaggtctccaaaaagtacagcgacattgaggagttttaccagaaactttgcagtcgttacccgacggccagcctgcccccgctccccaggaaggtcctgtttgttggcgagggtgacatccgggagcggagggctctgttcgacgagattctgcgctgcatctccaaggatgctgagctggcaggcagccccgagctgctggaattcttaggtacctgagaccctgtcccaaatccctacgggcccctggcccaaaactaggcctcactgccctggcttggggggagggggccggggtgtggtccacagcaccctctgcagcccagagacctcggccaagctattgaggcatgtgggcttcattcactgccatgcttgggctggggtcgtgggtggtgggtggaaggagccggggacccagccctggaggacggactgcttgggtcctggacagggctcaccagggaccttctccatagtctgatccctccctttcccctcctggccagccccatgcagagctccccttcacacatacacacacacaaatacacacacacacacgtgcacatgcacacacacacttatggagaagcaggatcaggtggtctgactttcctagcctctctgtgcctcggtttccttatctctaaaatgaagatacaattaggatctctcacatgaggtttttgcaatatttaaatgaatttatacctatcaaatggcaacctactccagtattcttgctgtaaaattccatgaacagaggagctgggtgggctacagtccacggggtcgcaaagagttggatgcgactgagcaactgagcgtacctgtaaaaatgttctttgtgtgatgcttaccccatgaaatggaaggttcatgagattttgcaagggactttacatttgtcttaataaaataacaaagcataacgtaatacaacatagtcaataccacttagttccacatgtcatatcagtgtacacgttacatccctgtgtcgggcactctgtggcatggtgatgggttctttacccacagggtgatatatctttagaaggttcactgctttcaaaaatacactggttcagtaactggatagagttaaacaagcattcta

SEQ ID NO: 29188 - DNA, 1527 bp, Bovine  19866880480879
  misc_feature (1)..(1): n is a, c, g, or t
nttggcctataagtagaagtagtagtatttatctgttaaggtttcatgaatattaaatgaattgatacatataaaatgtgtggtagattaatcttgtcctttttagtactgggtggtcaagccaaaagaaaagaagggagctctagtatcgttaaaaaaactcccattgtattatagacgggtagcttagaactcagagtctactatatgaattcactttaacaaggtcacctgatgtgtgtgtatatccatatttttcctgttatcagctatataggcttgtctttaacagttattagaagatgaaaaaaaatacccagacatttcatagtgattgatgtccagtttatgaattgtttcatacatagaccatttaattaataaattatgattatgcaaactttaatgagttgtattaacagacatttattaaatatccactgagtgtcaggttattatgtgaaaaagaaaggaaaaccaggttttttataatctgataaagcaacatgtaaaacaatagtggaaaagaatatagtaaagtttatcaacaaataatatactgcaattcttgaattgttttgaatgtcctttaaatagttatttggaaaagcaaaagtaatcctagtagaaatatttctgcttttattttggtggatttcgtgatttttctcattctaaatttgtacatggatgaagttgctaaataacatgaattttgttacaaaacctcactcccttaatgctttttgatccttctgtttctctgactgctgcaaagtgtaaaattgcatggaatgttcttcctgcacagttgagctattaagcagaactaattctttatggaatgacaacaaggcgtaagaaaggcatctcttgtattaggcaatataaggcaatcacttggcaaacgctgaaggggaagtggtcttggagaagacaaagcaacagcgctttttctcttccctctgaattcataggaaccacacaagttgaacagctttgaagctggttaatgtggcttactatgcatgttttttctgtgccatttcctgcttgtttttgccagcagaggggccaagaataatcacttgataaatgcattagcatgtctcatacacttctgtgaccacacactgttgctgggaagacagataatttgagaagaggaaaatcccagttggggatgtctttcaaagtgagatcagattttactcccaaactaacaggatcctgtctagattatgagagtaccatatggagactgattatttaaaacaaaatttttaactcaagattaagtaacagttgggaaagatgaaaggcaaagtgaacagtggtttattttcattttatcagctttagaatggaagacagaaatgttggtattaattttatgatgttttaacaattatagaaagctgtttttatttccttggatttttcctgttggcagtgaaggtcttcccaggtggcccagtggtaaagaatccgcctgccagtgcaggtgacacaggagacgtgagttcg

SEQ ID NO: 29189 - DNA, 1080 bp, Bovine  19866880578691
  misc_feature (1)..(1): n is a, c, g, or t
natttaaatattaaataagaatatacacaaatgatggttcaatgtcttgagtataatttatgtaagcattctctttaaaatgaatataggagaaatggttggccatatctataggccctggataaactggattgatcgatttcatgctcactgtgactatttttggtgggaagggccttgagagtaaggactagggtggtttagtgttgtgtaagcgactgaagtggggacttctgggctccctgctcgattccctttgctctgaaaggttgattgaagggtcagggaattagatttttatgcctttagttcacagtgatatgtgcatttatacttggcctatgtgctggccatattgaacatagctggtgcttatgctgaagatatttgtgataagcaaatatttagcttctttttctttatatttataatgttggtctggcatcctcaggctgcagtttcagttagcttatgaatgactcatcattttttttcaccatcaggctctatcttgttgatctttgaaacttgttttatttttatactggtggaattgaaggaattagtttataattacataacatgtctgtttatactgtttgatagaagatggatgtttgtatttaagcaattacattcatattctgtctcaaaatagaaaaacaaaatattctatagcctgtagttttcactgagatcatgggtatttactatacttgctggatcttgccaaggtcatgtactcttccacactgccaaaatgtcttttttaccaaattaaaggtgtgtttcaaaatatgcttcatggcagttgtttataaaaatcaaaggggaaaattcttatttattaaagtagtttaagtagattaacatttccaaagaacttaatggctatttaggaagaaataccactcattataatttaaataaagaataaaaataaatgtattttgtgatggcataactgtaattagaaaaataaaactgtgatgaaaagtagctactggtacatgataattttcaaacggctttttatggaccatctgtcctgttttttttttttccactgcccttccacca

SEQ ID NO: 29190 - DNA, 759 bp, Bovine  19866880596884
  misc_feature (1)..(1): n is a, c, g, or t
ngagaaaggttaaaatagaacagtctacttacaaaagtttttcaaaagagtcttttgaaaagcagttcgcttcatcaactttcaaaatcagtcatctctggaaaaacccacaatccagctaattagtctcagctgtttgtcatatggcccacaaaccagtcaagtgattttgcccctttcaagcttttactaaaacccaatctcctggtctctcagacaaaaggcagctgtattaacctcttccagtgttagaagacttacacttcaactttttcttttccccccaaccaaacaagtagaatatttgttttcttgataaaacatactaaaagtattgcgttctaaaggtccttaagggttatattaatattgtgtatgagtgtttagttgctcagtcatgtccaattctttcagaccccatggactgtagcccgccaggctcttccgtccatgagattttctaggcaaggatactggagtgggtatccatttcttcctccagggggaatctttccaacccagggattgaactcatggctcctgccacgtctcctgcattgcagacagattttttttttttaaaccgctgagccactggggaaactcttacattaatattgcttctttatttacaattagcaatattttattaatattgctttcttgtatttacaaggcctgattcaagcaaacactacatacaggagatcagtgtaagttgaaggaagtgaagggacttcccacacatttcactctggc

SEQ ID NO: 29191 - DNA, 1305 bp, Bovine  19866880616333
  misc_feature (1)..(1): n is a, c, g, or t
nctggatgaagcacaagctgaaatcaagatttccaggagaaatatcagtaacctctgatatgcagatgacactacccttatggcagaaaggaaagaactaaagagcctcttgatgaaagtgagaggagagtgaaaaagttggcttaaagctcaacattcagaaaacgaagatcatggcatctgaccccatcacctcgtggcaaatagactgaataacaatggaaacagtggcagactttatttttttctgctccaaaatcactgcagatggtgactgcagccatgaaattaaaagatgcttgctccttggaagaaacgctatgaccaacttagacagcttattaaaaagcagagacattactttgccaacaaagattcgtgtagtcaaagctatggtttttccagtagtaatgtatggatgtgggagttggactataaagaaagctgactgccagagaactgatgtttttgaactgtggtgtggagaagacccttgagagtcccttggacagcaaagagatccaaccagtccatcctaaaggaaatcaatcctgagtattcattggaaggatgatgctgaagctgaaactccaaatactttggtcacctgatgcgtagaactgactgatttgaaaagaccccgatgctgggaaaaattgaaggtggaagaaggggatgaaagaggatgagatagttaggtggcatcactgactcaatggacatgagtttgagcaggctctgggaattggtaatggacagggaagcctggcgtgttgcagtccatgggtcacaaagattcggacacaacttgacccactgaattgaactgatggagagatgcaggtaaagctagctgttgttgacaggcctgtccctttattttaaaaagtacatgctcagtcatgcctaaaccacagtagaatgcacagcttaggctagagcatggatcagtaaactttttctctggaagcccagataataaatatgagttttgtaggccatgcattctctgtcacagttactcaattctgtctttatataaggaaagcaaccatagacagtgcggccacgttccagtaagacttcgtacataaaaacagtgtgctgagtttggcccataggctgtaatctgctgaccccagactataaactggatcatgtaaaggactctggagatcagaggacaggcataggctgcatatacaaataaggaagacattacctaagactggataaactcacccaataccaatgagaaatgagagccaaaaacaaaatccagggaaatgctgacattttaaagga

SEQ ID NO: 29192 - DNA, 1232 bp, Bovine  19866880632606
  misc_feature (1)..(1): n is a, c, g, or t
nttaatcaagattaataatatttagttaccaattacactagcagtatcaaacattcatactgaagcccactatagctataaataaggcccctgggcaggttggtgctactgggttctttaggtctgcccaccacatcacactagtctttcagtgatctgctggtttagcctagccagaaaggctgcccacctagaaagaaggcaagattcatgttgctcacatatcctatcaagaaaaacaaaaaaaatcagacttctttacacttacctccctgctctacctgcaattcttgcagctcctcttgtgataaagatgcacattctggagcgggctcacagctgtcactagctgcaccatgttcagaattcaccatctcgatatcagacccctagagaaaaagcgatcatcagttaattgtctatcagctacccaaagctagatttgactacctgtaaatgcttccattattaaaagtcccagatgctgctataatccaaagggaacagtatctattgcttttgttcaatttagtccataaaacctacagcagagaaacagcagaaaggagccacagatttagactctgaaaggagtcagtccagaagtcaaacactctaactgcactaaaaacccaagagtcaatctgaatcccagaggatttctacatttagctatttctattaatttgcttctactcaacatttatggaactattctagccaaggcattttgctaggtgtcacagagtataaaaaactgaaatctaaaattcacatttaaagcctattcagagaaacagtcacaagtaaatattaataactacttattacaacatctgactaaaaatttttaagggcaagcattaaaattaatctattagattaatatggcaggctatagtccatagggtcgcgagagtcagacacgacttagcgactaaaccaccaccaccattacactaatagagtaaacgttctctgtaaaagtagactcttctttattcttccaaggtttttactttgatgtcagattgtcttttctttaataaaagtggatcttaacagattttttttctcatcttaattagcaaaataagttatccaaaaatgactcagtctctctccagatccctctctcaaccctatagtttactgatcatgaaatcaaaaggtctgagttctcctgagacatgtaactcaacataactaagagacttcattaaaggaggagt

SEQ ID NO: 29193 - DNA, 1770 bp, Bovine  19866880671261
  misc_feature (1)..(1): n is a, c, g, or t
ncaccaggctcctccatccatgggatttcccaggcaagagtactggagtgggatgccattgccttctctgagtctcttctagtacatataaattaccttttccacagcattattaagactactgaatagctgtaactttttctattaaaatactgtaatttaaagatgaacgaaatctactctatcatctctgttcactttctgaaactttaataataatttctatatttactataaggcaaaactctgacatttggaatcatttaaataaattccatattttcaagtaatctgtgagcaaagccatctaaaattcttttttgaaaactgaattttatagtattacttttttatttaagagtctaatattttcctccataaaacaatccttcaagttcccactggtctctgttgccccactgattattcatctaaaaagttaatgaggccatttccaatggcttgactcttggccttacctaggtccctcccatcactgtctctaataatgctggttctgtcatctccatgatataataagtcacgttaaatcagattaatgctcattggggctaattagaatataaactaccaagaatttctgtaattattactccttagaaatgaagctgcaagggccaaaatccctaaggagggaaagtagtgattatagaggtagttatttaggttatcttaataacttgatgccagagcttctctctatctgctctacactcttcaagggaaaccatgaccatttcagccagaagttgagagctgtggggcacagaaccaagaaaagggaactttcaaagcttgttgtaacaatggctactttgatccttttgttaattcttgaacttcttaatcttatctcttcactcctacctgcccagtgccctccgaatgcacaaggggcagagaagttggaaggagtgatgtccacaatagggaaagaaacctctctcatcctaagaaagtaaaggaatttaatctatatattatcacccttcattatgtcaatcaatctcaattaagcaaaataaacttttaccttttatgtagatctggaagcttatttctctccttatcatcttaggggagtttccaacctattaaatgaagctattttttcccatctaaagactctacaaattaatgatttttatatgaaactcatttataaggataaaatcatttatttgtatgtgttagtcactcagttgtatccaactctttgcaaccccacggactataccctgacgggctcctccatctgtgggattttccaggcaagaatactgaatcgggttgtcatttctttaacaagggggtcttcctgacccaaggactaaacccggggtctcctgcattgcaggcagacacttaaccatctgggccaccaggaaagccaaagtgaaagtgaaagtcgctcagtagtgtctgactctttgcaacccccatggactacacagtccatggcattctccaggccagaatatggagtgggtagctgttcccttctccaggggattgtcccaatctagggatcaaacccaggtcttccgtactgcaggtggattctttaccatctgagccaccagggaagtatttgtaagcactttttatttcttaaaatcaattttttccctttttaaagagtggattatttactttaggcctcttatggttttttcttggtctaggtacaacttctttattctttaggtttaagactcaatctatttggcaccaagtctttaaagggaa

SEQ ID NO: 29194 - DNA, 1873 bp, Bovine  19866880687767
  misc_feature (1)..(1): n is a, c, g, or t
naattttcatttatgtttagcttttaatcacccttttatgatgtatgtattttgtgtattaattaattactttgtatgttggcacagcaacacaagtatataataaactcatgcatgtgtatgtattttgagagtgaacctcagtttttttagtgatgagctgtgtgtaatcacagaactctgcagacagctgctatgtggctagtctagatatgcaaggtcgagatcacaacagcgttctctggggccttcactctgtctctcagctcttattttgggcaagatggcaaatggaggcctaactcatactcttccaacttaacacccggaggccaaagactctggcagtaccagaaaagtcctggggagactgatttggttgggttccattccataatctgagctagtcactcaggccagggaatggaatattctggccacttggattagatcatgttctccgggaaaagggatgatatgaatcagtcttaagggaaccatatggcaaaggtgtcccccagcaaagaggaaggacacacagggaagtgggcagacaggacacacagcggtctgggtgagagtggggcttactgccccaggacagaccgctcaggagaggaagggtcccagccagagtgttcagtccagatgtgggcatgagaaacagaagtgggctgctgggcttagtcatgggccaaggaaagttttatgttaaatatgcataaaggaacactaccgagcctaggtgaagatggtgtctgatacccacgaacaaaaggctgggatgtaatttctcttcaggacttcctgtactttgcctgattatgtcctgtggtgtgcatcaaattagagactttgggatcagagtggccttgcttttcatcttagctctgccacatgctagctgtgtatatgctgcccaatttaccagaacctctgaatctcacttctgtcatttatttctctctggaagagttgtggggaagatgaaatgagaatacctgtcatagttcctagtgcctgataaataggaactattatggtgatgctactgatgcttttgttttcctttcagccagtttggccaaatttctgtggtgaaggatgcaggactgattcatcattgaaacctcactgagcccccagagagcctggcatgtaggaaatgttcaataaatccttgttgaatgatcattgagggagggactgtagcttattctgtgtcaaatcattcctgagggactctattatgaaatgctgctcagacttgcagctctactgaaggacaaattagtctttgaccaagaaaattacgtcttagtggtttccctcttgccttgtgaaatgtcgaccaatattactacagggaagcttttcaaagtattgagatttcttcactggctttgagagcacatattagtatttttcatggcttcttctattgctttataaaaatattttaatctgtattcccacactgattacacaagagctgaataaactagtcattaatgcagccaaaagacccccacccccacccccacacccccggaagggatgaaaaggctggcatgacttgggattgtctgggctacttggaagagtaacttgggaataaagattatgagttttctcgagccagcttcgaactaccgtgactcagtgtggaggaagttgccatggaaaataattacacaggctgttcttaggacttccctggtggtccagtggttaagaacctatctttcaatggggaacattggtttgatctctggtctgagaagatcccacatgccgctgggcaactgagcttgctggccacaactattgagcctgcatgctgcaactaagacctgatgcagccaaatagata

SEQ ID NO: 29195 - DNA, 1673 bp, Bovine  19866880744466
  misc_feature (1)..(1): n is a, c, g, or t
naaataaattttaaaatagaatgcagaaatgtgttgagtatatgcattatttaatgtctaaatttatgaaattttgcttaagttattaaacttaagtttaaagcttcacaatttatgtaccatttaaataaatcaaaatttacaaacctgtccaaaaagttcttcatctatgacaaacctgaggtccaattctgttggatcattttcaagaatccatcttaatgaattgtaatactcactatcctagatgggataaattgcatatttaaaatttgtgtacagaaagaagatacctgaatctgcaaagaaagtaaccgaaggtctgaataactggacaaaagacgaaaaggtcagatggatctcttttacacacacacacacacacacgttacaaaaagagatgaatagtaagtacatgagtataaatacagatattgggacttctctggcagtccagtggttaggatgccatacctccactgcagggtgggtgcgagttccatccctggttggggaagtaagatccagcatgccacagggtgtggccaaaaaaaaaaaagcatttatcaatagcatggtgctgcttaaaaagtttagaagtctatttctgtttggaagcagtggaggtacagatttttattatccagttaaagggtcagttctgagatatatcctaacttccatgacattcaggggctctcagcaccagtccatatggccaatgagactgtgtttgaaatgattaagtaactctgaggagactgctatttatacttggccctaaattgaagaaaaatctcaaattaaatacagaaccttaattttctaactccaataactatgcagtgttatgatttataaagaactatactgttcaggggcttcccacgtgccactaatggtaaagaacccacctgccaatgcaggagacataagagacgcaggttcaatcctgggttgggaagatcccctggaggagggcatagcagcccactccagtattcttgcctgaagaaccccatggacagagaagcctggagggctatagttcatagggttgcaaagagtcagacacgactgaagcaactaagcatgcatgcacataatgttcatactgataatatgtcatgagaaagggacttggtgccatggaagaggccttggaatccatgtgttctacacatttctatgatgctattcagcatgggttataagggtatagtcaaggatttaattcttgggtttctgtttctatgtagtagcctaatttcaaaactttgctttggactgccagtttgaaaacatgtcattcatcacaaatgatcacaattcaaatactgacacaacagacacacaaaattattgtatatagcatgctgaagtatttagggagaaatttactcatacctgaaactttctttgaaatgcattaaagaaataagatgggttgatagatagggagcaggcatgtggataggtatgtcataaagtaagtatggataaaaagccaattgtggaatctgggtggtagatatacacatatccgctgtaaaactttttcaactctattatatgttagtaaattttccaaataaaatgttgggggaaatgttcatttatattcagaacatccattgatttcatcattaaaaagtaagtctttaagatattca

SEQ ID NO: 29196 - DNA, 1697 bp, Bovine  19866880762334
  misc_feature (1)..(1): n is a, c, g, or t
nactgtggctccccagagtttctcactgcccgtgctgggccacactcagactccagcattttgtcaaagttaccgtttaagtgtttttgccagcttatagctccagttgcttctggaaaagacaagcagatctttgtgtctttctggacacacttgtctctctgggtttcagagtagcagttttctctgtgactgacttttctgataggtccagaaagcttcgtttttagtgtatccatctttttctgttataaggataggaataacaactttttagcgtgtcagaatggaagctggagctcctttgttgaccttttagctttatatatatatatatatgtgtgtgtgtctatgtgtatgtgtgtatacatactctatataaataaacataatttttatgatatggatataaattttaggttattcaagtttttaatggttgccatatgcagctttagcttatcacaatctatgatctacttcagtttaacactgactcagttccagtaaaatatagcaagtttgctttatactgcttcatttggtctctttatttttgggctattattgccattcatgaataggtatatgtatatggattttataaataaataatatgtgttataattttactttaaaaattatttttttttaaatctcaagttttcaaagaaagagaagaaaagcaatcaaatactgtgttttaaaaaattttaatggattaaacataaataacataaaatttaccattttaaccatttacaaatacatagttcagtctcattacatacattcacattgttttgccaccatcaccaaccatccatttccagaactttttttattttcccaaactgaaactctgtacccattaaatagtaacttcccattccccatttccctaagcccctagcaaccagcagtttattttgtatctgtgaatttgactcctctaggtgtctcatgtaagtgccatcatactatatttgtccttttgtgcctggcttctttcacttagcataatgtcttcagggttcacctactttttagcatgtgtcagaattttcttcctttttaattctgaaaaatgttctgttagtatgtatataccacattttgtttatccatttgaattgtcttttatacttacccatatatttaccatttcccatattcttcattcccacttacggatctgagttcgtgtttagtatcacttcctttcagcctgaagaatcttctttagtatatcttattgggcaggtctgtgacaaatagtttctctcagttttcatatgtcttagaatgtgcttatttcatcttcatttatgaagaatggttttgcaggatctagaacttgcagttttaatttctgtctgtctgtgctttgaacaacaggtctttcgctgctttctgtcctccattgtttctaatgaagaatcagcctttaattgtattattattcctctgtacacgatgagtccttttttttgtctctgctttaaagattttccagtttttgtttggtctttgggttaatttagtagtttgactaagctttatctaggtatatctctttgtatttattttactcttggttgaaattctctgaaaagtgtaatgttctcatcagatttgagaagtttttggtaattatttcttgatgtatttttagttggaaactacacattttagtg

SEQ ID NO: 29197 - DNA, 3779 bp, Bovine  19866880898077
  misc_feature (1)..(1): n is a, c, g, or t
nttggaaaagaggctgatgctaggaaaaattgaaggcaaaaggagaagagagcagcagaggatgagatgattagataatatcactgactcaatggacatgagtttgagcaaactccaggagatagtgaaggacagggaagactggcgtgttgcagtccatggggtcacagagtcagacatgacttaccaactgaacaacaacaacatcccatgtagtatggtaaaagaagtaactgttattatcatttttattttaattttttgattaaaattttttcaagtgaaaaaaaaaaaacaatgtttatattctcaattggtgacagtttgggagaagaaactgctcctgtctgagagcccatattaagctgcagtgttgttctacctagaagtcatcaccacttgggcatctgccatggtagaaagaataggcccctgaacttttcaaataacttggttgccctacttttcagacttttctttttccatctaatttccccaacgttgacttcctttgtgacttaaatattcttcccagctctcagacttcttttgaggagccatagaaatttcgttcctcagcctaaatagaagctgatttcttcaaatggaaaattcagcaaatcactgcagtaatgtgtattgattcttcctgctccagcagctggatcaatgtgagaagcgaatgtcattatttcctgtgctgtctacaatcccagatgtattcacaagagaggccaatggtaacgactcctgaagttttacttgaaagagttgtaaatagtctgttacacctttggaaagctcaggacagaactctggttatgcctgtttgtggcccaggcactgtcaaaaatcagaaagtctgacatctttggttctactttgggatccagaaatggtgggcctcagttcttgcttcttcatgctataggatcatgggacaaactcctagaaaattagatcaccttcaaccacttgacctgtgaatacaaagaattaataccatactttctctgagatgaatttaactgcttatcttagattaatataaatataaacataaacaaaatgggtagttttgcagtaaataaatgtactataaaaacaaaaatttagagcttagtttaacattattttttcacaactgagcaaacaaagtccaggaaagtaaagagactttccctagtcatcatccattcagagtggtgttgagtctagggcccaggtatatcagtcttctttggttacttaataattctcaatagtagtatgaatggcaacagtatgtagtttgaagaccaagcagtactttgtcccatgttagtatttttaattttagacagtatttaaagaaggattaagactgttcaaaagtttttatttttcctgggaaagctttaaatccactttggtaagggagaaggtgatgttgggagtggtattggtgtatgcagaaaatggggtttgtgcagaagtctgagacaagttgggtgttggtaagtcttttaggaggctctggtctgggaagcaaagcaagcataattattcatggattgaggaaatgttggaagatgacacctgctgctgctgctgctgctgctaagtcgcgtcagtcatgtccgactctgtgcgattccatagacggcagcccaggaggctcccccatccctgggattctccaggcaagaacactggagtgggttgccatttccttctccgatgcaggaaagtgaaaagtgagagtgaagtcactcagcgacctgaccccatggactgcagcctaccaagctcctctgtccgtgggattttccaggcaagagcaccggagtgggttgccattgtcttctccaagatggcacctagataatgttaaattgaggaagtagacccactaagagtgaagggattctctagtggtggggcttccagacaaagtgtcctggatttcctaagatgtgatgatggtgttatgttataaaatttccaaatagtcttaaaaactatttaggagatgttttctttctctctctttttctctttaggggaaattgttggggagtttagggagatagtagtagagtggctagagtgaagttaccgtgttttcaaatggtgtcgctgacatgctatttattttgcccagtgatctaatatggtgttgacagaaggaagatgtctgttcaatttccctttcttggagaaaagtttattgcccataactatatactgtttaacatgctgacatttatagtgaagaaataatttttaaagctgtcttttcttagtgccacagttggttgaaaaagagaacaattcatttaattaggagaatatattggtcatacacagtggaacaaattaacctatttttgacttttttttttcactggtgagttgacagagctttggacaaaactggctgtcttctttgacacaattcactcacagccataggatagcctttccaacataaagtgaattataataaattcttgtcttatttggaactgttggtgaatggtctgttctggtgaactaaggattatcattgagatcatatgcaaataagcttatagaagaaacatcttatgttgaaagtaatatgacttttataggtttaactgctgactcactccatcaaggttcttagaagcatgcaccagaagctgactgtggctgactaagcgaaatgatactttgttcaaaggatactgggaagctcatagtatcattgacctgactggagaacaggcctgaggttaagttcccaggaaccatgtccagaacctcacctcaccgcagtaacactggcattttgcccagcaccggtgctacttctgcacaggaaacttggccttccggttgttcccaacccccaaatctagataccttttctgttactcacagaattgaaagtcctcctctatttagtttcttacttctgagtctttgtgtcatctgaagtctagagcacatgtccatgtgttatcttttaaggaggttggggtaaagatttctttaggttctgcctttttttttccttgaaatgatttgtctagaaatgtttaatgaagaacaattcataacaacaaaaactggagacaaccccaaagtcccatcatctaaactatggataaagtatatctgtactatggaatatcatacatcattgtctaggttttaccttgatataagatgtgacttggaaggttttccaaacatagcaaggtgttaaaaatatgctgggtctctagaaagcattacaaatacctacatggtgtgtctttgggcagaccatgtcatctcattaagcctctgtttctccctctgttgaatgggattattcttccttatatcctttcatgaactggtatagtaagcaactttgttgtccaaatgtaagtccagggtccccaaagtaccttcttacttctgagaattcatgacttgccataacaggtctgattttcattttggctctcatgctttctggaagtagtaataacattgctggggaaatttatagcttattagatggccctgtttatgacagcattttccactgtagagcactagccttccagaacgaaagatagatagttcctctttattatagaggatgcccagacaaaataggttgtcttccccaacctaggattcactggatttgtgtgccacttcacaagtattgggaaataaaagttatgactctacacattatagaaatagcttctcccaaattgactgagagaatttgggcccttggtgtggggaaatat

SEQ ID NO: 29198 - DNA, 883 bp, Bovine  19866881558093
  misc_feature (1)..(1): n is a, c, g, or t
nacagggatttgaacactcatctttaatgtaggtaaatctatatgctgagcagggggatttacagtgcttttgaaagtactaaacatgaaattgtcttaccctaatttaaatcttttattttttgatatcttggcttttaaagatttagggagagagtcaaatatccccagagggatagatgggtaaggacagagtgcatttttaggattcttctctaacagatctactttttcaagattatggggcatttccaaatttctttaaactgtttggaataaattttagggtaagacatactggcatctaattctagtttattcaagtcaacctttaaggcttattgacaagaattacatgattacctttttttagagaaagaaaatatttcccctaactttcttgaaccagcaaatatcactcagtataatccatgagattctgaacacctttcttgatttactcgtttgtatcttgtaagtagttcatggtatatagacatagtcttaatttacagattttatctttaaaatttatgttacataagtttgtttttatttaaaactatcagaactcaggactatctttaaaaataacagcaaagaatacttaaaaatttttacctgaaacatttttctcccttttaccacattctgtattctttttgcaaatgaaaatgattaccaatgatttaacatgagcctgataaagaagtttgcaaagccttaattcacacacattgtcttagcctgtcagtagactagaggacatatataaagtttgtctttctgttgctgttgttggacgatattttatgtctatgtatgtgcgatttttttttctattttcttcaaagatggaattaaatgaaagtgtgggagccag

SEQ ID NO: 29199 - DNA, 1358 bp, Bovine  19866881652767
  misc_feature (1)..(1): n is a, c, g, or t
naaatgatgcagttggaccaacttgggtttgtgtcttggctaagcaccacactagctgtgatctttggcaagtcagacattttaaactacttcctgatctctaaaatggggatactatttactctgtagaatgtagcaatatgcatggccgaagcatgtttatggcacatcacatatgctcagtaaatggcacatcccatatgctcagtaaatggcacatccctttctaaggaatagaatcaaaagtggctgaaaaatgaccagcactcttaaccttactcataatatcatcacgggctctacctcttaaaggagaaagctttatcttgttcattgaagaagtgctaaaacttagaattataaattatccttcatatctgaaagaaggcttgattgacatgacctaggaatcagaacaaactacagcagtggaatctaaagctttctaggaaaaggaacaactgacatcaaagaagaattacaagaaagataaaatttcccaggagttgtacctgctgataaggttaagtggaggctctagctgaggctcatggaaaatcaagaagctgtatcaaattgaaaaccaaacagtggcttgtgaaactgaagaaataagcctgacttaaaagtcagaaggtgtgcatgttgcaaaatgcttttaaaagaacatgaagaatgaatttgagcataattctgttcatctactctgaattcctatgtttgaggtgttttcctccactctaccctaacaatcactcaagagaaaaggacaaagctcaactataataagaacaggtttcaaaaatttctgatgaaattctgtaaagttaaagccaaatattaggaaactttgctgttaaacagatggaactgagatgttaattcacatattcaaaaagtttaaagttgaattgcttttgcaagtgatttggagagaaagcttaatgtgtacatttgataggcgataagccaaggttttcatacctttgaaatactgaagatccccaagggacacatgacttcacacttccaatctctgtaatgcaatagacattttatggggatcagagttctacagaaataatgtacctgttgtaagcaaaataatggccacccacagaagtccatgcttaaatcccaggactctgagtatgttaccagacagggcaaaaaaagacactaagaatgtggattaagttaagaattttcagatggagagagtaccctgctttatccaaatgggccccatcttatcaagtgagttcttaacattcaagagcctttcctggttagggtcagaaaaagagatatgttaatgggaagtgggtcaagagagctgctatgtagctgacttttga

SEQ ID NO: 29200 - DNA, 1595 bp, Bovine  19866882015996
  misc_feature (1)..(1): n is a, c, g, or t
naaggtctgatgtggtgccttctactctagcagccggcaccagggcaggcagcagtggtggctggagctcgtggtatgcacaccctcagctgcaggggcctgtgtagtggcaggggctggtggacagacacacacatgtaatggtgggggacagagcagacagaaaagtctggagccaactacagggcgtgctggcagctgcaggtaccctggctatcattatgcaggccttgactgctgcttctcaccactgatgcagagcagtggtagccagctacggggaccaggccagggctctgcagctggaagggctagcagaggtgagcacagtgcaagcagtgacagaagacaaggccttcttcaggcccacaagtgcacctttttttttttgcagaggggtcttggcagttggtgtgctctcccatggctggacaacgtccccttggacacatgcacagcagtggaggccagtgacgagtgtgaggcccgtacacagcagaaggggctctccctaaacgcacacacagcagaggggttcagctgcaggaatttaggctgatgtcttgaacttgagtggcctcacaggcctgggatggctgccaatatagatcctgggccccagcgggggccggggctgtggggtgtgaatggaggactcgggcagctggcatcagtgaatgtgtgaatacctgtgggtcaaaagccatgaaatctgcagggggtcggaggcagctctgctggccctcggtttccagtggggaaaacagtttgcagatgaggtcactgggagctataattactccggctgtgtggttactcctggcagctcctgcttctcctcttcgttccaggccatctctgtatgaattggctttgccggctggagtaggatgaaactggtggagggcattcatgcagtgtcctaaaaggttggggaaactggtcactcatccccacaacctattctgaggcaagctagccctacctacctgtgaagtccatttttggtgctgagcagtgccagcttggggatgggatgatgtacacaaatgatgaagctgtcttcttcccctttttgagctgttattctcaggggttttattcaactgtgttgctaaagtttaagtggattccagagctctctcagagctctttctatttgtatatagctatcaaactgttgatctttgttgggagacagaggctggggtctcctatgatactgtttttatgacagcattcctgaattgtacttttgaatactgtccatcagtttcatggttttaattcagtcttttctatcttgctcagtgcctggactgagggatgacatctctgaggactaaatcaaggaccttcctagtccccaggtagaatctttctgatctttaaacacaaagtccaaaatgacttttggttgaagtcagtaattatccctgaaatcaccaacttcatttgtctgttttattctcaaaaccaaggtgcaagggagtgttctctgggcagttagccagcccttccagtatcattgctctctcttcagtaagcttggaatatgggggtttgagacgagagcccagatgactccacaataa

SEQ ID NO: 29201 - DNA, 760 bp, Bovine  19866882039530
  misc_feature (1)..(1): n is a, c, g, or t
ncaatcctcgcaaggtcagatggactaaagcgttccggaaagcagctggtaaagagctcacggtggtgagtacacttagctatcagtatagtttttatagttttcaaaattttagtttttggatggggaacaattgatgttaattagagttagtatcaattaactctaataaggcttcccatagagtgattaatgactgactgacttgtatttggctttggcaatctcattctcacacgatccccaaaactataaatctgtagaattctgaaaaggaaaaaaagattcctaatctagtttgtagaaatgatttttcttattctccaaaaagtatttttagctcttgtaacaaaggggagaattatttaaatggattaaagtcggaaactgttacttaaggattttgaaaggaagttaagagataaaaggatgtttgtgtagcagtgagggctcggatgaggtttgtaataagcttgtttatcagtttttcagttttcttagctggactttgtgtctgagagcagagaacttagttaatgatattggtgtaaggaggaataatgaggaatcggggtgagggcgtttcatgagatgagcccccacaagtattgctcttactgagttggtatgaggtcccactgaggcttggccacactctatccttgaaaaggaaggaggagaaactgttgcacaggttgtttttgagggtgggagatctttcagctgtcttctccctgctgactttctcttccaccaaacc

SEQ ID NO: 29202 - DNA, 1714 bp, Bovine  19866880035830
  misc_feature (1)..(1): n is a, c, g, or t
nctggaagaagttggcttaaagctcaacattcagaaaattaggatcatggcatccggtcccatcacttcatgggaaatagatggggaaacaggggaaacagtggaaacagtgtcagactttattttagggggctccaaaatcactgcagatggtgactgcagccacgaaattaaaagacgcgttactccttggaaggaaagttatgaccaacctagacagaatattcaaaagcagagacattactttgccaacaaaggttcgtctagtcaaggctatagtttttcctgtggtcacgtatggatgtgagagttggactgtgaagaaggctgagtgccgaagaattgatgcttttaaactgtggtgttggagaagactcttgagagtcccttgaactacaaggagatccaaccagtccattctgaaagagattagctctgggatttctttggaaggaatgatgctaaagctgaaactccaatattttggccacctcatgcgaagagttgactcattggaaaagactctgatgctgggagggattgggggcaggaggagaaggggacgacagaggatgagatggctggatggcatcactgactcgatggccgtgagtctgagtgaactccgggagttggtgatggacagggaggcctggcgtgctgcgattcatggggtctcaaagagtcggacacgactgagcgactgaactgaactgaactgatacatgacatactttgtcaaaattcattttaccttaaatgtatgcattttattaaacatggatcacacaatttagttcatttcaaaagacctttcatatcctaacttccacctctctgcagcttaatctctagctgtttcatcttgaacttttaagtttacttcattgggacacttcttgccttcagggttttgtataaactgccccctcacttgataatcttcccactccttcctcacctcaaggagcatgtttccttctaaccccaaatgggttaagtgctcttcctgtctgcttccacagcactccagaatagcatacagtagaagatatatcacattttatcaatttttattgtttgtctgtctttcctgttacattataatctgcctgagtacaggaactgtgcttgctctgttcccacaacatacctgtcacagtctcggtttgtagttggcgcttaaaaaatatttgttgaataagtgaatgagtgaaccaataaatgaacagatctcctgagatcttcaggtcgattctcaatgatttcaaggttctgttttctaagtgaaattaattgagggcttccccttgaagtgaatgttatttttggtatggcaccacacaatttattataggtattttcttctaaattaaatttctcagaagccaccatttttgtaggagcagtgagtcacagaaatgcaattcttggcggtgccttcccccaccaccccgttcccccagctagccagaccaaacattccatagtaaccgtgtttttgattgtctgaaggatttctgtctgatttaggttgtctatcaagatattttgtagtctacttccactctgaaaagggtagcttattcttctttttttataatggtcctttcctttttgcaaatgcttttgaaaaaatagttgtcattatctataataatatatgccaacattagagacaaagcctaataaaatagcttcttattcactctac

SEQ ID NO: 29203 - DNA, 1562 bp, Bovine  19866880070833
  misc_feature (1)..(1): n is a, c, g, or t
ncatattgctactccatttcttctgagggattcctgcccacagtagtagatataatggtcatctgagttaaattcacccattccagtccattttagttcgctgattcctagaatgtcgacattcactcttgccatctcttgtttgaccacttccaaatttgccttaattcttggacttgacattccaggttcctatgcaatattgctctttacagcatcagaccatgcttctattaccagtcacattcacagctgggtattgtttttgctttggctccatcccttcattctttctggagttatttctccacccatctccagtatcatattgggcccctattgacctggggagttcctctttcagtatcctatcattttgccttttcatactgttcatggggttctcaaggaaagaatattgaagtggtttgccattcccttctccagtggaccacattctgtcagatctctccaccgtaacctgctcatcttgggttgccccatgggcatggcttagtttcattgagttagactaggctgtggtcctagtgtgattagattgactagttttctgtgagtatggtttcagtgtgtctgccctctgatgccctcttgcaacacctaccatcttacttgggtttctcttactttgggcgtgggatatctcttcacggctgctccagcaaagtgcagccgctgctccttaccttgtatgagggatatctcctcactgccgcccttcctgatatggtagttctatttttaattttttgaggaagctctgtgctattttccatagcagctgcctagtcccaccaatagggcacaagggttccaaattctcctcatccttgccaacacttgttattttctatttttttttttttttttgacagtagctatcctaatggatatgaggtggcaaagtttttcttatatttcttcataaagtttctggaattatggatgttttgaaagtatcccatcagtcaacctctagttgttcagttcagttttcagtggtgatggggattcaaataatcttcaaaattcaaagaagttgttacaaattaagggttttctgatcaagagtaaaaacatctagaaagttcacgtttgctttccatccaaaattatcactcaattaatgttcaccaccaaattccacctaggttcattacataagttttatagagctctccttacaagccttctgtgtgttttcctaatgatggaaagaccttttcgtattggcttctgcttttcttgtgccgtgtttttatttatgcttggactagactagaactataggagtccattaccttctgattttcattcttgatctctcttctcagtccgggattgttggcttctttttggaggtcacaaaggttgccttggctacctttaagtaacaactacaagcaacatagcatttttactgcaaaagactttctgttcatcaaatttcatttgcagttgatattggattagaacctggtgatttagcttggcaagagggttcctgtcagcatcatgccatttccaaggagggcatctca

SEQ ID NO: 29204 - DNA, 941 bp, Bovine  19866880487779
  misc_feature (1)..(1): n is a, c, g, or t
natgcataagtggagacagaatctagacaaagggaaaatcaacttcccccaggctcaggcttcctccaattcagaaataggtggtgagttcactttctgtagagaaggaagtgactctgagcagtccacactctcaggaggtctgtgctcagtctttgagagcccatatgcttcgtgccccctgtggttaagccctgagtcttataaacttgtaatatttatgtgtgttcaagatactgatagtttcacctcttgagggctgtccattcctttgtaatctttgggggttgagtttgaggcttattaagtcattggaccatgattttttcatttctgcatggtaatgtaactctgggtgtgtatgactcttggtgggaacaattgcattcctgtatacttcatctgatctttatctagggcatatcctgggagctggggggagaaatgtggcagaacagacaggacttaacccgtgaggcactcagggaagaacgggaaggcttgttctatggtgttggggaagcaggccaatttttctccttgaataagggcagtgcgccttggggcatcccactttaatctctgaccagggcttcagagtctgtcacttctcatttatcaacccaaacccagacgtccctcgagggcattctttgtaagagaaaccatagtattttgtagccaaataaggttttattactacattcactttccctctacccaggaagaaatacagaataaccattgagaggcgaaaccagcaggaagaaagcaacgttggaaaacatcgggagttacgggaagattccatcagatcccacttttcggtggcttaaaaggaagtctgttcttttggcttgagattctttaaggagatagatgggatgaaagacatcaatggaatagaaggggcgctcttaaaaactcattcttttaagcag

SEQ ID NO: 29205 - DNA, 1956 bp, Bovine  19866880632884
  misc_feature (1)..(1): n is a, c, g, or t
ncaatgaaggaagtttcatgccagaaagaggcatccacctggcctgaaatgtgtgaataggattttaataagatgagaagaggatggaaaggcatgcttggcagaacctacaatggcacaggcaaaggtgcaaatgtgtataacattcagtgggcagctgggaacctcagtctggagcaggagaaaagacagggacaaagaatttgtttgtggagacctctctttagtcataatcctaataatagcaaccatttattaattgcttactatgtgccagggagctgttaaaagataaataagatagagccaaggacagaattcattaagggctagatccgttcacaataagcacaagattaaatttcaggccaccaaacaaaactcgatgaagttgtcctccttcttctcccggacaaaacctcctgaacactgatgaggctacagctacgccagtgctcagagagcgggtgagctgtgtgtcactgtcattggccaggccagggtcaaccctgctgtgtgctcaagacacagacaacatggccttttgtcaaggggccaaatttcatttgctagaaagaccccaaattctaagaacatccagaagatcttcagcccatgaaggaatccatttcttctagtgcaatccatgtttattgattcattttgaattgactcaaggtatgaagagtcagcaggaatgatgcttcttgggcagagtcagtgtttctcagctttgggtatgagtcctctccaagggcacaagaaaggaaataaccctataacgtattctgttgcataattagaaaatacacatagaaccggaaatagcaactatctcagttactatgataatatggagaaaagcatttttttattttgaaagaagcgaaatttggtacaatacagctgtctaccacaatcttgttttctagaaaaaaaagaatggaaataaaaatgactaataaatgtaagccaaattaaacaggtatatagtcacaagcaaaactgatactatgacttcctgctttgagcaagtctctcgttgcattacgtcagtaacctttcccatacggagccattgaaagctaggaaagcggaggtcagcttggcgtgatgccccatcagtggggacaaatttaattcaacagacaactgggtgcctctggagatttacgagcggaacagaagaatgacatgattagactcatgcctagggaaatagcagtggattagactggggagacactgagggttcagagccacagtaatccaggcaagaggttacaagaggttacatgtgcgaagtcacagctccccacccaaaaaaaaaaattgtacatgggtctccgggtggttcaaatcacaggcaagttttcttttccttttgtgtttttctgaatttagcaaattttcagcagcatgtgcttttagaatcattaaaagagggcgagcccttgagaatgaatgcagagggctgtgcaagaggaatgtgaagactccacaagagtgagggagtgaacgacagcggtgatgccagagaggaaaggccaacggctgtcagaggaaacagcagagccagagggaggggaaagggttagtggatgtggaaatgatagtgatttcagttagggtcacggtcaattcaaggtgactgactgcagaacacccacgtggcagcaccaggctgcggctggaaagagtggtctgaagccagcaagaagaatgagggctagagaaagtgctggaggtcacgtccacaggtcttacactcagaactcaagaggagagggcggagggtgaacataaaccctttggggggtgctgttttaatgggcacaggagtgagaggagctaacagaaagccagaagaatgctgtgccaccaaggctaaaaaacaacagggattccagaaagaaatggacagaagcaatagggcaagaactagagctgacctca

SEQ ID NO: 29206 - DNA, 1039 bp, Bovine  19866880791248
  misc_feature (1)..(1): n is a, c, g, or t
ngagctctgcccagtgaatcaagggttcaggaatactggtgtggctttgtgaaaagaaagcccctgtctgtattagaaatgctttgtatttctttaacacctattctgagttgtcccataggctgaataaatggcttctgtatcctcaaagcactctgtgagttccttggtgtgggctgggagggtgtggggttgagtggtgatagcccaagcttagctctttacccacacttagggcttctagcccctggagggaagtcatgtcaagtctgtgtgcctctgatcgccatcaactgaaagcatcatcatcttcataataataatttttcagccgcaatgggatactattaattagcctaaatttttgaagtgcttgagaagtactgaatgggaagtttcacccatatggtcaagctgggagtctgaggagggaggaggttaggtgaaaagccaccagtcataggaggaggctgaaagcagaacagaatggctgctgtcctggtgctgtgcgccctcccgtaaccacaccagaccacgctccctgcctccagtaattagaaattacttcagcacataaacaggcactttataatgttttctttttacaatggacagcatgcgtctcctttccactaggagaggggaaccagttttggcttcccactgtccctacctcctttatagcccagacttatattcatgcacagggaaagcggcagtcacgtgggaacatttgctccaaacatggtccccttccagtggttctggctcaaaagaagctggtaacatggcctcctccaacataaatccctggcgtctttggatgaccctgagttctcagccaccagccacagtactgcctcttcttctctttctcgttcttccatccacaaggttaagaaagtttttttcatagaaagtcacattgacatgaacactcttgctcagaacacccttaccatataccactccatccggtggtgagtgataacaactgtttgtgtttaattagctcttggtttatgggcagtttgtgttg

SEQ ID NO: 29207 - DNA, 1425 bp, Bovine  19866880938283
  misc_feature (1)..(1): n is a, c, g, or t
naaaaaacctcacctgactcctagaagttagcagggacatagtttgaaagatatctttagattttaagttatttgtttctgtgctgcctaatggagtattacatgtcaagatcccatagaaataacaatgacattcagataataatgtcatgtttattcgtccagactactggtattcttaggttctcaggacagcaatggttcataaagcgtgaaccccagaacaacaacatcagcagcacctgggaatttgctagaaatgcaaattcttgggccccatcgcagacttactgaatcagaaattctaaatgtggaacttagttagctgtgttttaacaagcccttcagatgatgctggcatacgatgaaaattggctgccactggattttagcattgtcggctccttgagagcacagtctgtctcctactactctttctcagccaggtagggattatttaatagacccatcgaaggacaactgagagatccaggcttagaaaactttgctttaatgagtttgtataaatagaggggaacatagcaaaactggttttcctcttgggcaacatatttgtttatctggcttctttgaagtcagagccaataaatcatagcacagacatattttggagataaaaccatagaaccctgtcctgagagtgaccttagatcacaaggccccacccccacattttacaaatgagaaactctaggcccagaaggatcacccagttcccaaccccactacccttcatgcgtacatacacaccaccctcaccaacattccctgaaacggaagggtttgttgaagtcagaatcaccttgctgatcatctgatgccttcatggctgggcacttagggaatcagccattctattcagaagctctaataatcacattgccattgtgcattcatctcctccctgtctacttttaggtggtttgatttcagaacacatacataattttagagagacaggtttcatgttctctactttccaatgttcagtttctcctctgcagtcaggaaggcaagacggtggccgggttgatgaccaactctcaccctttgggaggcagatgagccctgcttgtaggtggccatgctcagctccaggctgcttttctccacacctggttctcatttgtaacaccaaaagcatttcatgcttattaagcatcatctggtcccaatttttaaaccacaagtttggcctggtttgtttttaataagcggttacgacagagtccaccttttcagtgtgatgatgtctcttaaacccagctattggcatcttggaaatttaaatgaacatggctgttatagggggttaaaaacatgaaagacacaaatcctgaaatttgtgacactctcctgcctagatacgacacattattttcaacacttatatggaagaaaagg

SEQ ID NO: 29208 - DNA, 1605 bp, Bovine  19866881114609
  misc_feature (1)..(1): n is a, c, g, or t
ncacagtcctttccaagtattagaaagatttctagaaaaagtaaggaaaaaacccaatccccacaattctatcaccttagtatgaatttggttcaccaaactactgtcctcctttgattagagaacttgcaactatgaaaggaaaacacatgatatgttcttaacaattaaaaggaaacaaatcaaacaaacaagtaattaaactaccttaagcctctgggggaaaaaatggagaaaagaaaccttcgaattgaggaggaggatgcagaatgaggcagtggggtgcggtggcaattgaagacagacttgatgacttatttgctcagggcaggccctgggtctagctgatccttatcctagtattaacagatccctcttctgaccgctggctgtcatcaggctagctggcattggtgcctgcactgaatgctaagtgtctcaccttccccacagagcactttggcttttatttcttaaatgaatcagtccagtttctttaagaaagatttcctctatgcgtaaactaactgcacttccttccactgcttaaaccaaggctcaggcttatccactgtcatttccgaatgtttgttttcttttttttcccagaacaatgagaatgacagcaagctctggctaaagggtcccaacacctgaaatactctttgccaattatattacttggcaagctacaaaagagtgagggatgcaatctttcattaaaaagaacatgtaaagaagaacgactattaagagcatctagcaaaaataagtaattaaatatttaaaactgttcgactttataatgactcaggcacaaaactacgattggccttttctgatctgtcaataagagtagggtcatagatcctggaatagatgaaggttttggtcaataaccatacaacttatttgttttcttgttttgttttgcgaataatttggttttcagtagaccagaatatcaagcagagtactgaccagaggccacagctggaattctcaaagaaaatgggctttttttcctctgcttttcttatgcttgagtaagattttcacagatgtacatgaacaataacacaatgaatcgctgcctgttatcagcctcacgtcgtcctgacctaattcctgggtcaggcactttaacacagagaggatttttgtgaaatggttatcatcacatatttttattagagattacttaatttgagagtcccttggactgtaaggagatccagccagtccatcctaaaggagatcagtcctgggtgttcattggaaggactgatgttgaagctgaaactccaatactttggccacctgatgtgaagagctgactcatttgaacagaccctgaagctgggaaagattgaaggcaggaggagaaggggacgacagaggatgagacggttggatggtatcactgactcaatggacatgagtttgggtaaaatccgggagttggtgatggacagggaggcctggagtgctgtggttcatggggtcacaaagagtcggacacggctgagcagctgaactgaactgaactgaatttgatatagctatttatcccatcacaaagatgcttcaaacatccaacattcc

SEQ ID NO: 29209 - DNA, 1358 bp, Bovine  19866881163597
  misc_feature (1)..(1): n is a, c, g, or t
naactcatctctgacctttttttcacacttgatacagtaacaactaactcctttagaaaaaagctaactgcttagagttctttcctgtacaaactattctgcttttcctttgctcatatctatcttgatccctacagtgccctttcattctcaccaacttatgtagctctggatcatcccttaaaactgaataggcttcacccctctggcaacccccagccccaccccgaactggtaagtgcccctcttcagtgttctccagtatcctgatggtttctcaggtgccattagtggtaaggaacccacctgccaattcaggagacataagaattgctggtttgatccctgggttgggaggatcccctggaggagggcatggcaacccactccagtacttttgcatggagaatctcatggacagaggggcatggcagactacagtccatggagttacaaagagtcagacacaattgaagcaacttagcacacaacacacacacattgactgcatcactataataaatttcacaagcatgtttaggaattttctgtttacttaatgacctcctgtggtaggctctgaatttcttgaggtctagaccagctttccttctcatcttgatgttccctaaacagctggcagtcagtatatgtttattaaacacaaccgcagagtcatgtatcttctataatgttcattgccctccatttgaagcacttcataaatatctatcttatctctccttttttcttctcctgtctcagggaataatgatcatattttcaagaaataattattggatcttgatacttcttgttattttggaaagtaaacatttacttggatagcttgagctcctgttgattttgactgccagtaacaagaagttatatggtactatgtaagatcagtagagaaagaatctctgtttttttgggtttgtgatagttcaattgccatagaaacagtcttccctctaagttatttcattagggttttttctcctttaaataatttggagaacagccatgttccacaaatagactacttcatgggaaagatcatacttgacatccctttccatattctaaaatctgcaccaaacagaaaagcagtagtccttcaatatcatccactccattttaagcttgacttattatagtaagtaattcactcgattttaaaaaagacttctttctggagtatgaatgtgaagtaagaacaggagcaaattttccaaacaaagccattctgacagattttatataatctatgcagttaggttacaatcttaattcatatcagatgtaagtaccacatcttcttaaagggaaaaaaaaatcagatttctattgca

SEQ ID NO: 29210 - DNA, 1960 bp, Bovine  19866881171535
  misc_feature (1)..(1): n is a, c, g, or t
ngaagaaaagagagcctggggggatggttctccaatatgcccatgggaaggtgctgagctggctccatatatcatggaaaatgagttatgcaagtaattagaatttggatgtgggtacttatgggaggggttataagcaaaagacatcaagccaataaggcttaatcatcaggctccctgacgtgggactgccccttcagaggtcttgggtagaaacttagcaatcggcagatatggtcaggtttttaaaacttgcaaagtaaaatgtttttgtattattttgtttacagagagcttccatattatatcaatttcattctcccacagactctgggtctgtcttaattctaagataatctatattgaactttttttatcttcaagttttcagtaaagttccatgaaatattatagccgtgtcttggctgttctctggaggaattaaagaatattgggtttacacttgtgaaatggtgtagtgaaagtgttagtccctcagtcatgtccaactctttgcaaccccagggactgtagccagacaggcttctctgtccatgggtttgccaggtaagaatactggagtgggtagctattctcttctccaggggctcttcttgactgagggatcgaacctgggtctcctgcattgcaggcagactcttttccatctgaactaccagggaagctcaaaatggtagaggattgtgacaaaatcctggaaaagctgtttattgttcagtaatcgaccaatggaaagtaaaacagtgatctggggaatgactgttaggagtcagatgaccctgacaacacatgggaaagtgtcaccaaggcaggagtgtgccttgaccagacacgctcaccaacactcgtatatatattgatgggaatggtgccttgaaagaaatactatgtatgtatgtatgaatgtaggtgccattggagttacactcattttaaagaataatgaactaaagataacagaaatgaagcaaataacaagaagactataaaactagttagaagaatttgtagaaatggagctcaagtcttttgctttcatagtcagttttcacatcctgaaaatggtaaaaacttgaggatcagaggtttcccatctaggaaaactgagcaaaagtaaagaagcaactttaagcaaattctacttgctgatgcagtaagacatttgcatgtctgtatgaagtgcttgatagcatccaggattcttgtttgagcaagaatttcaaactagactttaccatcagacctctgttattctgtttcctctgcctgattccatttttaagaactccaaaagcagataaaactaatctgtggtgaaggcaattagaaagtgattgaaggagggccaggagaactgatgggaaaagtagcacaaaggaactttcttatcctctatctcattacagtcgtccaaatttactgcctgcaatgcaggagacacagaagttgcgggttcgattcctgggttgagaagttcccctgaagaaggaaatggaaacccactccagtattcttgcctggagaatccccgtggagagaggagcctggcaggctacagtccatagtgttgcaaagagtaggacacaactgaacgactgagcacgcaaagttatcaagccaaatacctaagaactgtgtattttgttgtacatgaattaaacttcagtaaaaatatgaaataaatgactaacaaaaccacatataaaaataaaaattaaattataactctgttattctgtagaggcatgagtaaagcctctcaagactctaggaggtaagattaagattccctgctcttcctgttgcaagggaaaatgtttccccacattactgtatgtcacacatctgtctcctttttatctctcactgtcactggagaacaatgccattggcagacacagtatgattatcaggcaaaacaatattattactggaaaaa

SEQ ID NO: 29211 - DNA, 996 bp, Bovine  19866881350017
  misc_feature (1)..(1): n is a, c, g, or t
natgcctggagaagacggaatgtgcaccaacagtggggccttacctcatcctcctccaggctctgtgggcctttgctctgcaacgtgatagctggacctcccggcttcctgcgtctgctctctgcaaaactgccgaatgcactagactcgccttccagtctatccttttcaactccatgacacgcgacaccctcctgctgccccctggctgctcaaaacttattttggggaaggcagttcattaaaatttgccaactgatagcctacttaaagacgttttatctcgagtctttacattttaaattaaaactagtaaccaatatttgcaattcaggaggcaaaattacagcttctcatggaaaaaaaagaaggcaatggtaacccactccagtgttcttgcctggagaatcccagggatggcggagtctggtgggctgctgtctatggggtcgcacagagttggacacgactgaagcaacttagcagcagcagtgaaaaaaaaaatccaaagttctagctttaaattgctacagtcctcactctttgctcttcatttaaatggactcgtttcactcaaatttttaaaaatcgacatgcctgtagatactgtggttgctactccctcagtgtagtgatatggcttaacaacacaagcattgatcagatttgaacctcagctcatgagatggagggcacattatttaactctggacatctttttctcatctgtgaaatggcgataataatacctacctcatgggggatgatataatatctacacctcacctaaaatgatgcccgctcatagatgactcttgattaagggcagctattcagggtactcttctcaaaaagctgttgttcagtcactaagtcgtgtctgactcctgcaaccccatggactgaagcactcaaggctcctctgtcctccacttcatgtgttacttctttcctaaccgtttccctcaattctcctctccctatgcttgtctccaa

SEQ ID NO: 29212 - DNA, 1221 bp, Bovine  19866881409293
  misc_feature (1)..(1): n is a, c, g, or t
nattagttatgggtacattgacatctttaaatcccgaatcttctcatccattaactaagggcccctgcatttgttcatttagtttcttttgaaagtgaaagtgttactcagttgtgtctgactctgtgtccccatagactgtagaccgccaagacttctttgtccatggaattttccaggcaagaatactgaagtgggtagccattcccttctctaggggattttcccaccccaggaattgaacctgggtatattctatagttttcagtgtagagtattatacatctttgatctgctcagtatattaaaagttgttcatattaatagggaccattgtctcactttctcctcaaatatttcttaagatcacaaaatggtaagaaaaaccagacatggatttgtcctcatgaagcataaagtcttgtgctactaaaaagtttatcatattcataggttaaatagtaattttgtatcactaaagcaaccatataactcatattaaattaatattgaattttatggatttcatgaggctatttttgctcttagatttatttaagtttcattatataaaatcaaacagtttaattaacatcatgataaaaatatttcattgttgggcatctacaagaactttttccttacaaaatatctatattagtgaagtttgaaaaattgcttagggaaatattttttgcctttttcacattaattgtcaagttgagtgccaaatgcataggtatataattgtggacaaaatagctcaaaaaactttccagaaatagcctctaaatctatggtcatagattttagttacttttttatttaaaaaaatttttttttaagatttttatttctttcctgatgttcttcatgaagaaaatattctctcccaaaacactcattaaatatgaagtgtctggaggaaacattctgacatgtcaaaagacataggtaagctccaagtctatggtccatgagaaattaacttgtagtttttggtcatttgtttatgggccattgttcatacctggttaaaacactgatgctatcttggtagtgttcttctgagacacaaaaagtgtacaaatacatgagctatttttttggactgagttcaaacccaatggattttagagaatttttgttgaggttttcttgtttgtttgtttttgtttttatatttgatttaacaggatctcggaacatgttctatgagca

SEQ ID NO: 29213 - DNA, 1179 bp, Bovine  19866881494944
  misc_feature (1)..(1): n is a, c, g, or t
ntgtgttgaatcagtaaaataaagtagtatatggctttgcagaaataaaacatctttgattagaaaggtgaggtggtggtggaagggaatggtcaaagacagactcgttggaagaacctaaatgttttaaggaaagacattctcctcttattctccctgatggagccgagactctggaaagttaaggggagacatcagaacatgtttgtgtgcagatggaaatgctccggagcagaggtgataattacagtcgcagtgactgaggaggtgagagggaatggggtccaggtggaggactggattttgacacagcagtgatactaagctcaatgtagctgaagagatgcagagatagatttggtggtggaaggctgatggtgactgcttctattatctctgtaaatatcatgtctaagaatgatgggaatgctgggggagtaggagatttgagggtagaggaaaaaatgtgaactagtattttagaataggaagctgaataaatgagacttgtgtgatagggttgcctgtttgaggttagcggtcatgaatttaaagtgagctcaatcaacacagttgtgttcttgggtggccagggaagtctgaattttagcagttcatgcctttaacttatcatgtgagaggtatttctctttgtccattggctgtttgtataacctttggtcttggacagggaatgtccaggcccactgctgtctggaatcataaccttggatggtatcacagctgacaagcgataacagacacaggaggagaggcctggaggagagaggtggttttctcctagctggagtaggctccccacaagctgaagataagggggctagagggaggccaggttacaggtcaagaagcaggaaggaaaggtcttgggatgaatagccgaccccatcttaccctagacagcgtggctccatcctattgttgattctgggcgtgaaatggtttccctggagactggaggctgtttattcagtcaggcgaaagaaacaagtatgttcatgccatggcaagcgtacaataagctttccttaacaccttctgtatcatcacattctccaggaccttcttccatccagttgccctatttctgctctttttctccatgactgcatgtttccttccacagtcagtcccatatttggggcccttctctaaggc

SEQ ID NO: 29214 - DNA, 1110 bp, Bovine  19866881527022
  misc_feature (1)..(1): n is a, c, g, or t
ntcaaaatgtcttcaaagagaaaggtgagaaaagtccaaacctttccaagagtttgaccaaatttatcttttatggattctgtagatttaatttggttgctttggacaaaaatgatttggtccttttgttaagttaataatatcaaaacaacgagaaagcacagttttgtgttcccaacaaattcaaatcaaaatcatctgaagtgggataaactttgatgcattcatcattgtgctaggaacatggtagaatcctgggcatgatgttttcaactagaaacatctgaaaaaagaaatttaccagtatcctacctgtggttgtattatgttgactgctccatgggctataactttctccttcctatctgttatttctcaaattttattcagcatgctagtatttcttccataatgaaaaactaaagcataattgacttgaaaacgttacatctgtctgtgtaactatatgatatttttaagccaattaccttatttgtcacattctgtgtattttatataattattttacagctataggtagaaactatatattgtgatgtcatccacaatttatctagggtgtcaggaatgtttaattggagaaggattgtaagaggagaaagaaatgattgtgaaagcaacgtcatgagaaaggacgtggggaaaagagaacttttgaacaggacaagagttcagtctgtcatgccactaacgtggtgagtgcacgtatattaattaaaacaaggctagaaagactagacagataactgaaaatcataagtgctacgttaagggggttggacttgatttggcagcagtgggatgccatgaatggtggcatgagtaatggtgtgaaggcctacagcagagagactaaaaagcttaggagacaggttacgaagctatataatagttcttgagagaagtattttaggtcctgaggaaaatggcaaagggatggagaaaaatagcattgcctatgtggaatgggcaggacttatgggtagactgcacgtgatggagaaaggaaagtacaaagccatgaccgttacaaagttctccgtttggaggactgtaagagcagcagctctataattcagtggtgctgtt

SEQ ID NO: 29215 - DNA, 1285 bp, Bovine  19866881800536
  misc_feature (1)..(1): n is a, c, g, or t
nttactggaagacacccccaacatctgctcttttctattgggcctgccttcagggaattcatacttggtcacttgctgtctgattttagccttgaggaaactgaagctgaaaaccttcctccctatcctagtgaactctgaagaacactatcctcgtgcaaagggcaaatggctttctaaccgtcagacagcagattcaggagggagccggggtccagccctatgcttggccaaagaaccaccgtatcccctggcagacttctttgggatggaagtgggccctaaattgataaatgactgtctccatcccaggctcggctctagcccccagagtaatgcccaagactggtaaattaactcggatcagctagcctaaaatgtggctgacgcctgcaaataaaagcagattttttttctctttctcattacctaagacaaaatggatcattaaacaacagcagtcctgaggagatcattaagtctggttctgacccctcatgcatcttccacactaccgcaactggctgtccctctaatgaagagaaaagcagtgcaaactgcccgcaggtatcacagtgcttgcagatcacatccgtgcaccaaccccagccaggagagccacctgagaaacgaagtggaggaaaactggactcctggaactggaactggactcctgggattggtgggtgtggagcacaagcacaagaatgactttttaaaattctcccatggctcacgcagggaattcagtcatctgatacgtgtgccctttgaacgtgtcacacacacatgtcatataaggatgcttctcctcacccatcgctcttaaaggcttagttgagaaatgcacattcctaatgacataatcgtccctggctttcaggtgatcaagtgagcaatgtctgtccttggcctggatgtcccacctgtgctcgaccatctgtgcctccggaaagcttggggacccgacctccacacattgctctggtcactcactggcctcactttccagggatctgagttcctctgtcaggcacaacatcaaggtgggtgaacacacacaccccacccaaggtggagggcaggggcagggagcagccacctgatgggcagtaaggcagccccaagacatgaagcagggtgaccaaggcagagggagacacagacaagggaacacgggaggacagtgtctggcctcattgtttctgaaaggccaaaatcagaaggaccatgtaaattctaacttatccaacttgatgacatccttgacagctgatccagagaa

SEQ ID NO: 29216 - DNA, 714 bp, Bovine  19866881952119
  misc_feature (1)..(1): n is a, c, g, or t
nactgggcagaccctaggataatgcgatttagtggaaagagcactggccatggagtcacaagacctgggttcatattccaacttagccgcatgtctgaatctcttaagagttttcttactggtaatacagaaataactatacctatctaacaggttgtttgtgaggaatatgcagaagtatttgataagataagatatgcagaagtatttgatacacggacactctgtgtagagactcactgagtctatttccgctatcaagcgtgcacccactttgtgaagaccactggtatttcagacaattcttgtttaggtgagtagttctctttgctgatagaggagaggctcagattcttctttgacttaggttttttttctgtgttaaaaagaatcagttaatgatctcagaggacacttgcatgaacttattttttcaattctaaatagatggtctgtgcagttaagtctcaaatagagttcttcggggtggcattattattaaataatgtggcattctccactataaaaaccatcttgactgttggaagaattgtcaaaaccatatttggtaaaccaggaatgaaatgcatctttattaagttattcaacaatttcaaagtttgcatttggaaccattcagagagctctttttaagctattaaaaattaatttcacacgaggcaaggaagacatgtctagacaaatgttctttaa

SEQ ID NO: 29217 - DNA, 1145 bp, Bovine  19866882055046
  misc_feature (1)..(1): n is a, c, g, or t
ncgcttgtacagctaatcgggcaaccgcgtggagcatcccttctactgccaccttacttatcttttcagcatcataacttccaagttgctggtcttcaaagaattctctgacacttggatttgtttctcttcctttaccatctttgtcaagtactaggtgactctgaaataaaagatttcctgtcccaggggaattattacccccaaaagattccgtgtggttttgcaatgttaatattcaatacataatgtttctgctttgtgaaaatttttaaaactgggatattcttaaatggtctcccacaaggaggactctagagcttaaaatcctgcttttctattactaactttggggcctagcaaacctcactagctgtgaggccttcccaagcctcagtttcctcctttgtacaatcaggagaataataaccacttcattgggttcatgtggcacctgatatgaccagaaactcaataaatcaaagctgctactatctttatgaggcagccttatttaacaactcaggttcttgggttcctgggggtgaagcctggccataaactgagaccatggggtcttttggcatggaccttgtctggtggctcagatggtaaagaatctgcctgcaatacaagaggctcaggtttgatccctgggtcaggaagatcccctggagaagggaatggcaacccactccagtattcttgcctggagaattccatggacagaggagcttgatgggctacagtccatagggtcacaaaatgtcagacaggactgagtgactgagcgcacacatgtgtgtgcacgtgcgcatgcgcacacacacacacacacagtgtgacactaaatcttgtcttttgggccagcctctgctcatctcctttgtgcatcccaggagcttaaagatatctgttgagtaaatcttcactggctgattcttttaagggccacacaaaacctgtgtcccaatgcaggttcctgatagttcatctttgccttcctttgagtgatccctcacattctgactagttgggattaacaagttatcttcaaaccaaaactgttggcagaacaaacctctcagactgaagcccctttcttcaaaggtttcatggctgtttctccaaaccagtctccaatg

SEQ ID NO: 29218 - DNA, 970 bp, Bovine  19866880356652
  misc_feature (1)..(1): n is a, c, g, or t
ncttgtgataacccagaagaagaaaactaaacatgaacagtgagtgatcaggtgcgtgcaaaactgaacacagcactgataatgaatccaaggcgtttataccacgtttagctaaagcctctttcctttgatcacagtatcaaagagctgtcttaagttattgagggtaaagaccaattttgtcttctctggtgatagccatcattgagggttaacaactactgtatcttttcaatcttttaatatctgaacactgaacaggaatgttggataccgaaagcaatgatgacttaaattagagattccaatgcaacactctccagcagtagttttccacagctaactagcttgacgatattttatcatgtcgtggggtgggaatacaacctcagcagaatgtcagggtgcctccattttcacatttactatttcctatactaaattaatttggatctatctaataaattatacctatttttctggtaaagaatcggagttacaaattcctaataaacaatgtggagcctaatgattactttccgccacaaacactgccaggacagaagataagttttgagctcagtgtagccccactgccactctgacgcagctaacctttctgacatcacttccggagcactcacatgctacgtctatttcctgaaacccatttacctggctgatccacaaataatgaagccaatggcgtggttttctgattttttattactatggttgaccaaggactgttgccatctgagagaggtcttattctacaagagaaaaacgtttattttgatatgatagaaccacatgaaacacaaactagcttttagtaaatgcacactaacaagatttttaggtagtaaagagaacacatttggattctgtgtggagaacacattctgtgttttaaagagctaacaaagcacaaataaaaccttaacatgagctgtaaaaaatttttaaa

SEQ ID NO: 29219 - DNA, 1793 bp, Bovine  19866880517845
  misc_feature (1)..(1): n is a, c, g, or t
ntttagaatcatctaaaaagtttctgtcggggggaagggataaattagcagtttgggagtaatactatatacataaaataaataatcaacaaggacctactgtatagcacagggaaatctactcaatattttataataacctatatgggaaaagaatctggaaaaaaatatatatataataactgaatcactttgctgtacacctaaaactaacacaccattgtaaatcaactatacttcaattttttaaaaatctccaaagaagtctctgtttcactaacttaaggctagagactttccccatattaataaatataatgttaaaatgctaagcttcaggagatatttccgcctctacaatagcaatggaaatggaaatattccaaccctgtagtaattacactctgaactacaatagagctgtatttgcacatctggtcttgattttcctgctctctggttaatctttggtcaactagtttggttcagagctataacacagatgtttgttgttgttgttatttagtcactaagtcgtgttcaactctcttgcaattccatggactttggccctccaagttcctctgtccaagggattctccaggcaaaagtatcagagtgggttgccacttcctcctccaagggatcgtgctgacccacccagggatcgaacccacatctcctgtgtctcctgcattggtaggctgattctttaccactgagccacctaggaagccccatggcatagatatacaaatttaaactagatcaagcttacaccaacagcagaaatagtgattaatggaaagtacaaaacgagaagccacagggggaaataaagatgaaccaggggccagagtggtgcattttcttatcgacagagttgggtttcaaactcacagtgaccacattgtactatattgcactctccaggttttcactcaccccagcttctgtaagcaacaaataactgagacacattttcccactgatgtagaaagaagtccttgaaattcttcatcttcctcacatctcgaaacttacaggctaccactctgagggagagggcctctctttttctgccagtccttccttgttttatgggcttacttgggggccatgggaacaagtcacccagaggggcagcctggagatgaaagccacagtcacatgtgcaagacgtgggatctttaaataaagaagcactgttttggaaactctaacctgttatttagaatttgaacagggattcttgctttaaagcctgcaaacaactcttcttttatatgacagcaaaattcgtctttgcatttgagaaaaagagcaccagcctgggagccggtcagggcctccagcatgggatgagactgccaccgtgtggtagctggggcagtgatcatggagacagacccactgagtcacatggcctcttccccagggttcagagaaagtgcctgggaaaacagaagtctttctagggtcaacctcacaaaccctccattgttaggactctgcacctgcatgaaattttcatctatctagtggtaggctgcagtccatggggttgctaagagtcagacacgactgagcaacttcactttcatttttcgctttcatgcattggagaaggaaatggcaacccactccagtgttcttgcccggagaatcccagggaggggggagcctggtgggctgccgtcaatggggtcgcacagagtcggacataactgaagcgacttagcagcagcagcagcagcagctgtgtgtctaagaaaacaaaataaggactacag

SEQ ID NO: 29220 - DNA, 1516 bp, Bovine  19866880533141
  misc_feature (1)..(1): n is a, c, g, or t
ntttgccctccctcaaagacttttcttcccactaaatttatacattttagtttgtgtttcctgagttgtggtccaggaacttcctgtatcagaatccttagaggagcttattaaataagcagattcctgaggtcagcacataccttgaaaaccacattaaagggggaatcctgaaatctccatcttcacaagcctccctgggattctcatccactgatgtgtgtgaagcgcagtcttggctggcatccactgtgggtgctgtgagcttgttttaatggccacatggagctttcttccctggaggttacatgagacttctcaagacaattcttaaggaacccctgggatctcaactttgagtacagtggtagaaatttatttgggatatttgttatcctgtggtagctcagatggtaaagaatctgcctgcagtgaggaagacctggatttgatccctgggtcaggaagatgccctggagaagggaatggctacccacttcagtattcttgcctggagaatcccatggacagaggagcctggtgggctacagtccatggggcccccaaaagtcagactactgagcatctaatacacacatttgtaaagtgataatgtgttctatatatatttttaaatgctgtccttctgactcatttgttttttaaaaaaattaatcatacccaaagctgtcctcaaaacgcacattctccatattcctattcttagacctgcattgatatttgtaaagtgtttcatgcttatttggcagaacaagctcaggaaaaatgatcgcaaaagtgtgagcttgtataccacccctttataataacattcattttctacagtggcagtcattttagtttttctaaacagtcctttaaaacaaagacagtgagataaaagagtgaggggatttttatttatttctggtgcatgtcttgggtatcctgtctagaatttaaagcctgtttattaaatgaaaaagatgagatggatataaatttgcagctgaggagttggactaagaatttaaaacttgaagtagtgttttccaattttatcctaaatttggtctcacagagatctgtagcatttcttgtggcttcttctgccttgttcaatgaatttagtaatactaattactccttgcagttctgtagctgaattacacctgttctgggagccataagtttcaattacctgacctttatgtgtgctgaggggtcacacacaggcatgtggtacctggcacttgataattcctctgaatacaaatgcatctatctcagatggagcacggcgggcactacatctaagtatgtttgtgatgggcttccctggtggctcacaggtaaagaatccacctgccagtgtaggaaacacgggtttgatccccagctggagaagatcccctggagaaggaaatggcaacccactctagtattcttgcctggaaaatcccatggacagaggggcctggtgggctacagtcccatggggtcgcaaagagccgga

SEQ ID NO: 29221 - DNA, 2165 bp, Bovine  19866880614597
  misc_feature (1)..(1): n is a, c, g, or t
nctgcaatcctggtgactgtgacatcctttccttactgatacagcaggaaatattccatttcccaaacctgtaagggaaaagaatctgaaaaaaagaataaataggcatatgtataaccaaaatcaacttgctgtatacctgaaactaacacaacattgtaaatcaactatgggttcagttttttaaaaaatgaggtctccattatgggtgaagagtgtatgtggagtttaggaagcatgttgctacttactgactgcctctagaagtgacagccatagaatttcacatctggggtccatcagtcactgctgtctacaaagcaggggtctgcagtccatgaatctggccctcttcatcctttccagcacatttatattctggatctccagcccaaaccactgggcacttttcccctcgtgttcatccttaggccacataaggtctcttctccccaacccctgcttctccccagaactcagctttctcctgtgctggcttgtctagcaaattaatgcagcagctcccatagcccatcttggctctctaaagcactttgtaacttgcaattcaatcctgtggagcagttttctccgggaagagtgactgaagaggtaggctgaattccatacacaaaaaacttgagcagtgtccatcatgatggggttttgtataaatctttccctgaaagacccaagtatggaggaggaaagaccaagctctgagtattcctttaagaaacacagagatataccatatcattaacttggtgaaattaaccacacaaggtttcctctgatcatcttgttgctgtttgaaagtccccttgaacagctgtcttgcatatgagacaaaggaagtgctgagaaaaatgtacacaacttgagagttgcaagttaagttttatttggggcaaaatgagaactgtagcccaggagacagcatttcagatagctctgtgaaactactctaagggggcgaggcaaggagctaggatatataggagttttgcaacaaagggcaggtagtagaaacatcaaaatatggttgttaattaaagaaaccaggtaggtcaggttaaggaatttagtgcttttctgtgtatgggaagatgcatgagtctgggcttattgaaatcattcctttgctgtgaaggcaatggcacccgactccagtactcctgcctggaaaatcccatggatggaggagcctgatgggctgcagtccatggagtcgctaagagtcggacacaactgagtgacttcactttcacttttcactttcatgcattggagaaggaaatggcaacccactccagtgttcttgcctggagaatcccagggatgggggagcctggtgggcctgccgtctatggggttgcacagagtcggacatgactgaagcgacttagcagcagcagcacctcagctatctggggccagtattctatgttttcacatcctgatgttcctcaggactcaccacagggagtggctacagtctactggccgctagatgacaggcattctttcctttcttgagtttcctcagagctcaccattggactctgatgactgtgacatcctttctttactgatacgtgaggaaatagtttcatttctcaaagtattccatttcccagaaggtaacagtaggaggagtaatgatcgtcgcactgtggctttgtacctttaacacaggctctctcaccaactgacatggctgccactgtggttgtcgtcactgatgcttctctgtctttcgctttcagctcggggacctgcttcacaagctgcagttcgtcctgacctatgtggctccttggcagatggcttggggttcctcctttcacgtgttcgctcagctctttgcaatccctcgtatcctttctgctttggttttcaccccctggctcagattcacatttcacggatgtgagcttttcattgaaccttggcaataaaaaggttttaaagtctttaagattacattttaatggggacctggggaggcactgtggcttccttttaggcacttagcctcaagagatatttcttaatttgggaagtcttcctgtttcttaatgcatattcaggagtggcttaatttcttctgatttttccattttccacgaccacatctgcattaagatatcatgtcttttaaa

SEQ ID NO: 29222 - DNA, 1706 bp, Bovine  19866880633145
  misc_feature (1)..(1): n is a, c, g, or t
ntgcagagagtaagtggagttcacacgtttcccctgacctctgcaaccctgctggccttagaaaaccccttcaatggaaggaaggagggagagaaggagggaaggagaaaggaaatgaggaagaggccaggggaagctgaaagcagacatgcaaaagaaagacgtgcttaatcatggccacttttcatcactgttttgaggtttaaaatgagatgatgcatctgaagcacttagcacttggcctggcgcatgggatgtgtgcaaaaatcacatcctcatcatatctttggcatctctgacttacctacccagcaagcttcaggctcaggttggggagcagagcccaggagaggtttggagcaggggatcaggaggtaggagacagccaagcctcccatggtcaccagagtacacatctgatattcaaatacatgaatcaagaatctggagggtttcctattgcccaccagctggcaggaccacttaaagctgctaagtgttccatccaaagttgcaagccaaaaaggaaacggactgtaaccaaaggcatggcttctcagctgacaattatgaagggaagagagaaatttggtctgtctaaacatctggcacgagcaaacatctggtctagttttccctcaatatgtactaatcatgtgtaccagagagaaataacaaacaaaaaaaatggaaagcggaacattaaccttttcattcatttctagggaggaaagaaaataaccccttcacccatgaggtcagagtagttaatgaggactttgaatcccagggattcaaactcgtttctctagttctggcaaaatcttacagtgttggcttctgagtgggcttcccagcactgggctttcccatgtgggaggggagacagtaccatgtcctttccctgtgggaaaacagaactacttgaactggctgcaaactgtactccggctccctttatttaggcagagatgctgtcaatgaacagtgtgaaatccttcagaatctattgggatgaaatggatcccataataggcaaagctaagtcaggatggtgacatgaattgatggcgtacaaactgatccaaattgaaagcaaggacttcctctgaattagggcttccttcgtggttcagatggtaaagaatctgcctgcaatgcaggagacccaggttccatccttggctcaggaagatcccatggagaagggaatgactacccacaccagtattcttgctaggagaattccacggacagaggagcctggcgggctgtagtccctggggtcacaaagagtcggtcacgactgagtgactaacacacacacacacacctctgaattaatttgcgatatctggttcctccagcagggaccctcctggtttctcattttaattgtagatcagcatattctctcagacagttcatcccaggaagagaacctggcaggcagtccaacatgctggggtgttgggctgatgttggccttatcatctgcagggcaggtgataagcacatctcctttctaagagttgggcagaaacaatggtggccgagaaaccaggccctcattttccagcagaaatctcatttcttgctggtcaagagggtttgaaacactaatgaatggaagagagatggaggaggcacctgggaaaacctccagtcatcaggaaggaaagatttcaaataattcatagaggggg

SEQ ID NO: 29223 - DNA, 3158 bp, Bovine  19866880636935
  misc_feature (1)..(1): n is a, c, g, or t
ntgttgggaaaaaagttcgtttaggggggcttctttgttggcttagtggtaaagaattcgccaatgtaggagactcaggtttgatccctggtctgagaagatcccacatatggaagagtaactaagcccatgcacctatgctctagagcccagtaactgcaactcctgagcccatgcactgcaattactgaagcctgcaagccctagagcccatcctccacagcaagagaagccgccccaatgagaagcccttgtataccacaactagagaaagcccatatagcaacaaagacccagtacagccaaaaattaaataaatatatataataaattattttaaacaaaaacgttcattcaggtttttcctgaatgaaaacccaaatgaacttgttggccagccatatatttcttctcatgtccccctaggcgggaggctggtggcagccgggaaggacggctcccataccttgatcactttgaagctcaggaagcttctgtggagcatgaggaccttgtactcatccgtgccctcatctaccacgtgcctcagggtcagcagctcctccttgttggccagcacggcgcccctccaggccgggtcaccctcatggcagatgaccactttcttctcaaaggactggatggcctcgtagaggactgctgggtcttcgtactcgtcggggcaagtgaactggtcctggggaaagaatttatctgtgggtcgggaggaccacagagctggtcctggcttgctgtgcacacagcaatgaggccaatgcctggtgcaaggtcaagtctacttccacatcgctcagccccgctgggtggatggaaggcacctcactatcacagtggcctcggggcccatagagctggtggcatagaagcctaggacttttcaccacagcgtggacacttctgatgtcattttctccggccaagtcccctcttccatgctagtgggagatcaccacctcctagggactcttgagggcacatcaccatgggtaccatcaaaaataggcaatgcctcaatgcttagttgctgggcctcccagatggcgctagtggtaaagaacctgactgccagtgcaggagacaagagatgcgggtttgatctctgggttgggaagatactctggagtaagaaatggcaaccactccagtattcttgcctgaaaaattccatggacagagaagcctggtgggctacagtctatggagccacaaagagttggacatacagagtgaacacacacacacatatattcaaggtcatgagtgtgaagtttcatgagcatgagtgtcttgttttaaatagtaagcaatttttattactcttttccccctcttatttatttattttaaattatttatttatttttggctgcggtaagcgggtcttcgttgctgtgtgagggctttctctacgtgcggtgagtgcaggctactctctggttgcagagcatgggcttctcatggcagtggctcctcttgtggagcgtgggcccggctaccccacgcatgtggaatcttcccaaaccagggactgaagcctcggctcctgcactggcaggtggattcttaaccactggacccaccaagggaagcctgagcatgagttttaaggttgccgttgaaggaataagcaccatctccaggcaaaaggagagatgagggttttaagagttactgtcaaaccaggctaacagggaggaggagggtgtgttgagggccagaagatttaagatgactactgaggcagcaaaatcagtgcttgcagctcagaagtgaagacaacaaagctctccagagccctttcgctgcaacagaattccctgatgagccacaagagtggcatctgccttgcaggagccccacagacctgtttcttacaccaccccacctgatcaaccttcctggatgtggggagacagccttgctccctggttcgcaccatcctcatcttcagccaggcacccctcctccaggtagaccacaagatgtggtgaacgtgctgagaccacaagaccttgagaagctggatctgagcctcccagcctcttctctccttctcaggcagcctcatttggtctgtgactactttctgtgactccctcctgactcccgaacaacaagaaggaaagcagacctcaggggaaatgacaggtgacaaatgtttagggagcatttccaactgtgtttttcgaagcttcaaggttctacttcacaagtgagggaagctacttcatcttggaggagtggggttgactctgagccttccccctaccactgcagccagtacagatctgattttacctcatttcatttaaggtttcatgcctttggttggttggttggttggtttgaaaaatataaaaaggtctgaagccaaagaaaaacagtgtgtctgtatcaacaacatgaccagaccagggacttccctggtggtgcagtggataggaatctgcctgccaatgcagggactccggttcaagccctgacttgggaagatcccacatgcctcggagccactaagcctgtgggccccaagaactgaacccacactctaaaggccctgagctggaactactgaagctcacgcgcctagaaccggtactctgcaacaagaaaagcctgagcaccgcaacttgagagtagaaccccctcgctgcaactagagaaagcctgcatacagcagcgaagagccagtgtagccaaaatataaattaaaaacaaaaaacaacaggccctaaatggaatacttatgccaagcccaatgtcaccaaaacaagtcttgaaatcaaaaactggttgatcagaaattgtcaccttgatgctgagcagggccctgtggggctcctgggcacaaagcctgtgtcccccatttctttgattataggaaacagctttcattcagcctctgtgaccttccctgagttctaaagggcagattcaaacagttgttaatcaagagaggagcagccaagaaaccacctgtggcaagtttaaagcgaccagagatgattagacctgaccacctgagactctgagctgtgcttagttgctcagtcgtgtccgactctctgtggccccatgactgtagtccgccaggctcctccgttcatgggattctccaggcaagaatactggatggg

SEQ ID NO: 29224 - DNA, 1169 bp, Bovine  19866880683652
  misc_feature (1)..(1): n is a, c, g, or t
nagatcgaaccctgatctcctgcttggcaggcggattctttaccactgagcccctgggaagcccattgtaaaggtaactatttgctgtttggagcccaacatcataccagtcagaatataatgagatcatttaagaaaccagatatatatgccatcaggatgaagctatcaggttcctaaatgccagccctggatcttgactaattttgaaatgttaatgattctatcactctattaggaagctgtgggttccatcctggcattgagaagggactaatttgctccattttgaaactgaattaactttcaggccagcaggtcactgtttagtaaattgctttttccagtcctagcatgttttgtccctcagtcacctctgttagcttatgagcttgtaacctccagggaaggatgagaatgctcacccttttaatatgtgtagagaccatgcaagaccattatcttcaaataattagagttagccagatttgctctattaaatgtgtgtattggaaagactgctttctgtttggcatgtcattttgagcttccaattacgtttttaagtattaatgttgaacattttcattttaaatgcctgaacctttttaaggagtctccatccttagcaactgaacagcaacaaccatctaccccttaggcccgcctcttggctctcaacaaagaaggctgcatgtttctcagcactgccttggttgttatagtcacggtcctctgtatttatatatatatatatatgtatatatatatatatatatttactgatatatattaaaatacatatatatatttataaatatatatatatatatatttactgatggtccctaaataaaataacctatgaggccttctgttcactgctgccctacttctgacctactacacttcattttctttcctaccaaatttggacttcataagctagcaatattttccttatttcttaatgtctggataactgtttctggtgtttaaaaaatggatagcatcctctttggggacatgtttagaagcgaaaagaatggcagtgccagcccacccagcctgcggcctggcctggcttccgcttactttgtcctggttcttctaaccccacagggccccctgaacctgccagagtggatgtccctctcttctctccttcc

SEQ ID NO: 29225 - DNA, 1226 bp, Bovine  19866880733007
  misc_feature (1)..(1): n is a, c, g, or t
naatataatacattaaattgccattattcttatcaggtaacgtttttactaattctcacatatgggattatttttccatcattggtcatttttcatttaaaccagcttgatggggagcatccatctacttaattgtgtttacagacagacagacaaacacagtaactgagacatgaaagagcattataaaccctatggagtggtgatgatggcagaatgctttcaaagtgacaagaaaaaaagagcatgacttcctatgttcacataatgcattcatttcattaatcagccaattgaatcataaactctgaaagagcaaccatatgtgaagtctgggacagttcttagccttcaataaacaaggactaaagtcagtcttggacgtctgctcagagtattgtgaatgataaattttgcctgccatatcagcagacaaaagatgctgcagccatcatgccgtgcgctagagccacccaatggtgtaccctgcggctttccgtggcccagtggtagacaatctgtctgccaatgcaggagatgcaggtttgatccctgggtcaggaagatcccctggagaagggaatggtgacccactccagtattcttgcctggaaaatcccatggacagaggaacctgatgggccacagtccatggaattgcaaaagagttggacatggcttagcaagtaaacaacaaaaaacagtggttccctccgaggggactcagcatgggagaacacaggatgctggctccagagagctgacgtgagtgtcacaggaatcacttcaatgagcccagactcttgcatctgcccatacatagaaaagtgctaaattccttgagatgtctgattttctctaattaacagtaatcatttgatgctctgggactacctggcctatgttgcaaaactatataccttgattcctcccttacctcttctgagcagttcctcagagcttttgagaggctgtctccggggcttgcaggcttcagcaagtccttggaataaaacataatcctcaacttttcggctgtgctttcttttcagttgacagttacaaaattaaagagtcttccgcctgtgccccccatgactgcaatgttaaggaatgagtttgaacctagagttccaaatgcaaaagtcccccaggacccagagtggccatcccttagccaactgtgtcactgatggggacagtgtggccagtagcatcacagagaa

SEQ ID NO: 29226 - DNA, 808 bp, Bovine  19866880832929
  misc_feature (1)..(1): n is a, c, g, or t
naaaaaagaaaattagtctggtgctagttgttaatctaagcattttgagatctaggaagttccacaaagagattgttaccagagccaaagatcccagaatttcaagcaacacaaatggctaattcatgctaattagtgatttttggcaaataacatgacagacatccatttcatggggaatgctcctcaaatgacagcgggagtgtgacatgcatatgtaattcaatttaatttaatgctataattgttttaaagacaatgtttcgacctcttaaagcatttggtgagagatgcaccttttctattttgaaatgaagaaaagagcttaacttgccttgctgaataaaatggacaccatgaagaaatccagtaagaaactctctgaaatatctttgtagtcgaaatggaaaaagatcactgtgaagcccaagtgagtaaactgatggactgggttacagaaagaggtccgcagcagcttcatgcctgcaatgaccatcagaaaaatgtcccagctgttgaaaaggaaagaaaggagatgatcagtggcggtccacacgctgctgggtgagttacaacggctcacgtgtcttgagtgcttactgtgagttatgcacattacaaaaagccaagacggtaggttattatcttcattttacagaggagtaaactgagtctcagagtttcagtcactcatctcatggggtgagactggatcccaagggactcgccaacacagactctgccactagaggcagcttccccactgcgctcagaactttgcgatcaagggcacagagcttcctgggag

SEQ ID NO: 29227 - DNA, 1895 bp, Bovine  19866881108946
  misc_feature (1)..(1): n is a, c, g, or t
ngtttgccttggaaatgaaccagatattctgtctttttgagatcgcacccaagtactgcattttggactcttctgttgactacgagggctactccatttcttttaaaggcagcttccttggtggctcagacagtaaagaatccacctgccatgtgggagacctgggttctatccctgggttgcaaagatcccttggagaaggaaatggcaacccactccaatattcttgcctggagaattccatggacagaggagcttggtgggctatatagtccatggggtcacaaagagtcagacatgactgagtgactaacacacacatatatatatatgcccacagtagtagagataatggttatgtgaatcaaattcaccctgtcctgtgcattttagctcactgattcctaaaatgtcaatggccactcttgccatctcctgcttgaccatgtccaattgaccttgattcatggacctcacattcaggttcctatgcacaagagaagaatgtaatctgttgaacaattagacgcctcagacaaccaagataaactgagtcatccaaatgctaaagtgttacaaaaatagcctttaaaaagtaagtactgccactgaaacacagcaacacgccccaaacttgggggtttggggggactgctgacagtcagtcatcactaggaactcacttcccaacttgtctgccttcctattaggtgtgtttctgcttcacctgctttacactctgtatgtagttaatacatgcacagcttcagcatgcttaacactcaggtttattacttttcttttcttaaaaatgcacacacctagagcttcactcatcatattaaaaagttcaaaagtttttatgcaattttccagtttcttcaacaaagtaatgctttaaagacaaaaggaggggaaagacgggggaactagcataaaagaagttttaaagaatctaacggaaaacatgcagcccaagttgaaattctgatttgcaccaatcaactgtaaggagacatctttcagataaactctctgacatcttgagtgacatctcaatatggaatcttacatggtatcaaggaactactgttatttttaaagataataatggcaagaaaaatactttttaaattcctacccatcagagatgcattctgaaatatttaaagctaaaatgacaagagtttaagttttaacttaaaatattgcagtttaaaaaaaaaaaaagatgataagaaaaagaaatgaacaaagtgactatctattgacaattattgaagctggttaatgcacacaaagggtttagtatgtcattctttctcctctttaaagtttttttttttaatatttgaaaattcctttaataaaattcctttaataacctttagtaaaaggctatttcttttccagttatacattttgagtacagttctgttttaactagaaggaaagtatcaacaaatattgatgtgtgaaaatatttttaaataatggtttagtggtttagtctagtggttcttgactcgtgttctccataatcttcatgagtgtgaacacattatgcagttaatatttaccactgaccttttcctttgttctcaactcatcaaacatttgctgaatttccagtttccagtcatcttgcatggaatgaaaggactcttgaggcatttcagtcataactgccttttcaatttcagtcagttgttcaagaattgaagcaaaagatggtcgaatgtgagggtcttgttgccagcattctaaaataaataagaatcatggtaagtccatttatccacatagttcagattgtcagccctgtgttgacagggtctgttcaagattttaaacatcagtcgataatgattttgaaaattttattttacaccatg

SEQ ID NO: 29228 - DNA, 2567 bp, Bovine  19866881128788
  misc_feature (1)..(1): n is a, c, g, or t
ncgctggccgagccggcaaggcccgccccccctgcaccacgctgagagagcgctcgggcggagcccctgtgctcacaggtgactttccttcaccagcattagaatcttattgtcagggatctctgaccttctgtggtccccttccccaaattctccacctccagcctttctagatgatccttcgctcactaagaatattggatattgtaattctgtaaaatcttaggggaaaattcaaatatttagctctagtaagagcttccctgatagttggtaagggatagctcagttggtaaggaatctgcctgcaacgcaggagaccccagctcgattcctgggtcaggaacatccactgaagaaggttgactacccactccagtattcttgggcttccctggtggcccagctggttaagaatctgcctgcaatgcaggagacctgggttcaatccctaggttgggaagatcccctggagaagggaaaggctacccactccagtattctggcctggagaattccatggactatatagtccatgggtcgcaaagagttggatatgacttgagcaactttcacttcacttcagtaagagcttgttttaactgcactcaaagaagaaagcagttttgtaagatattaaaccacagaaagttgtagaacctcccgcagccctcaccccacagcattttccccaggaaaatagtgtcaggtcgtcttcacttgaaacgggacaatgaggcatccagcgctgagacaggggcctggtgttggagcttagccgttgcctgcacacaccaagactgcaccctccatgataaccacgaagaaacaggacaggcgccttcatctgaattaagtagccaaggcccagcaaatctgctttgcatatttatgcataataaggagctgcccagggccaacaacttgagtaacaaatcgtcacagtagagagggctacaggggtatttttggctgcaggcagatggaactggattcaccagatcataatgatgcaaagaactggctcattagaaaagaccctgatgctgggaaagattgaaggcaggagagggggacgacagaggatgagatggttgaatggcatcacccactcagtggacatacgtttgagcaaactctgggagaaggtgaaggacagggaagcctggagcgctgcagtccatggggttgcaaagagttgggcatgacttagcaactaaacaaatgtgatcaaaggcaccaagaacccccacgccagcagttttcaaagtaactcagtaacacataactctcatgcagatcaacagagtgaagcagctatgtacgtatcttgaatatctatcactggagttaacattttcaactcattcctgaagggaacacaaaactaggcatatctaatattgagagaatttacaacattttacattttgcccacctaattgactaatttgccccacattctggctgagctaatgcaaaccagggatcactacttctgactaatgtaaagaagagaatcctaaagaggtgtcttgttttgtttttttttacaactttctgcctgcttaccttctttgggatccaggtacttaagcacgatggctttgaaaggttttcctgagagttgatcctagtaagtaagggaggctttactgagaccagggtcagagaggttaataataataatgttcaacaaaaaagtaagaactctgagaagacaataaagattaagtgcacttcaatccatctttggaatgtagtacctaatgggtttagaggtttagagtagctttcaaaagcaagcctaatgtataagcataacaatatctgtttcaatatgcactattgcatacatgtgagttgctcagtcatattcgagtcttttcgaccccatggactgcagccctccaggcttctctgtccatgggattctccaggcaagaatactgcagtgggttgccatttccttctccaaatatgtagtacaatgattcataaataaacagaagctcaaaacaagtgaatccagataaatataaatagatgattactaatgtaatctactctacgtttttttttaatagaaacaagttgagatacaaaaatccctgataaagatcctataaactgatttgctccagatgagtttaccattcagtagaccaaggctactttatgagtaatagattctcaaaatgaatgtaaacactatgtctttccataagatttcactggggagcagatgataggcattttgtgcacacttttaaacattttgtatgcatttacatgagattgcttttgacactagaaaaggttttataatactaaagcatggttgtgcatcatttacagaagaaagctgttctatgttgcttgcaagaattcacagatgaaagaaaggtaaatctttgctgaacaaagaacagaaactatcaagttttcattgcaagacatacagaggaaataataaaagtctgctttgcagtgaaccctttggacacaaaacacacttcaacttttatgcagcttcaccttcaacttcctaggcagagagactattt

SEQ ID NO: 29229 - DNA, 1780 bp, Bovine  19866881163067
  misc_feature (1)..(1): n is a, c, g, or t
ntcctgatcaagagaaaatatatcctcaaataagatatccacttgtcctaagttgcacatactgttgccaggcagcatcccaagtccttaacaaagatgaagtcatttcatcctcaaatgaccatgtgggaggtcccagtatcagcccccatgataggtatcagctgggattgaaaccccaggcaatgtgccctcaggcccatactcttaaatactgtgttgtgttgacatctgacaaagtgtcagcatgtcctttttctggtgggagggttattaggttattaaattattgaatttttactgtatggctcagggaactctggtcaatgttatgaagcaggctgaatgggagggaagtttgagggagaatggatacatgtgtatgtatgactgagtccctttgcagtccacctggaactatcacgacattgtgaactggctatactccaatgcaaaataaaaagtttaataataaaaaaatttactgagtcgtggaggaatcaatcactggaatataaagaactgtcattctggagatctggcttcagtgattaagaatagcagagtctgtttgatgagcggcatactgaaaatcttttacaaagcttgtattttattcttcagagtggttgtgaaaaaagagtaaaaaaacaaagcagagacataggaaaagaacaaagatacctggggtcttggctgcaattagagcatgagagtgcatgtgcctgattactggttttgcttatgtataaatacaggttgctgtgctatgcaaaaaataattgtgatagattcatttaatcataatgcagcaaagtttaacttgttaacgctttaaacttgcagatgaggctttccctggggctgcctgtctgattgtagttgcaatgcctgacctacttatcagcttttccaggaggtggcttaaaagcctcccaggatatagtcatacactgaaaacccaacaggaataactttttaaaacccatgattcattttcatggcatttgggggttcatacatcacataaggtaatcgtgctcatgcttgcagttttcacctaggcatgagtcacaggactaaatcttaataaccagactaaaaattcttaacagtgttgtgacgagaatgtttcaaatccagaggcattttgcttgatagagtggggagggcataaagaagcaagttaatacaagagagtccgtccccacttctcaggatttttgcttttgatgtactctagagtcatttgtttgaatgtctcctgttttgtaattagcgtactcttcctctggttgaattaatggtggggatgcatggatatgataatgaccttcaaagggaatcatatcttttaagagaagtgagtcaagagtttgagtctgtgtttgacctgtctgtccacatcatctttaactggtgggaagtcaggtgggcagaggactaattaaaaaaattttattttattttggagtatagttgatcaacaatgttgtacgtatacatatattcattctttttcatattcatttcccatttaggttattacagaatattaagcagagttccctgtgctgcacggtagatcctggttggttatttattttaaatacggtagtgtgtatatgggagaaggcaatggaaccccactccaatactcttgcctggaaaatcccatggacggaggagccttggtgggcttcagtccatggggtcacgaagacttgaacatgactgagcgacttcactttcccttttcattttcatgcatggagaagga

SEQ ID NO: 29230 - DNA, 1177 bp, Bovine  19866881163503
  misc_feature (1)..(1): n is a, c, g, or t
nttctaatgagtgattcctgttgatcccacagacacacagagacacccaaaatacctttcatgagcttggcaaatggctcagggcaggtggaggggatgggcagagtgagcttgttgaccgcccaccccgtaggccacagccaagccatcaatgccacggtagggcacttctcccgtgagcagctcccacagcaccactccgtagctggaaagtagagttttcataaagttaagtggggctttttcctcatgacacaatcaatgggagaaacacatcagtgccttcatccagctcctaataatcaatcttctcttccaacaaagcccataggggcccttatcccagtgtgagaggtgggttcttccacttaacattccaaacatatacaattactctccttccagaaatcagttatgccttcttctgaggaagtgaaactacttagtaaataggaaagcttaaaagcagtacatgactgaattaaacagggtccagaaccaggccttttcatactgttgagctgactcattggaaaagaccctgatgctgggaaagattgagggcaggaggagaagggggcaacagaggatgagatggttggatggcatcaccgactcaatggacatgggtttgagtaaactctgggagatagtgaggacaggaaggcctggtgtgttgcagttcttgggatcacaaagagtcgaacacgaatgagcgactgaacaacaagaaccaggccacacataaagagcaatgtggttgttctgatgtttgtccttctgtctcattttttccacacctcctgaagatattcaggacactgaagattccagccctacagaatctcatgctatacagcacaggactgaagtccaatcatgctgtttttttttttcttctaattttattttatttttaaactttacataattgcaatcatgctgttttaaaacagattttagaaactgcttctctctgcctctccctttatatttaggagatgtgttactcatgtttccacctaatgcctactagtaatgaacaaagaaatcctgtgggcctccctgagcctgctgggagaatatgacacatcttttttttttataactgagggaggtaaagtgaaaggagaataaaaaacaaggaacaactgcagcagccaagctcttcaaagca

SEQ ID NO: 29231 - DNA, 1751 bp, Bovine  19866881310422
  misc_feature (1)..(1): n is a, c, g, or t
ncagcacttgaaattggtctttgcattgagaaccaccaagatggagtgcacaaaaggctgagatattctgcccattagaatactttttcttgcttgttgttattttttttaaagatgagatggagaataacaaatttagctaacagacttttcttcactgatagaaaagtgagacagcaaatgtccgcaagaacctctagccagaaatcccatctggctcactatactgttgtttttccaactgaaaattatgttccgataatctttttggctctgtgacttccatctcattcctgatttggtgagtcctcccttctccactcttagcagtgagctgtggtcctgttttatgactgttgaccatcctcatggtggattctacaagatatgctagccaaacaattccctggatgggaaagagcgagggtaaaacctgtgactcaactttgtgttgtgggccaaaactcatctcagacataactcaacacacctggatatattcctccacgctctctattcttttctattctttctctggctccactaacctatcagtagcctggagctgcacagtgggctctgtttattacagacaatgaggagaggggaagagtgcaaagccaaatggatacatactcgcaaggacaggaacacagtgctggcactgactgcaaaggacagaacagcagccaccgagcagatgatgagatccgattttaagatatccttctgtaaacagaaaacaactgtacagtttgcttgtctgtgtttctctcagcaaccttgggtcaccaggtaaatcgggtgacaggatcttaacccctggatacacttcatcttcagaccgtcacttacctgatctattcccaatggcacacgttgcatggaccattcagcacctcccatgtggggaatatcagggaaactaaggcagaagggggcaagaggaaatgcagactgccatgagaaagcaatggcaccccaatccagtactcttgcctggaaaatcccatggacggaggagcctggaaggctgcagtccacggggttgctgagggtcagacatgactgagtgacttcactttcacgcattggagaaggaaatggcaacccactccagtgttcttgcctggagaatcccagggacgggggagcctggtgggctgccgtctgtggggtcacacagagtcagacacgacatgactgaagcaacttagcagcagcatgctcccatccactagccagggagagaagattttctacacgtgtaagaggcataaagttcttcttgacaatcacagatcagatgcgagatgcccaggtttaataaagatgggtaaagtgtgaattgtaaacttttgagataggaagtggaaagcaactttagcagctaattggcaaattgatgttgagagtggatctcctcattgtattattgattatcccaaccaagccatgtagatttttcatcagatgggtcaggtcatttttactgcatttaactgtcctcctgatttcttcctgtcactttggatgacaattcagtcagaaaaccagcatcatgacttgcaagaaatttcacattttaattttaaaaagacaggaaaagataaagggaaggagggaatgtaggtaaacaggcatatggtttgtacagaaagaaaagaagggaggcgatggggaaacagatgtatattctatagattttctggcaggtaacattcaaaataattatttaagaggcacaattc

SEQ ID NO: 29232 - DNA, 1175 bp, Bovine  19866881321917
  misc_feature (1)..(1): n is a, c, g, or t
ntcatgtgcccttcaggtgactgtcacatgtgtcccctcatagctatggcgtttaacattttatagaagacttttggaacttccctggtagctcagtggtaaagaatccacttgccaatgcaggagctgtgggttcaatccctgagtcaggaagaccccctggagaaggaaatggcaactcactccagtatccttccctgggaaattccacggagaagggagcctggcaggctacagtccacggggtcaaaaaagaactggacatgacttagtgactgaacaacggaagattttgatgtatcaaaatcaaatcattgcgaatggaacttttctttctttagggctgctaagtcaatttagtcatgtccgactctgcgactctatggactgtagcccaccaggttcataagtccatcggattctctgggcaagaatactggagtgggttgccatgccctcctccagggaatcttcctgaccagtccaactcctttaggactgagacagtggatgaaacaaccagggccatgagtcaaatgctttccagcctaaacatttgctgcatgttaatgataaagtttggttatttagcaattgtttatatataaagagaaggatgataaatcataatatcaatatgtatttctaaagctctttaaaagtactctcacataagaggatttataaacatcaggcactattattacagtgcatttgccatcactgcctgtaaattaaatggagacaccaggcagaactcatcaagactgattttaaagaccctcttcgttaagaacagtttaatagcgaacattgtgttgcggcaaatgaaatccagattatgaattcctttctcttttacataatattgttggacttcattaagttaagaaatagtcacacaacacctactgtaagcagagctgttctgtacatgcaacatagggacacaaagatgaaaacaaagaagtccaaacttggaagtagcatcagtcacaccaatctttggtacaatttacgacagccacagagcaaatttgttttccaaaagtgatggcttccgtacctctcatcctaaaagtccttcctgaaccttccattcatccatcaacaggtggaatgattctctgaatcattcagagatgccttttgaatctgtgtgggtggaagtggag

SEQ ID NO: 29233 - DNA, 1150 bp, Bovine  19866880470648
  misc_feature (1)..(1): n is a, c, g, or t
naaacagaattacaaagtcagcatgttttatttaattagagtggtgttacataatactgggagaattgtgagtataagcatttaaggacccaaaatgcccatttgtgaagcgtgactgccccagggggtctctgttatggttcccaagaatgctttcacatgaaactgggggtcaaggggcgataaggctatgcatccacggccactggtgaactgactgtctgagctgtggagctgctgggggcagggagccctgtggaggagaaaccaagtgcactctaccaacaatctcctaagaggggttggcagaatgtgttttcactgtgtagctcaaaggctgcaactgtcagctggcaaggtaggaccttgtgcccctccctctccttcatacagaaactgttagatggctccaaccgtccctgacaggccaggactccaatgctcaaaggcctgatatcccctccacttgctacaggagtcaaatccataaagaagagcagaaactcaccagtaaaggtagtagaagaaggagaggagatagaaggccagcttacaccacgcctccttctgacagtaactcaaggtgtctgcgttcatgaccaccggtgggtcataggcgagctcggagctgtctgctggacagtggaaatacctgcagggagagcagacaggccgtcatcggttctgagacctgggagggacatgggaagtcacctgggctgagtcctcctgatgcctggcttccctctgaggagtcactgccaagcagtcatctgcattctgccagaatcactgcccaaaatacagcccaggaatcactaaacagtggctcaaccactatcctccagcaggtggtaacacccgagtatgcagatccaccagcgtcacattcgccccacacacaggtgacagaaggaaaccatgtcacttgggaggtaccaggaagagcctcctttctccagggatgtgggtgggtgaagggtggtctgtgttgtgggcaggtcgggggggtggtggtgtctgttatgtgtacagatctgggcatcactaggggcacaggtgtgtgtggacgtcagttgcatctctgcctcccagtgttgctgtaccataattttaccataaatattcattacttcggattaaacaattc

SEQ ID NO: 29234 - DNA, 1127 bp, Bovine  19866880492173
  misc_feature (1)..(1): n is a, c, g, or t
ntttaaatgcttactgtggagataaagactaaccaaatgagaaaaacaaaatctattcattctgagctcactatagcaagggagtcagccaccatcacttgcattctggcagtgactcaaaagccagcagacgagcaggaaagctttgtagtggaaaaaaagggaaggctgctggcatgtcctgattggaccatatcggcatgaggaagctgtctacaagctaactaaaagggagccatcctgtgtcactggttaggggtgcctatgtggctttctctggtgggtcctaagttggaagcaggtataaaaattacggaagctataagttattaaccaagtcttgggacttgcctggtggtccagtggctgagactccacattgccagtgcaggggaccccagggttcgacccttggtcagggaactagatgccacatgctgcaactaaagatcctgcatgccacagctaagactgggcacagccaaataagtaaataaatacaaatcaagtcttggccatttggggccaactgtgacagaagttattgtttgacttctcagattgtcactagaagtaagcagtctcacttcctgagattctgccttttaagactggcttccagggctgtttattgtagatgagagatttacttcctgggcaagttgctgcagattgtgggtcagagttctgtttttttatatggtctatccattgtcccttagtgtattcaacttctcactactgtgcatttttcacaattattttgagttaaaatctctaccataggttaatatattaatgtcttcatgtttgctgtttggtcactaagttgtgcctgactctctttgcaaccctatggactgtagccctccaagatcccccatctatgggatttcccaggcaagaatactggagtgggttcccatttcctcttctaagggatcttcccatcccagggttcaaaaccacatctcttgtgtctcctgcattggcaggcagattctttaccatggggccaccagggaagccctaatatcttcataaagtgcttaacttaacatgatttcccacaggaagacttaagcaagagaaatttgtattttatttttttctagtacgacataata

SEQ ID NO: 29235 - DNA, 3030 bp, Bovine  19866880518836
  misc_feature (1)..(1): n is a, c, g, or t
ntgaatgcgagaaagtagacacaatatgagtaatatttcagataacccgatggtaggatcactcacctagagccagacatcctggagtgtgaagtcaagtgggcctgaggaagcactactacgaacaaagctagtggaggtgatggaattccagctgagctacttcatatccttaaagatgatgctgtgaaagtgctgcattcaatatgccagcaaatttggaaaactcagcaggggccacaggactggaaaagttttcattcccatcctcaaactaccacacaatttcactcatttcacacactagcaaagtaatgctcaaaattctccaagccaggcttcaacagtatataaaccaagaactccagatattcaagctggatttagaaaaggcagaggaaccagatcaaattgccaacatcctctggatcatagaacaagcaaaagaattctagaaaaattctacttctgcttcattgactacactaaagcctttgactgtgtggatcacaactaactggaatattcttaaagagatgggaataccagactatcttatctgcctcatgagaaacctgtacacaggttaagaaacaacagttagaactggatgtagaacaatggactggttccaaatagggaaaggagtacatcaaggctgtatattgtcaccctgcttatttaacttatatgcagactacatcatgcaaaatgccaggctggatgaagcacaagctggaatcaagactgctggaagaaatgtcagtaaccttagatatgcatataccaccacccttaaggcagaagcaaagaggaactaaagagcctcttgatgcaagtgaaagaggagagtgaaaaagctggcttgaaactcaacattcaaaaatgaagatcatggcatccggtcccatcacttcacggcaaatacatggggaaacaatggaaccagtgagagaccagcttgttccttggaagaaaggctatgaccaatctagatagcatattaaaaagcagagatgttactttactgacaaaggtctgtttagtcaaagctatgctttttccaagagtcatgttatggaaatgagaggtggatcataaagaaagctgagcaccgaagaattgatgcttttgaactgcggtgttggagaagactcttgagagtcccttggactgcaaggagatccaaccagtcaatcctaaaagaaatcaaatctgattattcactggaaggactgatgctgaacctgaagctccaatattttggccacctgatgcgaaaagctgactcattagaaaagacccctgatgctgagaaagactgaaggcaagagaagggaatgacagaggatgagatggttggatgccattactgactcaatggaccttgagtttgagcaatctccaggagatggtgaaggacagggaaacctggcgtgctgtagtccattgggtcacaaagagtcagacgtgactgtgcaactgaacaagaacaatattttacgagcatctcagtcacatctcagtaatatttttattaatccctttttgatttatgctacccttggccaaattgttcccatctgtcttcatatgactgggcttggggaggttagggggactatgaggaataagataaggaataagaagcttttgttcactgacagaaaacaggtccacttcatcttcctgtcaatacataaagcctttaagttactgctaccccatatctatcaaaagttcaattcagaaaaataatatttaaaaatttttgagagagacctagttcaccaattcctccagagcctcaaattcagccaaagcagcagaggtagtaagttctataactagatgatatcgcatcagttccttactgaattgcactttgtgaattatgatttcatgcactgtcattaactatacagggaagctacataaaataatcctatgaaatgagtcacaacacactgagtaagaatgctttgaggacactgttattatattatcaaatcctctttattaaatccttggggaagttttgttttacctagctttatttctcttgaatatgaggttttatcttgtacccactgtgaactttgtaacaaagaatgtttccttttatatatcagctcaaattagagtgtaagcatattgaaggtatataaatacaaaatacatatacatacatttgtgtgtgtgtgtttgcattctacacagcaccttgaaaaatcttacatatagtaaattcacagtactagttggttggctaattaactacgtttgtccctctgtccatttctaacactttttccaggaatgcaatttggagcaatagttttagttgatacataaaactgataaacagagaggatataatcaaagaattacctttaaaattgtaagttttatttctgaaattgctttatccctgacatcttcaagttgtttcaatgcctgagtagcctgatgtaactgttcttcacaaaattcatgtagagaatatgttcgaaacttatccagctaattaaatgatagtaaatgttcagtgttgaaagtcaaaattcatttaaaaaaaaagaaaataaaatatcttggtcactgcttcatatcataaagaatagcatattttatactgttttatatatatcatatatgccttatatattattcaaatttaaacactattactcaatctaagcaaacctttaaagaagacagaaaaacacatcattttaattgttaaattctagttagctttagttaacttttaaactaaagcagaaaaattcagaagttgatatgtttatgaaatatctatgaattcagggcaattgacaatcttaggaattgcttttatctttggagctcccattatctgtaaaacttaaaaatatgaacactagatgtaggatagagagactaaaattaaataatttaaataaagtaaattacattctgaatttattcagaatcctgcatggagaaatttccatcaactgtgctgctgaactcctctagtaatacata

SEQ ID NO: 29236 - DNA, 1816 bp, Bovine  19866880633546
  misc_feature (1)..(1): n is a, c, g, or t
ntcagtgcagtggatggggctgcatactcctcattgtttcccgcactgagaatagggactggcactcaggagacactcaataaatactgaatgaacgcgggaaggaaagtgagtgaacacatactgtgaggctcagtgttataacggaaggagcactggttttggttttgggacgtggctcctcgccttgctgtgtgaccttgagtgatccgcttttcagcgacccctgtatttccccatgtcaaataagaccgctctagctccagacctgaccggtgaggctctgtgagcatgaggcgtacctcgttctcaaaggcagaacttgagcttctcagaagggccttgctggggctttgcagctggagaaggttagaagcaaaattcttcagtttcattgtctttggttttgtttcttagattttcctttcttctctctatattgtaaaagagttgtttttctttctgccagataaagtgtatattttggtatagaaacttcttccttgttgcagaattagcttgcagccctttctaagagtacagggatgtgtgaccccctcctcagtggtgttagaacaccaccgtaagacacatactcttaatgcatgtttaatgcctggactttgttaaaaacaagagggccagggaattaaccatttacgaattcatttagtttgtgagcccagagggcctgtgttcacacacacgtccctacagtcatgatggtgagcttctccccagcactgacatattaaccagcataatctgggagcccctggacatggccatcacatatgcatgtggcagctggtggcataaagaatccacggcaccccggacccctggggacctgtcctgcaattgcagaaaagaggaatagcagccataatcattatcctgttgagaataatgagagacgctcagagcagtcatatctctcatccaaggggcacagtgtggcctcgtaacaatggttacacgaggtgggaagtagaagagggaagagtttggggagcagataagttgctctagtgacaggaatgaaaaagaagccaggggtctggcttctggaaggtgcctcttttaagggccgtctaagtcctttgcaggctcccactaatgccgtcttttttcctcttctttttgcatccagcatgatctacactttagtgagctcttaactcgaagaccacgcacattcacagagactgagatgggagaggcccgaggctgtgcagtccatcctgctggtgacgggagcagggaccagtgtggggatgtgacagacagagatgggcagatactcggaattgggagccggaagcaggcagcagccagcgcccgagccagcccgctgtcacacgtgtggtcgccctgtgtaccagtcttccgcgtttgcaccccacacttggcctgtagatcccttctgggcagcaggggcatgtgaggtgatgaaacacgaaacctcttctgaacgagaattgctgcttcctgaatcccctttattgaaaggctccctgaagttcatgctgcgttcctggtctgtgggtgtgatggctggaaggctggagggtgccctctgaggaactgggtgacccagagtcaaggctgcatctgtgggacagtttgaagatctcaaggatgtcatggacttacctgagacactttcttccaagccctggccacgcccttcacttcgatgggcggggcctggaaggtgtgcagacttgccttgggctgtaaccagccttgagtctgcaagggtgtctatttttctgctctgctttgtaagagcccagtgatgttgggaactgag

SEQ ID NO: 29237 - DNA, 1797 bp, Bovine  19866880658513
  misc_feature (1)..(1): n is a, c, g, or t
natgaagagacacatagggtgtggactaggagcatcccaaggaatcaggatgagtcaccctcccagcacatggatgtgcttaccaaccactgatgctcatctaagcctcggggtccagagcttccaggtccaaatgactcccatccagagccatctcattagcataaatgatcaagacccaccatgaataacaatagcatttttatcacctgggaaatgctaaggtgttttagaagcaccaagccaggaacctgggacaaaaaccaaagaaattctttcttatccaaccacaggagagtggcataatctgagttaaattttagaaggagcattgcagctgctatatgatcctatacaagtcaacacaagacatggagcttacagtgaccttctaaccagatagtctctggtcagacaccttggctgtccctgactgcctagtctcccttggtccctgtccattttccaaacctggctttccagcttccccattgattctaagagctacgtaagaccttgaaatacatagtctgcttaaacaaaccagagttggtttctgttattttctaccgagcaccctaagcactgcatgctctctttctatcattaggtttccatagtctcttccacaaaggaaaatgtggttgatcctcagctcctaacttcacatgttccacatctgaacactcagactgctttcagtttcatttccaagttcctgggaaaagagtctgattgtttcatttgggtcagatatactctcttagtccaatcataggtagcttaaaaggctgggttatgtagcacaaacatcaccagggggtggctaaaatttttacaaatagactagatctccaaacattgtttcctgcatataggtggaatttagatagctggggagaaaaagtatgaattgcaaggagaacatgagctgacgatgcatagaagctggaatggttgtggcattttcaaagaacaggaaagattctggccaaatcacagaagagggatctgatgagacgtggaggaggcgtgggcttggctatgaagggggaggtcctattatgaagaatctagacacttggcagaaaagtttctacttgtgaagaaaatgggaagccatgcaggttttcttggctgaagaaaggtcttataaaagtattacctcaatagtagcagcaagttggatgggagatgatggtgatagagatacaagtttttaaaaaacagaatacactcatttactccatatggaaaaatgagagaaataaatcacaattataaaatccaaagttgttaatgagagagagcagtaaatctcaaacttagaaacaactgatagatgaatgccccataaaaaagaacagccagtggcaccgtgtgtgctttctgtgcttgatcctgtgatggtccctgcctctcaggaggtaatagcatgacagagaaccaccaaatctaatgaccagctcctttcttttttaaaaggcggggttgggggaaggggtggaatcttgcatttttgctgactcagctccattcaccactaggggaaatttattcttcatatgcacacagagccttgttaagagcctcttctccctctttcctctcatgtaatttttgttcagttacctcaggaaaaggtctcttgtgtcccctttttttccatttgtgagtcaaagaaaaatgaccgtaatcatgaatgataagtttaaagcagtactagtgatatatccatgtgaggaaaaaggaaggccctgcatttgggagtgaaatgtaatgtcatcaagaaccaat

SEQ ID NO: 29238 - DNA, 741 bp, Bovine  19866880731018
  misc_feature (1)..(1): n is a, c, g, or t
naaacagatcattgtgccatggcagggtctattacgctgtctagacatggccttgatgtggccaagccacttggttaataaaaccacgaagaatgtgaacacttctatcaggcctgatctcctctatcatagccacccacccactgggaagatgaaaattgtatatcaccatttctgtggcagggagcacctgtccataaaacagaactctcttggcccttttgaacccaaacccagggttttcaagggacattttgagctggaaaataaagctggccagcaggctgccctgagccacgactcctgattttcaagttcatgctcagcctacctgcgatgaaatctggagttgccacatcagggctttcggcatgagccaactgtactcagaacagctcttgttatataaccttcggccacggcccacatgtgtacatgagcacatgctcaccctgtacaaaagcacacagatcttcagatacagctttttttgtttcagttacaggaagggagtaacaaacattaagctggaaaataatgagggatgggtaaaggaaaagccctttcccactggaaagattaaaaaatatgcacatttcagagcagatagaagtccacatttcttgtggctatattaactgtgtggcttaggcaaaccgaaggctcaaagaaaagaaagccaagtggattacaactgggggcagtttcttcacacaggccatcttgacatggatagcttgg

SEQ ID NO: 29239 - DNA, 2165 bp, Bovine  19866880812103
  misc_feature (1)..(1): n is a, c, g, or t
ngaaagttatgatcaacctagacaacatattaaaaagcagagacattactttgtcaacaaaggtccatctagtgaaggctatggtttttctagtagtcatgtatggatgtgagagttggactataaagaaagctgagtgcagaagaattgatgcttttgaactgtggtgttggagaagactcttaagagtcccttggactgcaaggagatccaccagtccatcctaaaggaaatcagtcctgggtgtgttcattggaaggactgatgctgaagctgaaactccaatattatggccacctaatgcgaagagctgcctcatttgaaaagaccctgatgttggaaaagactgaagacaggaggagaaggggacaacagaggatgagatggttagatggcatcaccaactcaatggacatgagtttgggtaaactccgggagttggcgacggacagggaggcctggcgtgctgtggttcatggggttgcaaagagtcggacatgaccgagcaactgaactgaactgaaagtgagggatcaaataacaaagtctagataaacagttaattaacaaacaactttattttgaagaacattatagtagatatcttttatcataattttatttttccttgatcacacctatttaaacacggaagcaaattgctaacatgacattctacacttacctgaagttgattataaaactgtatgattctctctttttgagctggccactgatgtaagcccaagtgttgtgttgcaatctctattagtttcttaaagaaaaaaaaatacattaatttaaatttcattgcaaattaaacttttaatatgtaatcttacaaaacctctctaggtagcaaatacagcactttatgatggtatttcttaattttttagttcaccaactccaaaataatgaaaacattacttcccctaccaaagtaaaatacacagaaaattttatgatcacggacccccaggtagcaaattcatagatcctctccgaatttaagacatgctttatgatgcatttaagaactagctgttaccacagtataattgtctaatgatcctacagtgaagaaaaggtaaaagattctatatctttgtggaattttttgaaaggagaacaatgataagtatttttatttttgcttatttgttaatctgtgtttaactctaatcaccattaaagttgaatttcaattttgtaatgactgttttactgtttcaacgttaggaatattctaagatagcaaaatttacaagatgaaaaacttgacgtggttatacattagatcatcccaggaagtggctgcacctttgaaagatatttactatttcaacacaggaattatagggcagcatgattcctcctaaagtggggtttacttcaatgttgatataattggtaactatgtctacagaaaaagtatgatttatcctttttctcactagcctctcctacaccatttctcattccttgcattcctacaatgggaagcagccaaagaaaacacacacactcagcaagactgtacaaacagaggaaaaatagactctatgtaaggctaactggaggtaggaaattatttttgaaaagcaacctcttccaaacaaagttgatgagactgcccacttatggccttcactgcttgcagtttcagatgtagaaactaggaatctctgcagttactaatacaaacctagatactgcctggatacaagtgaaaaagtcacacaagtgtggaataaagatagcatgggatgcacagaagatcagaagaactgggataataaaagaagacatcttcagatatactcgggtcatcccacctggtgaaggttttgaaataaaatcataatcctgacctaaaatatttatggctgtataagatgttcattggagttaactggatgacaaaatatatgtagttcttataacatgatatggttttagtaattctcaggttattctttggttgctctgagataatgatccctacacacgttgaatactgctaaagacagtaatgtgaataagttgtatagattccaacttattccacatgcaattcagattcttgtatcacaaataaacaataaacagcacacctacagggtattttttaataacatgccttcctatgtgggtgtgttata

SEQ ID NO: 29240 - DNA, 1796 bp, Bovine  19866880816069
  misc_feature (1)..(1): n is a, c, g, or t
nacctgatcccccagccacaggtaacatacagtaaagttgggaaaccaagaacaatacaacaggagattatccatgtaagtatttagcatatcatatcccgggcacatagtgtggattcaaagagcatcagctgttagtaccattacgatcgctattgtgaagatgaggctgtggtggggcttccctggtccagtggttaacaatctgccatgcaatgcagggggacacaggttcaatccctgatcagggaagtaagactccacctgtgtcggggctactaagttcccatgccacaactactgagcccatgcattctagagcaagtgtgttgcaatgaagacccagcacagccaaagttaaaaataaagtctaaaaaaaaatagacgaggctgtggttagaagcaagagaacaatgttgagaagcactcatatcttcactacttccatggtcaccatccaccctcctctccctaaaagggccaggagggctgaaaatgaggcagcactaggtctccagggacagaaaccagggacaggcttccagtctgagctgtctggagtataaagagtcagaagacgggacactgagacaagacctgaagaactgccaagagtcagggccaggagagccagagtaaaaacccacatccaaatgctctttgtgagcaagagaagctggtggtcaggggccaggtaggccagagtagcaaagaagccagtctgaagcaactctaggaggatcctgggaggctgtccaaaaggatgctggaatagccacagatcaccctgacaggctgctgggcatggccatgtctaaccatcagaaagcttatcaactgtaccataaagaatatgatcgataggctcttgatgtgggggcctgaggttgagcagcagtggcatcacctggaaacttgtttgaaatgcacattctcaagccccacccctaacctgctgaatgtgaaactctaagggtgagccctctgggcttccttagaatccgtttgcaatgcaggaacctcaggagatgcaggttcaatccctgggtcaggaagatccgctggaggaggacatggcaacccactccagtattcttgcctggagaatctcatggacagaggagcctggtgggctgtagtccatagtgtcgcaaagagatggacacgacttaagtgacttagcatgcatgcatgtaaaggtgagctcagtgtctgccctcaggaagtacaataagacaaacttctaaaatcagcatttctctactttagctataccctaagatcaccagagcaacccatcctacatcgatgacatcaaaatctttgagagatggggtcatggggcatttatttacctattattttaaaaatgcccttggcaattccaggggtagaaaactactaatttcaaaaaaccttccttaggagaaatccatttataaatgaagggtattaatatatcattgctgttccctgggcagaccatatgttccaattttatcagccctcttctctgggtttcatatagccttaaatgagatggcttattggaaggacctttaacattaactggctgtagttggtaaggctttctaccctcctgcccaacagataactcctcaagtgtcagagtttaaattgagtaagggcacactttccagaaacctgggatcaacagaatcaaaatgcgtgtgtcatctcacaaatgactgagtaaagaccaaatgcttcttcaactgagatgaaaattaactctaaagtcaatacaggttcattgtgttcattgcaatggagta

SEQ ID NO: 29241 - DNA, 1877 bp, Bovine  19866880863814
  misc_feature (1)..(1): n is a, c, g, or t
nttaaaaatatgtatgcatatacatataatcttaggatttaaaaattgtacttacttttttaccagatcaaacatggttttctctacatttaccagccattgttctataccacttcttatacggattttcctataatttttttcaaaaataattattatgaaaaattctctttattatttttattcatgtttcattcctttggtcagtctgtaaaactgtcttaaaactacacctataatattcatgggccaaaggactataattctatactgtctttggtatttctagatcttaaattagaaaatagatcacctagtttttggaaattttgacatcaaaacaataaatctgaaaaattaaaaggagccagtaaaatatgaatttgcaaaacagataaatattacaaaacatttttggcttccttaatgaatcttccaaatagcaagccaaggtcagggccgggttagaggatttgtaaatgggaaggtttgggcatagtaatttttaatcacctcactttaggaacctcatgccaaaggctagggagctcttacaaggggtggcaaattgtactagtgtaatggaagaacttcatttactataattgccaggaaaccattcatgacaaaaccagaagtcagaggaaacagcagtgggagtagcatcagcaaccctaaggaaatagcaaatttccttcctacctatattcatataatgaaactttgtgttggctcataggatatattaatatatatagatatggaaaggtaaaactctacataagtaaattatctttgaagaaatagtttgattagcaaatgtctatgaaatgtcagaaacttccaagcaaaggttttaaataatgaagatttacagagtctaaatgcttagtttacgacatagatatcatactttggcagcacaagagtttctccttcagcagatatgaacattatcacagcatgagggccaatttcttgtttccatatcaataagtgtcttatattttcaaaacatttcacaagatgaggctgtgggccagaaacaaatgtcaataacattataaaattctgacttggttggataataacattgctgaacagagaataatgaatgatattacctgtacacactcaggatttctgctatcagatagaatatcaagaagttcagcattgctaagaaagtaaaatcttgggaatatcattcttttagtttcaagatagtcctgtacagattcaaaagaaatacaattcagagtatatgattaatcataatattaattacattatcatttgtgcctacatttacatacaaaaggcacattattaaagtttcagtatacatagtagtatcagtcaaaataacatactgtgctcaacaaaagttatacttaaattactaaccaaaaaaaaaaaagaaccataactaaagcaatttaaaacaaaaacaaaaaatccaagtcttacacacatgtacacacacatattattgatcattaataaagcactgtattttagtattatcatcattgctttccagtgttcccaactttctgctcttaattccctatccttctggagaataagttatcatttcagcaggccacttcacattctactatacagagaattcctgtatttccacccctacccacaatttatctgtgttcacaccaatcttaaactcttcttttcagaggaagagatactactcacttatgtgggtgaattatccttgttttatttactactctcctatatcttcaatttcttggttgcaacagacttcttaaattctctcgttaagtatatacattatatacatacacacatgcatgggcagagagctttctgtaggttgtaactaccatatg

SEQ ID NO: 29242 - DNA, 1997 bp, Bovine  19866880886854
  misc_feature (1)..(1): n is a, c, g, or t
nttaccgcttttagggaccaataatccaataatgggtgtgtggaatgaagtgggtttagtttaactgaagcacataaaaaaagacctgggctgttacgtaatgcaagttcagtatgaaaccaggcatatgatgtgtctacaaaaaggctaatgctatcaggtcacgttaacagagggtacagtttacagaacagaggaggtgagtggtgcttttactctctgagccaactgaccctcaccttgagtatggtgtttagttctgacagtcatgttttagtaaagacgtttacaactgtaatgtgactgaaggacaatcagaagggtgagataatttagtgccagttaacataacggctgcccactcctagtatcctagcatgaagaattccatggactgtatagcccatgggatcacaaagaatcagacacgactgagtgacttaaaaaaaaaaacatatatatatatatatatatatatatatatatatatatatataatggttggagagatttagcctgaagaaggatttgctgggttcaccatagctgtcaatactgataggaattccttgtggaagagggattcagtgatcctctgtgtctctaaagcagtgcattacaatagaaccttctgtgatgatggaaatgtgttatatctatgctgtttaatagctactagaaagatgtgattttaagcaattagaatgtgggaactgaattttaaatttaattttaactaattaaaattaaaatagccaaatgtggctaccatattggacaacatgcagctcagaggagaaataaaagaatagaacagaggttagcaagtttttttcattaaagagcaagatagtaactattttgagctttgctgcccatatggtttctgttgcagctactcaactcagccattgtggtgcaagaaaatagaccatgtataaaagaatgcatgtgtccatgttccaatgaaactttatcgatggacactgaaatttgaaatgatctaattttaatgtgtcacaaaatattattcttttaattttttctgttattctaaagatgtaaaaaccattcttagcacacaggttgtgcagaaatgagtggccagctagatttgacctgtgggctgtggtttgctcacactggcttagcatgtgggtgtaaaccttagggagttatatgtgagttcagttaaggaagataatgattaattagaggtagccaggggatagaaggagcatcttcagtaactggtgagtttcttgttactaaagcttcaggtatcagctggataatgaactatctggcaagggatgatacagaaatgtgtctctctaatattacttacactagaattctcccctaattctgtaggagtattaaaatcagagtgacatgtgactgagctaaaatcatacctgcttttttaagggaaacaagtcattttccctcactcggtacttgctctcaacccctgctgctggaacagggactattttggacaggggcactagcttcaccatttcagcaattctcccgagtgttcagggacccctgggatatgccttcctgggggagttggtttgtccatttgtgtgcagcccaggacaggtcctgagacccttgcaccctaggagaggacaccctactggctgtacacacctttgttctgttattgagtccctggtgacacctgggggacaaagtggtgggggttaggaagcgtcccttctagctagttctttctgtggctgggtcatgcctcactctgtgactggagaagggcacctctaatattttcccctccagacagatagggaaaccattgctttctggggacctctgagcttctgtccagaatgaccttgagaactcaagtccaatggagtaagcttgacaccttgattgtccaggagctgatcatccagcctttgaatgactaaagattcaattgttcctagtattgtcaactctgctttcttaattttctcttctcc

SEQ ID NO: 29243 - DNA, 1329 bp, Bovine  19866880903821
  misc_feature (1)..(1): n is a, c, g, or t
ntttcaattacatatcaccataacagatataatagtaatggaaatatttggtgagcattaccaaaatgtgacgcagagacaagaagtgagcaaatactgctgggaaaatgatgctgatagactttctagacccagagttgccacaaatggtcaatttgttaaaaaatacagtatctttcaagtataataaaatgatgtacagtaaaatgagctatgtctgtgcatagggtaaggtccagaagactcctgagtacaggagcttacgtcatcctggagtttggggtgcactgccctgccagcatgtggatgcgttcaccagtctgaagctctctagatttatgaagagttcattatgtgagcatgattgattaaatcattggccacttgtaattgaactcaatcttcagcctctgtcccctccctaaggtggggcaggataggctgaaagttccaggcctctcatcatatggttagtttttatagagaccaaccccatcttgaagcaaactaggaagccctcaaattaaaacaatggtaatatataattttcttttattatgcagaaaatccaaggttttaaagactgataaaaaaaaactcatgttaactggaaggggtgatggtaaaattactgcttagagactgttgtgggaattctaaaaacaggtgcaacatttttggaggggagaatctagcaacctaactgtttctccctataggtaaagtgcttcttctggctgctttcaaaatttttttctttgtcttggtgtagatttcttttgggttatcacatttgggattccttcagcttcttggatctgtagatttgtgtctcttgccaaatttgtgaaccattatttcaaatttcagccatcatttatttgaatactttctcttctcctccttggactccaagtgacataagtattagatctcttgttatggtcctacaggttgctgatgccctttttttaagtctattttctgtttttcaaattagatttctatcattctaccttcaatttactgattctttcacttctctccttcattctgctgttgagcctgaacactaagatttttattttggttattgtattttcatttataaaatttcaatttggttcttctttatgtcttctatttctttcctgaggctttatatcttttctattttttgatgatgtgctctatatttcaagtgtgttcaagagtttcaagcatgttcataatacccaaggattgaacccgggtctcctgcattactggcagagtctttaccatctgagccattagggaagccctcagtaattgcctactgaagcctta

SEQ ID NO: 29244 - DNA, 991 bp, Bovine  19866881025011
  misc_feature (1)..(1): n is a, c, g, or t
ncctataattgcattggaaatacttgcattgtgtgaagtaataagcctggagctgtgttccagttgccagatgatcatttcttgctactatcttagtaataagaagcaatcatttttactattctcccaaaacattatccctttaattttatctgttctttccacatgtgaagattcacatacaaaaataaaaaataggcctattatgatttttcttctctggttatcatactacatttttaaatttttctcaaagatccacattttgccttagggtattctggtatgacctttatatattttctgtgagaaatttgcttacacagacaggtccagagttctttttcttctttccctgcttggacatctttttacatcaaatctttagattcaatcaatacctgctcagggttttcattaattcattcaataaaaaaaatctactgagtaccaactatgttgtaggtataaagctaggaacaattttttagacatttaaggaaaaaaccatccttttatggagctattagttcaacatatagagtcaaacattttatcaataaatgtaggcagacggtagagttataaaggagtaaaagattacctttattttgggagctgcatcagctaactatcaaactaagtacaggcagaccttgttttattgcacttcattttattgtacttcaaagatactgcattttttacaggttgagtattcatagcaaccctgcactgtcagatgattgttagcatttttagcaacaaagcatttttaaaaataaagtatgtacattgatttttagacttaaagttatgacacacaatagactacagtatcatgtaaacataaatttttaaaatttatttttaattgggggaaaattgctttacaaaaacatagcttttatatgcacttcaaaatcacaaaatttgtgtgacttgctttgttgcaaccttaactttattgcagcgatcggaaacaaaccca

SEQ ID NO: 29245 - DNA, 958 bp, Bovine  19866881092787
  misc_feature (1)..(1): n is a, c, g, or t
natgagcagaagggagcaggagcaggaagctggccaggggatggactaatagaatccaaggacgaatgtgacatgctttgtagggactcactattgagggaagtttaaagacttggatctgcatattctttctggttcaaagtgatggaaatcacacgtactgagtggaggaatgtttggatttgatttttgaataaattaccgtgactcagtccatcctcccagggagtcattctaaataaaaatcatgcacgcagaaatgaaagtgacccttcctaacatcagcttcaagggttgaaaggaaatgcattttgtaccagtttccagcaactctggctggctgttgagttgataccactgatgaggcccttctgtagcacgaccttgggaaaatgcaagcaggaccttgggaaaattctccctttgtctgggagaaaaatgagcatgtcttccaagggagcagctgagcttggaaggagagggtgctagggactgaatgtttgtgtccctgaaattcatatgttgaaatcttaacccccagtgtgagggtgttaggaggtgaggcctttggaaggtgattagtgatgcctttgggaggtggaaccctcatgaatggtttagcgtcttttaagcttcgagtgtatgcgtgtgtgctaagttgcttcagtagtgtacgactctttgcaaccctttggactctagccctccaggctcctctgtccatggaattgtccaggcaagaatactggagtgagtagccattcccttctccaggggatcttcccaacccagggattaaaccgtggtctcccgcattgctagcagattctttaccgctcagctatcagggaagccccttttaaacttctcccaatatcaaatccttacttgggattagtgtccttataaaaagaggaggagagctaactaggcttcactctctctctccctgccatga

SEQ ID NO: 29246 - DNA, 2493 bp, Bovine  19866881151247
  misc_feature (1)..(1): n is a, c, g, or t
nctatattttattctcctttaatgaaatctatttttcccaggcattatcatttagtaagaatgaaagcctttcttcatcaattttaaggatgagagattaaattacttacataaatgttaatattgcagtgcaaacatttttttaaactaattttccttgcaaatatatgatatggcatcaatgttataagcgtaaatggcattactgggccagcccgggtacctagttgcatttataatgacattttaggagaaaaatacattatatcttaaaacaaacaggctctctttgatttctggaaatctaaattttgaaagtttaacactgtttaactcaacaaaagattctaacgggaaatacaaagttatacaattattttatgtagactaatggagaattccaacatgcatgtttgatgcacgtgactttcctttctcaccactttatgttttggtatttgttgtttatttgtttattgtctttatttgttgttctgaagttgtcatgatgagttcagctagctcacagagtgaaaaaaaaagagatgagctggaggtatgagttttgttgcatgagttttctaaatatatttattggtactccttaaattaggctcgaagctggttgtctctcaatttagagcatcttcccacttgctttagcaccatcacgatctcacttttattgtctgtataaccagatgcagctgcatttatttacattttttaaatgaatgaaactcttaacttgttgacatattggagagtctaaaaatgtcccatttaaagtcatcctcacaactacatccgcatggatggcagttgaattagccccactttgtagcagagttgattttcaagagaaatgtttacatggaaataaaggatttcgaaagccttattattggatgacacagaagaaactatttttgttgcatttcaagtttccaactgaaatttcaagtcaaggccatgagacaaaatctacaggaacaaaatgaaatgggagtacagctgcgctcccgtttcagacttcccataggctacttctccaccaactaaatcacctccttttgaacttctggctctggtgaaaaaagatcaagaattcttttttttctttttagctgtgttgggtcttagttgcaacatgtagagtctagttccctgaccaggaatcaaacctggaccccctgcattgggggtgcagagtcttagctgctggaccaccaggaatgttctagatcaggaattctgaagctataatatatacttcaacaccagcctctcagtgatccacactgtaggatttgcttagtattcattcatttgctaatatttgcagagaacccactatgtatagtcaacactatggtttttccagtagtcaggtatggagagttggaccataaacaaggctgagcaccgaagaattgatgctttagaactgtggtgttggagaagactcctgagagtcccttggactacaaagagatcaaaccagtgaatcctaaaggaaatcgatcctgaatattcatcggaaggactgatgctgaagttgaagctccaatactttggccatctgatgggaagaactgactcactggaaaagaccctgatgctgagaatgattgaaggcaggagaaggggatgacagaggatgagatggctggatggcatcaccgacttgatggacatgagtttgggagttgggagttggtgggagggagagggaagctctgggagttggtgatggatggggaagcctagcatactgcagtccatagggttgcaaagagtcggacatgactgaactaactgactaacactatgtatgaaggtggctcagtggtaaagaatctgcctgccaattcaggagatggaggagactgtgggtcccattctggggttctatccctggaggaggaaatggcaacccagtccagtgttcttgcctgggaaatcccatggatagaggagcctggcaggttacagtccacagagttgcgagagtcaaacacgacttagtgactgagcatacacacacactacatgtgaagctctaaggaatggacacagaaaggaataagattcaatggctgcccttgagaagcatacaatctggacagaaggcaactagctataatataaagcaatgtaaaaataagaactataggagaggagtaagaaaaatactatggaaagatgaagtcaggaataattgattccaattaggtggcccaagaaaggctatatggagatctagatttgaatggaagctaggaagattctacagacagtataaaaacagagattttcatgactcctctggtggtctggtagttaagattccatgctcctaaggcagggggcatgggttcaatccctgggtggggaactaagatcccacatgccttatggtgtggtcaaaagaaaaagcatagaggtttgaatggcaaattcacggaatggtgaggagtgcagtgtgacatg

SEQ ID NO: 29247 - DNA, 1556 bp, Bovine  19866881169042
  misc_feature (1)..(1): n is a, c, g, or t
naccatgagaatcagttgaaaatgaattgagtccttggggaaattgttgagctgctggatcaagccctgcctgcagctcagacagataatgtcctttttttttaaaacccagaagcaaataaatccctggattgtataagccaagattttcatgtcttgatgttcaagagatgacctcaaaagtatgtatagcaagaatttggggggtggtgggggaacatggaggactgtaaaagacattgacacttgaaaggaattagagggttaaatcatgaggggctttccttgacccacactaaggtattggacttcacctgtaggcagtggggagacccacgctgaaaactgttgaggaagggaggtgacacaatacactggcttaaggaaactaactctgatggcaggacgagtgatagactgcagggaagagcgattagaagccagaaaatgtgattagtaatgagtctggaaattttatcaagtaccccccagaggtcaacactgcccggagtggggagcggtaagcaagcaaaaatactcctgtggttacccctcttatcagtaccaaaggccttccctttgccctcaaaggcatccagtatacagctgagaacccaaatcctagtactgtgataccttagcaggctatctagttgtctttagaagtttcaaataacaggaatttaaaaaaatttttaatctaaaacaaagtgcatttcaattgacttaaacgtttgaactagcaatacttttaaaaggtaggaaaaagaatacaccccagaacaacaagccaaaacaaaatgtctccattccccaagtgtgtgaatcactgataaatcatggtgctgccagctcccttcttgatgggagcatacaccacagcttgggttcccagcccccttggcagctgtcggtttgctagggctttctagaacctgtgcacagaaggggcctccagcactcatgtggctccatcctttatatccacgagaagatagaaatctctcctggagagatgtaagcatcttcattttctcacactgcacgtagacagcccttgctccctgctgcccctgggctgccccaccgttccagcagtgccttgggctgacaacgccaggggagtgatggaccaaaccccccactcttgccgccctgcctcgtagcttcctcgccagtgccctaacagcacttgataacctggctgctcccatctggcctcctcggtcttccccacaggcagactgccacctgcattccacagcaactgtttgatttacataattccaatagcactcattgccagcttcctgtttttgtaaactcctggacaattttttcgtttcataagaaacaaaagcctggactcacaatcaaccttctaccaacccagtccctccgcatcaaaggagacagggaagcttctctctgatggcttcccttcttattttagaaacagaagcttaaaaagcaccccgtggtttccaatccagagtttcatacaagcttttgacttcactggttactggcttcctgttaacagaaagaagtttcaa

SEQ ID NO: 29248 - DNA, 2468 bp, Bovine  19866881228615
  misc_feature (1)..(1): n is a, c, g, or t
ntatagaaaggtgaagaaaggggaataaggctttcagagagtaggtagggttttttaattaattcaaattatgaaataaaagttattaaaattcagaatattaaacatccaatcaaatatacatgagcttcgctgatggctcagagggtaaagaatctgcttacaatgaaggaaacctggattccatccctggatcaggaggatcccctgaagggaatatctacctactctagtattcttgcctagagaatcccatggacaaaggagcctggcagtctagtccatggggtcacaaagagttggacatgactgagcgattaacataacacacaaatatatacacaaacacaaaaatattgagtataaaaagttggagattaaaaatataattaagttaaaagaatcaagaagactgatactagaatggaaaagagatgataaatataagatcaaagaaatgcaacaacaacttattttgaagttttagaaataaaaaacaatacaatattgtaaagttaaaaaataaaattaaaaaaaattagaaatcaaaaaaatatatatatatattaaatacctgatttaattccatcttaataaaactactggtgtttggtttaaattttttttttaattaattaattttaattggaggttttaattaaaaaaaaaaaaaaagaagagcagaataaagagaggggaaagaattatcaagaaataataaaactgaattccccagcacatgagagacatacattttgagattaaaattattaaaactgacaaatgagggaaaatcttaaaaaatgatatatcttaacctactttcataagatctcatagaaacaaaagaaagtataaaatttccagaaaataaaagataatctatgatatattaagaatcagaaactgactggcattgtaaaaacccgtttttagtagataatactttcaaagtttgtgggaaaactattttgactataaaccctataccaaacaacaagtgcccaaatatttctccaacaaaatgactcacaggatacatatggggatgtgctagaaaaaagaaaggtgaaaacgaagagagagaaagatttggactataagaaaaaataaaaataactttaaagtgctataaaattagctgcaagctgctggccagaagtgttctaactcagcgaaggaaattgtgagatgtaagttgaatgtcttctaaaaaaattaaaaaatggaggacattaataagaaccaataaaatgatagtcatatgtcaattgatacttgaaaaaagaatatttttttttctgttccaagaaataaaagcaaagagaaaatctgaagaatacttaaggtcatctaagtttcaaatagaatgtaaaataaaatgtatcatgatcttaaacaattgatgagttcagaaaataaaataatttatctgaatatgaatccagaaatagtttttattaaatagctgagaagtagtggacattggaactacagggaagaaaaggaaaactaaaatacaaatggtccttgatttataatggtttgacttacaatttttcagttttatgctagtgttagtgcagaggtgatatgcattcagtagaatctggagttcacattttgaattgtgattttttccctgcagtatggggtatgacactctcttgtgatgctgggcagcagtagctgcatcttctagtcggccacacaatcatgagagtaaacaaccaatatacctacaaccattctgactcaataaagctacagtagactggttttcactttcagtacagtattcaataaattacatgagatattcaacagtttgttattaaaatagtctttttgttacataattttgcccaactgaaggctaatataaatgttctgagcacatttaaagtaagctacactaagttctgatgttgagtaggttaggtgcattaaatacattttcaacttatgttatttttaacttaatgatagatttatcaggatgcaatcccactgtaagctgaggaagacttatagttaaaatactactactggcttttagagtttcaaatcaattgatagaaaactttcacataccttaattgtgtttactggaccaaaaataagattatcaaaattatcacaatcaacaagttaaaaggaaaaaccatagttgaagaaaggagttggagggtgttggagaaattgggagagaatataaactttcttttgtacgtcctataatgtagaaatactttataaatttgatgaaattataaatgatttaagattcagaataattctcttattggaagtttagtgaactgcaagcacacacacacacacattaccaaacattaggacatgaacaataatgcaaaacattaggacaataatgtttccaatgcaaacattggaaaggaaatagcaaatatcaaacaaacaggaatcttaagagttgcaaaatacaa

SEQ ID NO: 29249 - DNA, 1198 bp, Bovine  19866881395787
  misc_feature (1)..(1): n is a, c, g, or t
ncttctgagtttattctcctcactgccagcctctctcagagattggcaggaagttgctcactctaagtcctaattcaagggaggaagtggctgttgattggtcaacatgggtcaggtgtccactccaggtccaatcaactctttcgttcatctactttttggagaattggaccctctcctcagaaaaatgcacacatatgcaatttttacacataatttcaaaggattcacagaactgaggcataaccatgagccataaaccccagggaaagaatccttggtcagcgcagttaacaaaactcactgtttacctcttttatatgtgaaagaaatgagtcactaatataatttgcataaggtaaacatccatattccagaggcacatcttataaccagatcgtaacaaaatgctgcttggatacaagcacagcaacagcacttatattttactattttctaactgactatggcaaccacatgtctttacaaaccattcccatacgtgccgcttggcagaacacccacctggagctccagtgaataacatttccatgtgactggctgtgttacttctcctgcccctacacttatacacacccacgctgtctttttaaggtgcgtataaattctaatctcctttcttttcctgttttccacctgggttctgtgagatactgaatcttgcttcatataagcatatgagccaagcttttccatctgtttcatttgtctttcccaccatactgctccaagttgcaagcttctatcagaatttgagttgcaaaaacaaataaacaaacaaagaaactataactccaaaactgattggagagaaggaaagtattagcttattacataaatattaggtcatgtaactgaaaaatccaaagtagaactgacattgggtacacctatacctagggactaaagaaggtcattcagatcaagcccatacatctcttttctcatctcccaggtctactttcctctttgttggcttcacctcaaacaggacctatccacaatgaacccctggtttatactctccttttagctagcattctaggagaagaagagcttcttcatcccaatagtttcaatagagcctcaaaactgagtctccttgggggaaatttgaatcatgtgcagattcctggacccatcactgtggctaaggagatgggcaggtactcattgg

SEQ ID NO: 29250 - DNA, 1117 bp, Bovine  19866881548675
  misc_feature (1)..(1): n is a, c, g, or t
ntccctttctctgtgagcttataacactgatgaacggcccttctgctttttctaccatttgcactgcaattatttacccatatgtgtctctctggaggctgtgacttgcccaaaggcaggactgttcttatttattacttggcactgttctagggtacgctctctctgcctgtttatgttatgaccatgatttagcttttattaatttaataaaataaaaactaccaaagcaaaaacattttaacattcagcaatgtctgattgtgtgttaaacactgaaatctgcttttattcatgtgttgaaagaggacttgcaaagacatttcaacatctttgttttttgaccttaagttatggctttttttttttttttttttgctgcaaatcttataaaatactttgtttcctaagcaccttgaagtttaatccttgtaaagaaccatccgtctgaaaatgtcagacataatttattaattccttgtttttcgggtatagatagttaaagctctgcatgtctcgttgggaactgaattgcaaatgtgatggagatatggaaatagacaaatttctttcaaggcagagttaaagggagcgttttggaatcacttgcaactccagtaagcgagtgaatgctttgggaggtctggtacacagtatactttcagttctcacagacttcagctgttccttctgcctgaaagctctcctccagatgtccgtctggctagttctcttacttctttcaagctgaaggggagtatgtcaccccaaattatgcttcattggcataaggattatcctgagctggcaattttaaagaaacagcagatacggaaaaagctctgaaaactgaatagaagtcacatgtataggggaaacattcactggtaagtgtgtccatctctgtagctagaagaggaggattactaaatctctagcaatccttgtcagtgaagaaggcagtgacttaagtctacagaacaaccatacccttgattactgtgctttgcctgataaccgagttttcccataacagtcccgtcaccttcttttgtctttagctataagtggtatttaaggtgatggcttgggctgtttcagagagttactcagtttt

SEQ ID NO: 29251 - DNA, 864 bp, Bovine  19866881585394
  misc_feature (1)..(1): n is a, c, g, or t
naacctagacggaagaagggaaattttttccctctcaacataatctgatatttgctgtaatccacctttcaccctttaaaaccttccttcttctgttttttttttttttttttttaccttcctcttctctcagaaagtatcagtaaccattttgtcagacctactttgagggaaagatgaaatttctcaaactggctgcagaattaacaagtactttccccaacagttattaccttgatgttgggactattattgacagtcaatggcagctaagactatcctaattgttagtgaaagaaattaatttcatgaagatgtttccctccaagttgttgttcagttgctaagttgcatcaaactcttcacaaccccatgaactacagtgtgccagcagagcgatatcccacacaagtaagtatattagttattttcccctgaatagatggcaaatgacagtgttcatcataattgttcattgaatatgatttctaattacacagccatgagcagggctccagttttcattccaattatgttgttccagaggaatttttccatgtttctctcacctagatatgaattctctgcctcagtctctctacctactatagaaaattggctggaccaacctttgttctcactatggaatccaaaaaaagtgaacttgtatataatcctattgttatttataactcacatttcatctccaaggaaggaagtccctcctcctctttaaaaaaaaaaaaaaagggttttgatctatgtggacatcttgaaccataaaactttttgttgcaatcatgaagccaggccatgttgttttattagctggataaatgcagccgtcacatctggtcaggccag

SEQ ID NO: 29252 - DNA, 931 bp, Bovine  19866882177289
  misc_feature (1)..(1): n is a, c, g, or t
ntttttaaagctaggagtcgtgattgtatttatctctacatagtattccttggtgtgtctcaccgtacatcagagtcagcctttctcccttgaatgctcacctgagctaatgccaaagcgccttctcttcgtgtggagtggacagctgagggcctggaggctgagaagaagatagtgttcactcagggcacattcatgtggctaaaatttttgaaatgtaagttggttcttccttcatatctcaattgagtattatacaagacccctaaactgtgcccaattactgtttagctggaataattaattccatatttgaatggaattcccttcaggctccaaatagatgccttattatgctaaggtagcttaaacttgtagctctagtcctgaagagcatttgagaggggaagggggcttttgctccttaatcatgttaattatgaaaaatgatcacaatcagagacttttaccttggtgagacggttgtgcaggtgggtttttgtcagaatctgcttaggaagaaatagcaagagaaagtgagtgaatcagtgatcttaaaccaaaaacattcccttgttgacaagattattttccaaagtgatgacgccatattcacacttggaatctagcgctggattgaaagcgttcacctatgaaatatttatctccagagcttgcccaatcattgtcgtgacagtgtacacgtgtgatgacagaagggtcaccatgttattctgcatgatgccaagaactttgtgcaccagtgctgaatccaatcttgaagacagagttttgggtggagtagaacaatagcttttgctaggcaaagggagatgcaacagtgtccctgaaaaactgtgtcccaatctaggagaatctggtgaggagttttatagcagggttcaagggtgggtttgcaaataaggattag

SEQ ID NO: 29253 - DNA, 1891 bp, Bovine  19866880448493
  misc_feature (1)..(1): n is a, c, g, or t
ncccatgtaatgtgctcagagcaattcatggcattggctagatccctcaaacccagtccatttatttcccacttcccttgagcttttattatagcatcatgtttggagagaattaagatgaggtgagattgctgtcttgaggaaccaaggggcagtatttctccagcagtcacctctgaaggagagtcaacctgggaagcagcacatgaaacacatactaagtgacacagcctctggagtcatttacttcttttgtgtccgtggcgtgggctggggttgctgatacggtttcctctgtgtggctccctccttaggtgggaccacagccttctgtcgatacctgttggacagctcccagtactgtcagaaccatggagggtggggattaagcagctccagccacatggtagtagggaaaagagcattggctgtggggtcgctcaggcctgggctggctcctctgtgacgtcctgtactagctctttagccttggaaagccatctctcattgagcctcagtttcctcacctacaaatggaggataacaatatctactgtctcccagatgactcaggttaaaagaaaaggaaaatcccgaattgcttagtaataccagagacattgtatcacataactgaaaaaaaaaaaaaaaatccagagataggacttcaggcatagtttgatcaggggtctgactctactcttctgccataatcttagctctagtgctgtccttattctgtgtgttggctttatctttagactggcttctttcacatagcaaaattcctgtatgttgctcgtttcccataatcagaaagtcttagcttgggtcagactatctttggtaacatgaccactgctggaccaaccactgtggcactgggagcatcttcagtccactttgaagatggattaagtactcctcaaatcacctgctagccagggagagatgaaataatgttgggaagacaactgccacgctaaccagagtggaattttgagcactaaggagctgctgagatactactatgccagttttagagaatgattctgtgctgggcaggcagtatctcatttactcctcacacccacccagcatcatgacatgaccagcatccttggaccagcttctcttccaaacacttctgactgctctgcgtctcagatttcccatcactgtcgtcctcctaccaaccgtgacactatcaatgatttaaatggtggctgaataatgaccccctaaaatattcacgttctaatcccagaacctggggatgttcacttacacagcaaagggactctgcagatgggataaaggttgaagatcttgaaatggggggattatcctggattatctgagtggaccctaaatgtaaacacaatggtcctcatatgatggatgcagaggtagacttaaccatggaggaagagactgtgacgatgtgagcagtgattggattgatgtgctttgtatgaaaggaaggggccacagccaagaaacactggcccaactggaggctgaaaagacaaggaaaccaattctcccctcagagcctctggaagaaacaagccttgctgatgtctttaactttagctcagtgaaaatgatttcatacttctgaattccaggactgtaaagataataaagttttgttgtttcaagccactaagtgtgtggtaacttgtcacagtggccataggatgttaatgcaaaatataattacatgagctgtcgggtatggagccaggcactcatctaagtagtattacttcatttaattctcacaatcctggcaggtggtgagtattattatcattcccattttatagctgggaaaactcaaccaaaatgacattatagactttgctaaaacattctactcagaagt

SEQ ID NO: 29254 - DNA, 2542 bp, Bovine  19866880633728
  misc_feature (1)..(1): n is a, c, g, or t
ngggagacctggcattcggtccttgggtcggggagatcccctagtgaaggaaatgacaacccacttcagtactcttacctagaaaattccatggaaggaggagcctggtgggctacagtccatggggttgcaaagaatctgacacaaccaagtgacttcactttctttatttagaccttgaactttggggttaaacagtctggattccctctttacaatctgtgaggtcctgcttgtgttactcaataatctttcagtttcattatctgcaaaatggggatatgataaatacaatcttcttaaaagtgttgtcatgataattaaatgagatcatccacaataagcacttagcatattgcctacttattattattcaatttgttatcctagattttggcccttttctgaactgaccctttcctgaatcaaccaaatccctgcacattgaaaaataatagtacagttgtccctttctactgcagggcattggtttcaggaccatagataccaagatcatacaacgatgtagtatttgcacataatctacacacatcctctcatagacttcaaatcatctctaatttacttaaaattcaaatgctatgttaatagttgcagatacagttgtaaatactatgtaaataatcaccagtgagtagcaaattcaagttttgctttggggaactttctggaggtttttttttttttttcacaagtatttttgatttgtggttggttgaatctgctgatgtggaacacctggatataaaggggtacctataatcaaaattctaagctctcaaaggaagcatttgtaatttgttccaagtattatggcctttttaatgggtattaatcccatccacagttagctcagttactgtcttcaggacatttcccgtccaaagacagtggtgtagtggagcaaaaactccactaggagccaggatgtggcttgttgtcagaactttgccaccaaccacctgattgactttgactagttctttcccacgtctgattctcaagttcttcatttttaacatatgcaatggccaagtcctcttatagattaaggactcagtgaattataggacaccttttccaaaggtccccagagaagggagaattctatccctttggcgaaagatcttataggaggcaaaggaaggcataaagacaaaagtctttttctaagacaaaagatcacataggagattgtaattccccttagaagaatcctttctaacatgatggacccatcagtcagcaacattttggggcactctactgagtacaaggtacaattttgtacagaaaaatggacgacaacattctagaaagcaacacttggaaaatgtaacaaatgcattaagtcccttatataggagcatttgtgttgagaactttcaaagatgcaaatgtgtgttcttcagtgtcaggtgggagtgaacttgcagcttgccctctgtctcctactcctgatgacctttcagctccaccatgtcccacctcctctctgtcctccagtcagtaactcttcttgtctgttcactcgatgccagcccctgtatgccagctgttgtacttttcaaggtactgaagattgaaaattctttattttctgtgtgtgtgttttttacatgctatttttgtgaaaagtactaagcttattacagtataacactatatagccaatcatgttagttacctaggttaactttgttggacttatgaacaaactggacttaggcgctcttggaaaggaactcatttgtatataggggacttactgtatagcaataaaatatgtataattcattgattatagtaaataattatataaggttaccatgtgctacatgcatgactctaagcactttacatatatcaactcatttcatcctcccggcaacccacacaagatagcttttattattgtcccctttttctgggtgaggaaactgtgatgtgcaaaacttggtaaatttgtccaaggttacgttgcttataagtggtgaagctggaattcaaatcctggtggtctagctctaaattacgccatgctcaccactaagacataaaagagtaagtggggccaagtgaggacagagaggaggcaagataaagagtctaactatggcaggaaggagaatacgtgtaacttaatatagctgtgaaccagagcgttcagatcttcacaagtcaagaggaagtgaaatgaatcaccagtctcagcaccctctcattctaagccaattaaaggatgttctttccacagttctgtctcctttgcatttccaaagtaacaatgcactccattatgaaaccaatattttatatttaattggtatcatcttcacagatcttataagtttcttcctttctgtgacctgtcctaagcactggagttcaaacatgaaaagatagaagttattattaaattctagcataacaaaatacagtaaaatggaacagctttgcaaaacctatgaattatattaattctcccatttgacagataagaaaactgaggttaaaggga

SEQ ID NO: 29255 - DNA, 1497 bp, Bovine  19866880657632
  misc_feature (1)..(1): n is a, c, g, or t
ntctccactatcacaattgttgttcaactactcagttgtatctgactctctgagactccatggactgcagcatgccaggcttccctgacctccaccatctcccagaacttgctcaaactcacgtccattgagttggtgatgccatccaaccatttcatcctccgtcgcccctcttctcttgccttcaatatttcccagcaacaaagtcttttctaatgggtcaactcttcacattaggtggccaaagaattggaacttcagcttcagcatcagttcttccaatgaatattcaggactgatttcctttaggatggactggttggatctccttgcagtccaagggattctcaagagtcttctgcaacaccaaagctcagaagcatcaattctttagtgctcagccttctttatggaccaactcttacatcaatacctggctactggaaaaaacgtagctttgactagacggatctttgtcagcaaagtaatgtctctgccttttaatatgctgcctaggttaggcatagcttttcatccaagcagaaaatgtcttttaatttcatgactgcagtccccatctgcagtgatttagagcccaagaaaatgaaatcagtcaattatttcactatttccccatctatttgccatgaagtgatgggactgaatgccatggtcttagttttttgaatgttgagttttaagccagcttttttgctcttctcttttcaccttcaccaagaggctctttagttcctctttgctttctgccattatgggggattatatacaagaaaaattattattgttgtttttaaaatctcattatcaagtctatataaccaagttggtttgaaatcagtcaacaaagaataattagatcttgtgcaactggtcgttagaaagaattcagacatttatcgttctttgaattaactgctttgtggctaactcttattttcaagttggtatgtgtgggtctctctgatggtgccctgttcttaggcactgctctagaaaactgtcagtaacacgagttttctatcattttatcaagagtggagattccacatgatttttcagggacatgttcacctcgaggtatggagcaggttgtcagcaaacaggcagaggactcagcaccagtgagtagaaaaaacattgccctctgacagcgatgaatgtgcagtttctgagctgcattggtgcctgcaccatgcagttcactaactgcaggtcattcccactctccaaatcacagccatgacagcgagcagcgagttcagtctaaaacctagaccacaccaaggagtaggcaagagaataaaaatcatgttaccagggactggactcccataccaacagtaagtttgactaattttatgatttcattgacccaagtaagtcttctcttagtattagggacatagagcatgagaactcttccagaaaagaaagaagttttatgaaggaagttctcatgcttccttcataaaatca

SEQ ID NO: 29256 - DNA, 2804 bp, Bovine  19866880686697
  misc_feature (1)..(1): n is a, c, g, or t
ntgggatcttcccccggatcaggaaatcgaaccctgtagctcctgcattggcaggtggattctttaccattgagccaccaagggaagccctgtccatagatttcaagtgacataaagtgaattctttctttttacggctcaagttggcttgagttaggactgtatcacttgtaattgaaagagtacccgttaattcacccagatccataacatatctgaagcatctcttttatgtcccttcatgtcaacatgtgtgattctctcttcatgttatgatcctactctcatctttaaatttgttgccaggatgccctaacttggctactttgtgaacttgtgtttttagaataactgcaaccctggtcatagtatcttgctctgggtcgtgggaaaccagggtgaggactggaagtatgcttagggtggtctgtgagctactgagggtagagttaagataatgctgaaaaccagcatctgggctcttaagtagggtcgtatcaaaccaataaaagtgggaaattatcagacccaaggcaataagtagcccagacactggagcatagacagagagataaagacagttgatctaggatggtcagtctgaggatggagcctgagggctggggtctgtttagtgaacagaaaatagtgactcactaacattctcaggggatttctcaggagataagagacagagtggagtgaaaactaagcgtcaatttgggtagggctttgaacaccagactgaagggtttagaatttatagtaaaacaaatggaaattcaagactacaattttggaggcaatgtacatgaaattggacatagacaagtaaatccgtcaggaggatcccactctgactttgagcctgggtgatgagaagaacactgctatcgtgcctggaagtaagggactcccacgtgggaagctggttttgcagacaaaggaaggaaatgttgagctggattttagatgagtggaatttcacatgccaatgggtgaaaataatgtggaacactctgacttgagatccagagaaagagctgagctggagtcattcccttgaaatgctgggggtcattggaggtcattgcaaagacaaagtgaagctgtaagtgtgaccgacttttcttagggaaaagcgccaagaaaatcgacctgtcggattcctttacttgttttatggaggagattggtaatccatctaacagacagcacataaacttaaaaatatatatacggtgatttaggaggaaacagagaagcctagaggaggatctaatcagctcatggaatgattcccttagagggaggtattcagagctgtgttccagctccttgtgacagggaagaggctcttctccaaaagaccacacacaaacttggactttagaaacaattgtggaaaaaaatatgaggcaactaccacacagcaaacatcagtcacagttttatcttttatttgcaactttgtggcagaaagccttcctgcaggaactcatggctgacagaatatattaatgttctgttcgcaaggaatgtgtggatcgcttactgatgtcaagaaaagaaatggaacggggcaaaagaaaggaatgtcagggattatttatcattaacctttccctcttctttgtccctgtactccatcggttattaatctctgacaatgtcgtcgctctagcgtctcgtcaacacataattaggaaagtactacggaccaaagtataccaggccatcataagagagaggataagaaattgtttctaccttctggtttctcagagacaagcgacagataaaacacaacgagcttgctggcgcccacaagcaaccagtgccgtggtaaaggtagtgatggagagttactttcagtctcggctgacagaggtttccctggtggctcagcgggtaaagaatctgccttcagtgcaggagaccagggctcagtccctgggctgggaagaccctctggagaaaggaatgggaacctactccagtattcttgagtggagagttgcgtgggcagtaacggcctggagggctacagtccacggggtcccaaagagttggatgaaagagtcggacactactgagcgactaacactttcacttctggtcttggttgacagaagtcttttctgacttcccccaggaagtgatatttcctatgatttgtcatatgacataaaatatgagtagggattttccggtcaaagacacatgggagaagggcattccaggtagaaaagtaacattacatggtcttactttattaacccattcagcttaccaaaacttatgaaaatcctagacatgatgccaggaactaacgatacagaaataaaagaaatgtacacaaagcagccagttagtattataatccattctctatgctcccaagatactgatcttacacatttctcttcatctctcttagattccagtttctactgacacttgaaaaaatatgggttattctaggttctgcaagggcaaaatggagcccctttataacccaagcagaccgtatcacaatggaatcattgttcggtgggctttttccttcatgttttggaaacctcagtgttttctgtctagggaattaatgatctctctttcccaaacagctggggcaagctgggatacttgtgttaactttggatacccagagcaatcagaagtcctcccgctcagctgcctccagagatgttctgatttcagtgctgtcacatataatcctgcctgggtcatgatgaagcggggtttaaagacaacataagccctctgccccgtgcggcaga

SEQ ID NO: 29257 - DNA, 1344 bp, Bovine  19866880809627
  misc_feature (1)..(1): n is a, c, g, or t
ngcgggtgcccagcctttgaggaaccgagtggctggaaagaaagaattacggccaagatgaaatgacctcttcttcgctcaaaatagatttctggccaggaggcattcttccatgatcccttaacagctttcaggaaaatagataattgaggccataaagcacactgcattctgatacatgatgtaacttataaaggaaaggtccatctttctgatcctgccagccaagaaggaaagagaatgatgcttcctgaatgaggacaggctagatcacagaatgcttcccacacatagtgacctgcatgtgtttgtaaccacgctgaggccttgtccagtgtctggcatgtaggtagaattagagaaatacctgcaaagtcaacagaaacatgtattgagtacttacttggtaccaggcattgtgctcagcatggggacccagagataaagagaacacacgtgtgacccctcagaactcactgttgagtggaaaaaaaagatgaggaactaaacaactgtcacttcatgaccatggtatgaaaataagtcccgggatcaaagctcaggtagtgatgaaacctgctgggggctatcatgggaaaatctacacaggagatggcgtgtgaacttggtcttgaactatgaaggactgtaccactttacagataaagaaactaaggctcagattaaaaaacttgctgaagtcacagagtcgttcaactcagaagctcccatccttggcttgtgcacagaacctggtctcttaagcaggggtaacaggtgtctgctttgcagggctgaagacaagcttcattcattcctagattaacttctaagacaatttgatgatgcctgtagtgtgttccgcctggaccagcccacagcagctcctcattatgcgatgttcttaagaaaagttgaaagtgttagttgctcagtcatgtccaattctttgtgaccccctggactgtagcctgccaggctcctctgtccatggaattctccaggcaagaatactggagtgggtttccattgtcttctcgaggggatcgtcacgatccagtgattgaacccagctctcatgcattgcaggcacattctttactgtctgcacactggggaagccctatgaaaagttgctccggtttaatctgaccccagccactgtctgagttggggaggcctcatggtgtccggctccccagcctctgccccaccaggacactcactctcccctcacatcctgactgcctttctgtggtcattccaagtcaaaagaaaatgacagtcggccctcacgtcggggctatgacagctggggctggatcttttttcatctctgtttct

SEQ ID NO: 29258 - DNA, 1582 bp, Bovine  19866881007232
  misc_feature (1)..(1): n is a, c, g, or t
ntcccttggactgcaaggagattaaaccagtcaatcctagagaaaatcaacccctggatattcattggaaggactgatgctgaagctgaagctctaatactttggccacctgatgtgaagagctgactcactggaaaagaccctgatgctgggcaagattgagggcaagaggagaagggggtggcagaagatgagatggctggatggcatcactgactcaataggcatgaatctgaacaaactctgggagacagtgaaggacagggacacctggcgtgctgaagctcatggggtctcaaagagttgggcacgaccgagcagctggtctgagcatggtgtctgttcatgagcacatggcgtgagaggacaaggatttacagtctgtatcggtctgtggcctccagcaaggcgcccaccccatccgactggatgtgccactaggtttaaagttacatctccgtcacacatcatggctctaaacacaagccaactgcttcctctggcctcgaccattccagagtaaaacttgcctatgttggcttatggaggtaggatacatccatttgctgacttcttttggcatttaacagattttttttttttttacagcctgacttgtgactacgttgtttgctttaaaaccaaacctcagtgtaagctgtgattccaaagtagagtaggtttcatccaagtagtatatgttgcattgtgacacgtgtagcagaaaatacggaagttagcaaaacaagtagagatgggaaaagccacagtctggatgcccacaactcctggagctggcaggtgaataataaatgtttctttgaatgaaaaaaagaatgaatgactcatctgctgctgacagtcaggaaagactcaggtgtcctttctgaaaagactgttgatgcaaaaggcacagggcatttttgcagcactgtgttggaaatgaagtctataaatattcacaggcaggcaaatcagatatgttttgaagacccaagtggacactgattcaattctcttctctctccatctagggcctgtcaggcatcgcatctcaagtgctttatggatgtggctaggaggaggcaaagggtcagctggggaatgcgagactcaaatgaattgctcccttgctggatggaccctcctggtcaggtcactggcaggtcactgatgaaatgtccctctttgtcacattctccgttcctgacacacaggacacggaagagctgggaatcgctttagctacctttagtagtgctttctctcaggacttccctcgtggtccaatggttaagaatctgccttgcaattcaggaggtgaaggttcaatccctggtcagggaactaagataccacaccctgaacaactagagtctgtgctcccacataatgcaactaagacctgaggcaggccagatgaaaaaaaaggggttcttcttccagaattagcttcaaaaatttaaaaaatggaggtgatggtatgagcctggggggttttgcttagcttggagatagatgcatgtgcgggagtctggcctggggacaatattaaacattctccagtagcgtcgtgtcagac

SEQ ID NO: 29259 - DNA, 958 bp, Bovine  19866881058165
  misc_feature (1)..(1): n is a, c, g, or t
nccctcccacccctttcactgcttcctcgttgctaatttcctcatgtttggcccagtgccagggggacaggacctttccaggtcaggatagtataccaatggtatggacagtcatagtatgaactttggactctgacccgggttggaatccaccctttgccttttttctaactgggttacctcgggtaagtcacttaacttcactgagcctccgattactgaaatgtgaagtgaggtggtcatactgccctcataggtttgatttggaaaccaaatgtttagaccgggctgacacattgtaaatgcttgaataaatgataaccatgattgtctttactacaacaagagacatcagagaggggagggttttaattgatggagtgtgtgctgtgcgttatctatacctacttaaaaagcctccaaactttatttccatccttatcacctagtgattttttttctttgcagcatttcagaaactgctgtctgcagaggaaaaggttagcagctatggcagaatcccttctggtgaaatctgaaactccgtaaacgctacagaatttggtattttgctcttaacctgagactcaggacactgtgggggtttgttaaaaagtctggagaggtattaggaagtttgagaaaaccaaagtaaatctccatgcagtcgggcctggactaggtgggccagtgggagtgattcattgtggtttcccacggaaatgccacatttggggtttttctacctggaggatgcaacttggtggttttgctgtaactgtttcaaattcctttgaaacccaatctgactttgaagagggaacaacataccccgtgagtgaaaaccaaacttgaaatgagtctgccaggggactggaagttggatatcagctcctggaaccctcaagtaaggaccagacatcaattttagacccattttgtctcttatctgcaactc

SEQ ID NO: 29260 - DNA, 1757 bp, Bovine  19866881105198
  misc_feature (1)..(1): n is a, c, g, or t
ntctctgtagatgaagaatatagaaagggcttttccttgtgtgatcacacttcagtttcaagcttccttatgaaagatctaggaagtcataggtcctgatggttctgagttcatttatgagtatgtctttcaagagaatgcagggccagcatccacagacaatgaacaaaatggaacacaaatttttcctgctctacttccttggaagggaacccaagttccaatctaatcaaatcaagtaggaaattttcatttttaaaacaatttttaaaattatttgaaggtggtggtccctcttattctgttgcatttaataaaatccactgtatcttttattttcttccctgttattcattcacccatttaggccttaggaaaagggttctttattttgctttgtgatgagaatccataaatcaatcatgaaaatgcagcagtgccagtgtattagactgattcatgaagtgttttaaggtccattttttgcccagattatgcttcactttcattctaataaagatttcagttcagttcagttcagtcgctcagtcgtgtccgactctttgcgaccccgtgaatcgcagcatgccaggcctccctgcccatcaccatctcccagagttcactcaaactcacgtccatcaagttggtgatgccatctcatcctctgtcgtccccttctcctcctgcccccaatccctcccagcatcagagtctttttccaatgagtcaactcttcgcatgaggtgaccaaagtactggagtttcagcttcagcatcactccttccaaaagaaatcccagggctgatctcctttaaaatggactggttggatctccttgaagtccaagggactctcaagagtcttctccaacaccacagttcaaaagcatcaattctttggtgctcagctttcttcacggtccaactctcacatccatacatgactactggaaaaaccatagccttgactagatggacctttgctggcaaagtaatgtaaagtaatgctcaaaattctccaagccaggcttcagcagtatgtgaactgtgccctttcagatgttcaagctggttttagaaaagccagagaaaccagagatcaaattgccaatgtctgctggatcattgaaaaagcaagagagttccagaaaaacatctatttctgctttactgactatgccaaaacctttgactgtgtggatcacaataaactggaaaattctgaaagagatggaaatatcagaccacctgacctgcttctttagaaacctgtatgcaggtcaggaagcaacagttagaactggacatggatcaacagactgattccaaataggaaaaggagtgtgtcaacgctgtatgttgtcaccctacttatttgacttatatgcagagtacatcatgagaaacgctggactggaagaagcacaagctggaatcaagattgcagggagaaatatcaataacctcagataggcagatgacactaccctatggcagaaattgaaaaccagagacattacattgtcaataaaggtccatctagtcaaggctatggtttttccagtagtcatgtatggatgtgaaattggaccattaagaaagttgagcactgaagaatagatgcttttgaactatagtgttggataagactcttgagagtgccttggaccacaaggagatccaaccagtccatcctaaaggagatcagtcctgggtgttcatggaaggactgacgtttaagctaaaccccagta

SEQ ID NO: 29261 - DNA, 2713 bp, Bovine  19866881136594
  misc_feature (1)..(1): n is a, c, g, or t
ntccagtactttgtcttcacgggggtgctggccatggtgacctgtgcggttttcctccgactcaactctgtccttaagctggctgtgctcctgatcatgattgccatctacgccctgctgaccgagaccatctatgcaggcctcttcctgcgctacgacaacctgaaccacagcggagagtaagtgcccaccactgtgctcaaaaagagctccacttctagtgggaaatgaaaccattgggaaaacgattaaggtagagttattgaaacttagagactgattgaaaattgacatatttctcatgcactttctggatgacaagtttaggcaaagttcctagttatccattttatcatgtgtattcactacagattaattcatggattaaagtttggactagaccatagctcaggtctccccacatgtaataatttacaattccttcaactgtaatagctccgagatttgtaaggtctggttgtcatttcgctgtagcactatcagtaatagcagaccctgtgcattgagaagttgctaaactccttacattgtgtaattttgaaatatggaaaaatacaacaacaacaaaaatcttagcctagatttcttagagaacagagcctgaggcaagcatgaagtgctaatccaaacccaggacggcaaaagtgaggggaaaggaagtgaaaaaggaaaggatggaaggcaaatacaagccatattatgctgctcagatgaatcgtgaagctggggctttggaggatgtctcgaagtatctctgggtaggcgacaaggtagggaaagtctctcaggagggatggaatctgttggttccttccctctcatttctcccattagtctcagtctatactctggatgtactgcctggtgatgtacctcagccatttctacagcctttggggaaaccagaccccacacctgccttagggagctccacgggaagctggaagtgatagaaggagccagacaccgagcagaaggctgattggcctcgagaggtgggaagaacagaggtctctctgagaccagaacacgtggccaacagtctgagaaatagaggaggaaaagacagtccaagaagtctcagaaaatgtgcctgagactaataatgggaacatttatgattcaacagctggaaataaacaatgtacacaattagtcatgtttccttctgcattttaaaaaggataaagtatttcagatattgttgaagttcccttccccagcattgttcttttatcctcctcccaagagtcaacttctaatgcatttaatgtatatccttcccatccatgtgttttatattgggtaggccaaaaagttagttctgatttttccatgaactgaaaaaatcagaacgaactttttggctaacccagtgtgtgtgtgtgtgtgtatacatatatatatgtatatttctttttaacccagtatatatttagttgtgtctgtattttaaattgtttataaaattcttatgctatcatgtaatattgtagtttttagacacatctaggttcatatctacagattcaactcattttagatagaacataccaagatatatttatcctttaacctataaaaacattattgatacttcagtgatcaccattgaaaatatctctttgggctcatatctcaaagcacacttactggaatagatggtatctgcattttcaactttttaagatcttgccaaatggctctccaacaagtttggaacagtttctctcttacaagcagtggtctctgtaattcttattcagttccttagtgagaattttatctcattgttttcattagtagttccttcatcatgaataagtttgtgcagtttgttgttgtttattggccattttcggtaaacttccaggtcatgtctcttgcctggttttctattaggtgtttttgcctttttctcactagatttgtaaaggttctttataaattctaggtactaatttgtgcctgttatgcgaatgcaacatccgctttatatccattaccttatttaaccctcatggcaacagtctgaggaacacaggcttcagatcagatcagatcagtcgctcagtcgtgtccgactctttgtgaccccatgaatcgcaggacgccaggcctccctgtccatcaccaactcccagagttcacccagactcatgtccatcgagtcagtgatgccatccagccatctcatcctctgtcgtccccttctcctcctgcccccaatccctcccagcatcagtcttttccaatgagtcaactcttcccatgaggtggccaaagtactggagtttcagctttagcatcattccttccaaagaaatcccagggctgatctccttcagaatggactggttggatctccttgcagtccaagggactctcaagagtcttctccaacaccacagttcaaaagcatcaattcttcagcgctcagccttcttcatagtccaactctcacatccatacatgaccacaggaaaaaccatagccttgactagacgaacctttgttggcaaagtaatgtctctgcttttgaatatgctatctaggttggtcataactttccttccaaggagtaagtgtcttttaacacaggcttagagaggttcaataattacctggatgcacacagtcagtaggtggtagatccagattcaaactcaggtctttcggctcaaaagcccat

SEQ ID NO: 29262 - DNA, 671 bp, Bovine  19866881341777
  misc_feature (1)..(1): n is a, c, g, or t
nctcctggcgctgacagcccaccactctcgcaccttcagcgacatgaccacagtgaggtccctgccggagggtgtggtcgagtccagagcattccattacctgcttttcaggtgacaggcctgacacggccatgtaggtactaccaatggtcttaatcttttcaatgtcttgaaaccggtcttcaccgagcagctgaaacagacccagacaacaatgtcagtcctggtccctgtgcttccagcagcctggggctcctggaaacagacccctggcgcaccgtggggaccacctcgggctgggttagcatccttggggtaaccactttcctctctcggagtcaaacatccaggccatcaacatatgtttattgatcacatgctaagtgttaggtgcccagacgggtgtgaccagatactctaaggactagatcagttccaatgagtctctgaaagaaacaaatctatcttattagatttaagaataaagggcaaatattccaaaattgatcaacacctccttttggctttactgtcagcatgtatttaaaatcttagcacttcctgtcggcacctggtctaaggcaccattagtctgtacctggtttgttactgctgtttagttgccaagtcatatgcgaccccagggactgtagcccatcaggctcctctgt

SEQ ID NO: 29263 - DNA, 1017 bp, Bovine  19866881487340
  misc_feature (1)..(1): n is a, c, g, or t
ncctgccctgcacccccttcacccctaccgcccccagagagtgagaaaatacagaggtaggaggaacagaacgattagggcaagtgcttgaggattgcccagagggtgcagagagatggagaaagagaaaaggcagcggtgagaacctgccaggcaggtacaccgtgcggaggtctgtagacgacccagatggcagccttgaccatcaaagagtccaagtctcccgctgagcagctttcagactcacccttgcttgatttgcctctgccttcgctttggaacaagatattcgtattctcagtggctgcctcacattattaagctgcatcagcatcagccttgaaattggccccttctctcctgggagcacctgacaaagcgatccgcctgcgttctccgtcgtttgcctcccctgggtgcccaggaataatggtgtgttgtcagggagtgtttttccagcctgtttggggggaagtttcccatctgtgtggagccctttgggaacccactgctgcacagaccttctgttcttatcttaaactcctgcagagacttcctatcaaggtgatccataaaatcaaaattgcgcaggcattaaaaaaaaaaaaaccctcccaacaatgatatctgggctgtagaaatcactttccagccttcatgatggttgaccacgcagaggaaattgacattctacacactggtcactcccattcttctgctactttgcccacattctccaatctttcctccctaaaatcctactcttcaacctccaaggcctaacctaaatgtcacctcttctaggaaggtcttcctttccttgatttcctttcttatttcttaaaatcatgtttgttgattaccttttctctatcacaacgcagtatgtatcagttcatcatttgcatatccatattccctgtagattatgatctcctagaagatgggcaaaatgtgtctcttgtcttggtacccctgatgcctccctattaaaaccacagaagcaaaaaaaaatta

SEQ ID NO: 29264 - DNA, 741 bp, Bovine  19866881946055
  misc_feature (1)..(1): n is a, c, g, or t
naagaccttttccccgtaaaatgcatggttctgacagtatagcccatcttccttctctaaccctgaccttggggcttgacgaggtacacgaaggcattaataattagtaccaaggagggcaatgccagaggctgcaggttctaccaactcttcattcctgactacacgctagacaagtgtctatgtgcaatgcttacgatatttaggatggcgcccaggaaattaatcaagatggatgcaaagatgatgacgttcctggccaaataggtctcgttaatccaacagcaggttttccggaggaccaggggcaaacacttataatcctctgccgtagtgatgaggaccagagctgagtgcagcatgatcaggatggaaaactggatggccatgggcatcaccctgcaagaaacacagaatgttgggtcacgtggcattaatcagggatcccccctctctgtgcaaccttgtcaatcatgttcaggattgcccttccccactccttgcacccaataattcctctaaagctctcttagcccaggaaaggggcttttaacaagagacttttattaacaagagacttttcaaaaattacacccatccctataaaatattctcttgagaaactttgcaatgaacatcaaatattgggcttgatctgttgcttctgcccattttttcccacttatttcatcattcctctttctcacttggcaactgctgccaaggcaacacaccactgga

SEQ ID NO: 29265 - DNA, 1372 bp, Bovine  19866880633349
  misc_feature (1)..(1): n is a, c, g, or t
nctcgtagtaattgcgacacctgcgttcagtagttgcggattccaggctcaagagctgtggcgcacgggcttagctgctccgtggcatgtgctccgtgggatcctcctagatcagggatcaaacccatgtctcctggattggcagatggattctttaccactgagccaccagcgaagcccagagacagtttcctttgactgttttgttttcctcccccctgaatatgagctgtattttcttgtttcttggtacgacttttcactttctgttgaatactgagccatgtgcagctgtttggcagatgggatcagctcctatgggtcccctgtgttgtcagggttggaggcagtgagaggcagatgtggattccaatttgttctcaccttcacttcatgtccaggttttttttttttcctgtcttctggaatctgctgacctacagcaacttcaaggacaggcagacggaccaccttccacagacctcttccccagctgccacagttgtgtaaggactcattcttataattaagcccttactccatatcactgatggtggttctgcttcctttaccaagccctgacacaagatcccaattctctgttaaaatttaaacttcatcttttcattcatctcatccatttctttttccatgtataaaaatattaagtatagttattttgaagttcttatctgctaaccccgggcctcccaggtggcatgagtggtaaaaaaaaatctcacctgccaacgaaggagatgtaggaggtgtgggttcgatcactgggtccaggaggatcccctggaccagggcatagcaacccactccggtattcttgcctggagaatcctcatgaacagaggagcctggtgggctacagtcctggggtcacaaacagtcagacatgactgaagcgacggagcactcacgcacatctgctaaccccagcatctggggcacctctggcttctgtttctgttgactccatgatcggccaccttttccttcttatgttcaacagtctttcattgcgaggcaaacactgtaaatgagatgctgtggaccctctggattagtttctcttcctgtagagagtgttaagctttgttttggcaggcagttaaattcctggcaaatcacactaattctgtcaaagcttactttttggctttgttaaggcaggtctgtttcagctttcccccttatttatagagtgtagctgttttcttaaggcatggtcttaattccgaagtgtggctttcgtgatctcaaaggagagcacagggttcacctgtgtcctccgttttggctgggcatgaacctcagtatttccctggagctgtgtgacctctgaaatctcgtccagcaatca

SEQ ID NO: 29266 - DNA, 1658 bp, Bovine  19866880634243
  misc_feature (1)..(1): n is a, c, g, or t
ntagatataatggtcatctgagttaaattcacccattctggtcctttcagttcgctgattccaagaatgtcgacgttcactcttgccatctcctgtttgaccacttccaatttgccttgattcatggacctgacattccaggttcctatgcaatactgctctttacagcatcggaccttgcttctatcaccagtcacacccacagctgggtattatttttgctttggctccatccctccatttttctggagttatttctccactgatatccagtagcatattgggcacttactgacctggggagttcttctttcagtatcccatccattcagtatttctagactctgaaacccctggggcaatagatgggaatttggataagccttgcacagggatggaagcatgaagagagatcctctccttctgaccaagggggaatcaagcaggtcaatgggcaatcaaaagaccgttttcccctcaaacaggcagtgagggttcccccagcatggtgacattggaaatgtgtgcacttggtcgggtttctcagttctcccatgctttccaagtctttccaggccatgagaaccatgggacctagaaccactttaactaagccgcatgaagttcttccttccggagaccactggccttgattctggccaaggtgctgagagatcccagagcctcctgtggtgggcaaagacttgctgctagcagctggtcccacgatggagagcttcatctcttcagtactccttgagtaacatgtctaaatgaaaaactccctcgggtttaagctctgattgtcttaatctgtcttaatgtcttaatccttcattttgaaggacattatttttttggtctataattataattatagattggcccattattcctcctagagtactttggaaaataatgttattccactgtattctggcttctgtggtttttgttgcaaaatctgccatcatttgtactcattcctccccatccactggatgtctttttttcatctggatgcctttaaagtgttctctttactgctggttttcagcagtttgaccatgacatgcctaactgtggtgttctttgtatttattccgcctgggttttgttgagcttgttgaaactggggtgtgatatctttcatcagtgtggggaaattttctgccattatttcttcagattttaattctgtccctttttctctctcctcttattttgggactctgtttacacatttgttagtcttttttacctttgtcctttgcccacatcttccttatattctttccagttttttttcccattcatttttagttcattcacatttactataattattgttacagatgtatttaatctgtgattttactacttgttttctaagtgtcacttttttgttctcttccttctttactgccccctggtgtgtaaaacaaatgttttttagtgtaccatttaaattcccctgttgattttcaaaactattattttgagttacttgcttagtggatcttttagggattacagtatacattttaacttatcacagtttatcttagagtaatattaaattagtttcaataaaatataaaaactttcctccaatatgttttctttttctctcttcttttttttatcatcacatatgt

SEQ ID NO: 29267 - DNA, 1652 bp, Bovine  19866880850822
  misc_feature (1)..(1): n is a, c, g, or t
ntatttcttttcacttttatcatattagtagtttagtttacaaatgttgatcttaaattttaattcttagtattatttattttccagagaaagtaggaagtacataaaatatgaactgcttggcagatatcagcctttggtagtagataaatttattaatatactatttcataatctcaagaagctattctttacaggagaatttactaatgtgggaaaggaatgtgtgcattaatgcatccaaatatatttagtctctctggaaaaattgaaaagacaaaagcataaaaattaaactcatgttcattaactactgtctcagtattttatcttatgtaggaatgatgtagatgttcagtgaatatccatcatttaacttaatataactttaaagtttcaaattagcgatagatttgctgaactacttttatgcagacatatcataaaacacaattacttttgagataaagtttgtcagaaaaaaatgactcaatttgattaaatcaaatgtgtacttactaacctttaatatctggtagatatagtattagtttatttaataagaatgcccaagcagaattaaaattttttgtcagcattgtatttaatactgacaactctgaagacatacttatttttattaagccaacaataataaagtaagtcatgtgaccctggaaagtattttggttgattcctatattactggacttttttaaaatgtttgatttatatgcacttcttttactgtaagtcaatttagaatagaactgctttattcatttggtaatattatctagaggtaagaaaatatcatgtattatatatgtgtgtgtgaaaagaaaaaagaatgtatgatatacatatataaatatacagacatatgcaaatagacattgaaggggttttgttctaagattttagtcataattcagatataattacagaactcattaattatatgtgtttacattttgtctcacttgttttaaatccaaattatgtttctgaccagtggaccagtcaatatttcaatgtttaatattattcaatatgttcagtatgttcaatatgagctctaaaggttttccccaatacttgtgggggggtgacttcagtgtttgtttttgtttttcttaacaaataacattatggaggctgtggctttagctccaggtggttttttagtcaactaagatgttaaggcaaggtgcccttctgatgggagcgtgagttattattatacctcagatggttacactccaaaaagacggctctcaggtccatgagaaaacagttctgagtgacacaagttgtggaactcaaagaaagagagtaaggttacaatctttctaaaatagctgctctaaaaggaattttagggaaatatttgcctatttccagtgtttttactctgacacactaaattctcctggaagcattgtgcttttttcaagatgatattttgaaacaattaagacatatttgtggaaggtgcagattttaatttttttctaagtccatatttgatcattaattttattaaaggaatattttaggtgaaccatgatactttttttttccttttgtttaatttgatcctctcataggtttcaacaacatatttgtctactgaaaccatactcacagaa

SEQ ID NO: 29268 - DNA, 1128 bp, Bovine  19866881195362
  misc_feature (1)..(1): n is a, c, g, or t
natcatttggctcactaaggtagtgagttttccacatttgattattttggactgcctttaatataaaattgttagtttggcttattctgtgcaatcagtatctaaatgggatttgacttttaaacattttgaggggaaagtaaaaggagtttatactaccttcacttacttgctttttagttcatagtttatggcttattgtacaatgtaagtcaattgaaagtattgtcgttatagaggctgacaggatagttctggctgggacccacagaatggttgtaccttgtgaagaactgagatctggggttctcactcttaactttgcacatttaggaactgaaaaatgattaggctttttggggagatgatttatattaatcagactcacaaaagacttactcattcactgtcagtccatttgacatactttcactgaactgtgtgctggcagctcttatgggataagttattctaagccccaaatgattttatttggccttagtaagaattataatcgaaatcctaggccacaactttcaaaaatacttagttagaagactattgacactatgatacactcagaatgcagagtttgttatttttattttattttgttttttattattttattttgtttttcagtttgttatttttattttaatcagtttgttatttttaattgattctatttaaatgtcactaaattgtgagacattctgaaaattgaggaaatggattgtatttatttctcccacataagtggagtgtctctaaaggtttgattctcctgaggccctgattatattcctaagcagtttgatgttgagatctgtgggcattgcgtgggatactgagtagtaaggatgacacagtccctggagcagcttaaaatgtttttcagatggtaaaacctggcattgcgatagccaggaacttttggaatcccttcttgtacaccctaaggttctattcagacacccgtctccccttctcccagggccatgagtgtgctctccgagggtgcaaggttgtcttctgtgtttcaggacctgatgacatttgaggatgtggctgtggaattcacctggtgggagtgggggcagttggaccctactcagaaggacctgt

SEQ ID NO: 29269 - DNA, 1441 bp, Bovine  19866881629338
  misc_feature (1)..(1): n is a, c, g, or t
natacattctaatttactttttattttgtgtttaagtcttacgttgaatttataatttcacaatcttcaacatctaatagggataacataagcttgtttgattagtaaacctaggtagaaaaatttgcatgactgcagtatgtttaatgaggacagatctgaagtcatgcctatttttattaagccaacaaacttaagctggccttttaaaaaaattttattggtgtatagttgatttacaatgttttgttagtatcaggtgtatagcaaaatgaatcagttatatgtacatatactactttttttttaaaaagattcttttcccatatagaccattaccaagtattgagttcagttcctgtgctttacagtaggttctctgtgctcccaatttatccctacctcccttattctctggtaaccataagtttgttttctacatctgtgactctacttctgtcttgtaaataagttcatttgtacagtttttttttttttttaagattcagcatatgagatatcatatgatatttgtctttctgtgtctgactgacttcagtatgacaatctttggctcatccatgttgctgcaaatggcattatttgttcttttttatggctgagtcatattccattgtgtaaacacacacacacacatatgtatcacatcttctttattctttcttctgttgatggacattgaggttgcttccatgtcttggctattgtaaatagtgctgcaatgaacatcggggtgtatgtatctttttgaattatggttttctcaggatgtatgcccagtagtgggattgctaggtcacatgattgttctatttttagcttttgaaagaaattccatactattctccatagtggatgtaccagtttacatttccaccaacagtgtaggagggtacccttttctctacaccctctccagcatttattgtttatggattttttgatgatggtcattttgactgctgtgagttggtacctcattataattttgacttgcatttctctaataattagtgatgttgagcattgtttcatgtgtttgttggccatctgcatgtcttcattggagaaatgtctatttggacattttttcttaggtttgtttgtttttgatgttgagctgcatgagttgtttgtatattttggagattaatcttgtcggtagttttgtttgcaaatattttcttccattctgaggactgtctttttattttgtttatagtttcctttgctgtgcaaaagcttttaagtttaatttgatcctatttgtttattcttgtttttatcttcattactctagaatgtggtttagaaaagatctcactgtgatttctgtcaaggagtgttctgcttatgttttcctgagtttcatagtgttcattcttacatttagggctttattccattttgagtttatttt

SEQ ID NO: 29270 - DNA, 959 bp, Bovine  19866880349897
  misc_feature (1)..(1): n is a, c, g, or t
ngcagtcagaccaaccctctgcacgttcctggccctcaccctcgtcctctctctgcagtggagccgacttgctcgctgtcaactccgatgggaacatgccctatgacctctgtgaggatgagcccaccctggatgttatcgagacgtgcatggcgtaccagggtaaggacagggccgccggctgtgaagtgggctgggtgtggggctgtggcgagcatctctcagatcagtgcaggtgaacaagttacctagagacgtgcccatcgcttagtgctcaggaactgggacgggaccccacgatggttgttacccatgtgatggacaagattgaacacagaacaagcctggaaaacgagctgtgcacaaggaggggcgtggctgtcatctgtgtcgcccacacgcatgggcagcctcagctggccccgtctcttcatcagctgtgacagttcaattcaaaacattcacaataaagatatattcccatttgggaaaatacaaagtcaagaacattcacggctgcctgctctgtgccaggcaccacttgggctgccagggaccccagataaacaagatgtgggctgttctcggctcacaaatgagcttcagagaggaaacaaatacagcagagaccagcccgcccccgccaccccagtacatgctcctgaaaggcctcctctttagaaatatatctcaaatccagaccctggactgcagtctgaggtcctcccctcatctctgcccttgtgtttctgcccagatagctgcaggaacctcccttttggcctgcccattccctggctctggagctttccctgtccactttctgtagaacttcctaataatttttgtgccagtctggttaatctatgatcccaccccttctgtacttttaagtggagttatcaaagccataggattataaaggaaaccactgctattaaagtaaggctcaccaaata

SEQ ID NO: 29271 - DNA, 1439 bp, Bovine  19866880494739
  misc_feature (1)..(1): n is a, c, g, or t
natgtgccctagaaagtgaagacctctgatttgggtatttatagagatgctatgtatcttccgagggcttggctgatgggtcagttactcccaaatgccagttttgaaaatgacgccagtgcatgatgaaattttctgtggcccttaatgaaattacagagataaggacaatgaagtgagttttcataaatctattttagtcaactgtattttattctgagattatggcctcctgctttttcagtttttaaatgtgctgggttttatcaaaaaatggaaagagtaggtgactgttgatgtttttgaatgtctttcacttgaaattgtccttgactattttctggctcacaaaatccttaaatcttgaaatatcaactttgaggttccttgaaacacctacaaaacaggattcactgataattagttgatctttttttcaattcttcagagaaccatccactatatatagtaggtgataagtaacttttgcagaattactgaataaacaatattgtagtataacatctggctgtgtgtttatcactgactggaaagaaactgttgcaagaggccaaacttggcagactgagaagtatgcaccaggcatttagctctgacaagctttcctctcatctagccggcagcacctcggacagctcagctacaattacacggatctctgaggaaacctatttaaacacaaaggcatttttacattatcttttctctacttcattatttaaataaaaatctcttgttcacacacaaggctttctctttgctcatttaaaactcgctctcggattgtttgcctcatggtctgcaattccccagcaaaacagtcagctccaactctgagcttcagaaatgccaattttaattaaaagtgcaattttcaaatccacctaaagctcagctaggatatggcacgcttgctgccctgtgatctttctggcttccttgttgattaaaatgggtgctgttctaagtgctttgtcaaatcttcacaaaaatgagacgaaattgacatttacacctttataccagcaagaaagtgatatattagattcacctctgttgccataaaagcttacttctggtttaaggacagcaagaggccaataggtccctagtgataagtctgtttttatgcttcagctttaaaggctttctctccagctggtggtggggtaggggagagttactatgtcatttacccattgacttctccatctctgtcttcctagagttccctttgtagctatgcaaggactttgagcttttagggtaatggttctctaactttagtgaatataagaaaagcacaaaagattctcttagaagcttcattggcttctagagactctgattcaacagttttgagcatgactccagaatctgaattctaatgaagcacccaattattctgatgaaggaag

SEQ ID NO: 29272 - DNA, 2617 bp, Bovine  19866880584534
  misc_feature (1)..(1): n is a, c, g, or t
ntcggtatctattctctgctagccctggcagtaaccctctgaatgctccgtattgattggctttgtgtctgtaaaatgtgctggccagggaggtggggggcttgggctgtcatcaaatggagcctagcttgttggagtttctgcatatcggtagcccgtgtaactcaaatcctatgggtcttaactcacgtggacattggagggagagcattggtctccttgattcctgaacagttctcgggattggaagctgggggctattctgccaaccgtcactgtgcaatcttgctctgctggctggggaggtcacagtaggacaccccagggtaaagacctccacatccagggtcctgaggcctgaagatctcttgggaccacagatttttttctctatacttcagcacaggcccagtgcagagccaagactggctttagatttgggaaatctcttgctccacagattacatattaattatcatcagttcagttcagttgcaacggcagctaatatttattgaacatttacaaggtgccaaatacagtgggatgtggattacagatgcaatcttttctcacaacaaccctgggaagaagatattactattattattgctattattcccattttacagataagaaaattgaggaggcttagagaatttaagcagctgattcaagtaccagcatctggtaaccagtgtagtaaaaagtaaagcccagggctacctgactccagacctcaactcttaaccactaagcttgactatctttctagatgcagcaacccaggaaacctactgctattgaaatgatatgctctatttaacgtagtcttgcttatccactaggcagaagacagggctccctgatagctcagttggtaaagaatcgcctgcaatgcaggagaccccagtgcaattcctgggtcaggaagatctgctggagaaggggtaggctacccactccagtattctttggcttcccttgtggctcaactggtaaagaatctatctgtaacgtgggagacctgggtttgacccctggtttgggaagatcccctggagaagggaaaggctacccactccagtattctgacctggagaattccataggctgtaatagtccatggggttgcaaacagtcagactcgattgaatgacttttactttttcttcagcaatattcttgggctaatttgattttccacatgactttcagagtacataagctattattttttaaattactctcatttctcattaagtcagatctcccccaaaataatatgaattaatagggcccttgggcttccttggtggctctgacagtaagaatctacctgcaacgcaggagaccctggtttgatccctgggtcagaaaagggaatggctacccactccagtattcttgcctggagaatcccatggacagaggagcctggtggtctacagtgcttggggtcacgaagagttggacatgactgagtgactaacactttcactttttcagtagggccccatcaaactgccatatcatcaaaagtcacactaactcatatgcagccaacttgccttccacacacatttctttagcacttacctgagcacaggctctatccagaaggagtttctgttctagcaagagagaggtatgtgcacagctagtcatgtaccaaggcagactgtgatgagaaggagggacattgtgtgattggaaagctggtgacagaccagttaactccactgaggggactttccttgtggtccagtggtggggaatctgccttccaatgcagaggatgcaggtttgatccctggtcagggacctaagatcccacatgccatggggcaagtaagtctgcatgatgcaactactgaacccgaacattctagagcctgtgctctgccatgaagaccaagcacagccaaatatataatatatatataatatatgtgtgtgtgtgtgtgtgtgtatgtcactggggactttttctggccatgcatcagttgttttgggctgggaaagataaaaaggatttcaagaagcagagttgggtctgaggacgttccattcaggggtgttgtaaacagaagcacagtgatacggaagtggcatggaaacatattgtgtatgccagggacatatagcttaagtcactgggaaacgagagagaaacccgttgagtttatcctctcttcttgtagggataaacataataacgcattttctccccctgggtagagaagaatgcattaagcaaaatgactgtgagacgaatcctagcttcacttggcttccattagaaagccaaagacatatatctgtgggaagggaggcaaaatttcctccagcaggtggtattgaagcatatttacgagaaaggagtagaggcagcaggcagttgatcctggtgactgtagacagcagccgtgctcagaggagtgggtgggtccctccacggtcacctttccatggtgtcattttgtagggattttgtcaactctaggatttttcctgaagtgaaggccctggacagtagatctgttgatattcaggaaacattatttgcaagacccagaaattagcttcactttttgccagggtataatggaagcac

SEQ ID NO: 29273 - DNA, 1438 bp, Bovine  19866880629778
  misc_feature (1)..(1): n is a, c, g, or t
ncgctgaagatgtgtttccctggggaagaagatgtgggcttcaaaaatcaatggcaatcacactgaaggatgaagcaaatctttgactatgacatattgatgggcaataataatgctaatagttggggggagcacccccagtaggatgtcctgctgttacttaaagtgctacagggaatctcaattccagcttttccttggctctaactgtgtagctagagtgactctgtactgtgcttagttgctcagtggcgtctgactctttgtgaccccttggatggtagacgccaggcttctctgtccatggggtttctccaggctagaatactcaggtgggttgccatgccctcctccaggggatcttccaacccagggatcaaacccaggtatcccgcactgcaggcagattctttactgtctgagccagcagggaagcccaagaatactggagtgggtagcctatcccttctccaggggatcttcccaacccaggaattgaactggggtctcctgcgttgcaggcagtttctttaccagctgagctactgtggaagcccagagtggctttgtgctctacttgaactgaatcagtccctagtttatagcagttgtctcagtgaaatttttaataatcctccctttgattctcaaaaggatagatgatgatttgttactttatcaaaaactcctggaaatgtcctccttgagaattcccgttttcttcgatggtggtgtatatgtttcaatgccactctctcagttcgtcccaccctctccttcccccattatgtctgttctccatgtctgtgtctctattcctgccctgcaaataggttcatctgtatcatttttctagattccacatacattaatataggatatttgtctttttctttatgtcttatttcattctgtataatggattctgggtccatccacatctctacaaatgaccctatttcattcctttcagtggctgagtaatattccatacattaaaccccctgcacacactccagggaaagaaggggtcatcttctgaaaacagccttaaaacagttcatagttttgatgatcaattgagggaaacactcattcaaaatgcttttgacctggtttttcatttttctttagtatcttttctccaaaaagctttcacacatgagaggatttgagaacaaaaaggaatgactgatggtcacgtgctgcataggttagacaaagcctggaaccccaaccccagagcatcatttgagtcagatttggggagttctatgcacagaggccagggcacagaagggtgcaggggcctcctgcatctgtttgttcagccccagaaccttcctaccgaattctgtcacagatcatgtgggccacacaaatcagcagagtaacagggttcagctacctctacttattaactgcaaaatactcctgg

SEQ ID NO: 29274 - DNA, 1470 bp, Bovine  19866880631655
  misc_feature (1)..(1): n is a, c, g, or t
ngactgagcgacttcactttcacttttcactttcctgtattggagaaggaaatggcaacccactccagtgttcttgcctggagaatcccagggatgggggagcctggtgggctgccgtctatggggtcgcacagagtcggacacgactgaagtgacttagcagcagcagcagcagcagcagggcattttcatagagggaaactgaaactaggacaagtgtgtattgtgaacaagtgtgtatgtaacaagtggtgcatattctaggacacgtgcataggacagatttgcatcaaaaagtctgacttagttcagaaacataattattgatgatattttcatagatatggttttcttacctgtaggtatatatagtaactggaattaggctaaccaagatgtgcttattattttaatcaataaataagaacaatttgtaatcagcatatcgattgcatttaagtaattggtacttctgaaatactttagagagatttggaatggtgctatcttgggttgttttaatcatctgcccccagtcttgctgccactataacttcctatcagacttcttcatggatcaaactaaggtgcactagagtccagccccagctgggttctactgaccccacagagaaaggatggacacattgacatcttgggggttagttggagtttctaacctagcatatgaggggttcaagtgttgtcctagggattctgttggaatttatttatttatggctgtgctgagcctttgttgctgcttatggactttctgtagtttcggccagcaggggctaaagctgtgtgggctcattagctctggtgtatgggcttagttgccccgaggtatacgggatcttcctggaccagggattgaacccatgtcccctgcattgccaggtggattctgaaccactggaccaccagagaagtccaaaaattatttttgaagaatatttgtgacctagaatataagtgcagccctctagagaatatttgtatgactctgcatgtccctggaggcaccaccaatttgggttccctaggcactaaatttatggcttctagcttttttttttttattttttttgactcctgggagattgactttgagttgcaaattcactggtagggggctgtggtggctcgtggtaccatttttctaggacttgtgaaccattcctgctctgctcagtgctgatcgactttttattcaggtcttcatggagtgcttccctgatggctccctgatgggcttccctggtggttcagctgataaagaatccacctgcaatgtgggagacctgggtttgatccctgggttgggaagatcccctggagaagggaaaggggggaaaggaaaagggaatactacccactataatattctggcctgaagaattccatggactgtatagtccaaggggtcgaaacagtcagacacaactgagggactttcacaagggg

SEQ ID NO: 29275 - DNA, 1753 bp, Bovine  19866880634397
  misc_feature (1)..(1): n is a, c, g, or t
nacattcacactggaatgtggactctcgtccattgtccattcctagcaccttaaagtgtgcctggcaaagtgcagaccctcagaaagcagttagaacacgaataaagggcaggtacaggtggcgatgtgcatcacttgagttgtacaaaaggtaaaaactaatgtttgttgaatatttgctctgagccaagtactaggctctaataatcatttcatgtatgtttcgcatttaatccgctgaagaaccctgggagagggtaaattttattatggaaacaaacaaacatgctcaggaggttaaggaacttgtccaaggtcccaagcttagggagaattgaaacccaaggcaccctgagcatgaaattcatcctagtccatccaggatacctaactgcctctcacaggttctacactattgaagatatcttgacatctttaggactttgactagtttattcagagtgaagacaaccaaaacacttttatcctgactctccttcctgtgggggaacctaggtgatcgtggccaccaatgtagcagaaacctccatcacaatcagcgggatcgtgtatgtgattgattgtggcttcgtgaagctccgggcctacaaccccaggacagctatcgagtgcttggtggtggtcccagtgtcccaggcatcagccaaccagcgagcaggacgcggtggccgcagccgttcagggaaatgttaccgcctttatacaggtaaatgtggcttttttctcttttaggggttttgcctttctcctagtcagcctgggcatcagagaatattacaggtatctacccctattaagcagaacttaagacccagatcttcctcacaaggccttctgtaatctgacccccaccaccttcctcactccagacatggcccttctttgctactgttcctcactggccaaagctagaccagttaaaaaaagtctgtatttatttatttggcagcacggagtcttagttgtggcatgcaggatctttagttgcagcatgggaactcttggttggaacatgtaggatctagtttcccaaccagggatggcaccccagggccccctgcattgggagtgaggagttaagaatcctcacttaactccactggaccacccttaagttaacccttaagttaacttaactcttaagttaagagttaagacttaactccagcccttaaggagttttctgtggagtcttaactccactggaccaccattgaagtcccatgaattaccgattatttgccaccccttttctgacctagtctgggccttggcctgtcagcagccatgtgacatgtagcttggacccttgttctgtctttcttaacattctcttagcatcctgtggcatttttttttttttattctgggatccttgaatcctgtggggccccacagtggtttccatctttcctctggttcagagcacctttgcacagctgaaccagtagggtctctcctgagactcattgatagcagttggtcagctcctgctccatgcttgtctttgaaggagcaacaggaaattacaatgaagacggtcttagcccttaaggagttttctctccaactaaacagcagtcttgtctgcagaaaatgaggtttccagagctgctctttacttcattgtacctctcttctgtggatgacggtgtcaaggtttcttttaattatctagacttaattttcaaatcatttttaattccctcctctgtccagtatccctctgcag

SEQ ID NO: 29276 - DNA, 1136 bp, Bovine  19866880695118
  misc_feature (1)..(1): n is a, c, g, or t
nctgacctcgtgggagagatagagtaaaagaataatgaccacaaatagccatacaatcacagttatgttaagcaccatggaggaaaattttatggacgttacatcaatatatctatgatgtggaagtcaattttatgttgggttacaaatctttatcacaaccctgaattatacacacacacacatacatgcatgtatgatctgtatttctggatgaagaaactgaagtgcaaagaagtgaaaaaattggccgaggcccaaaaaccagtgaaaggcaaaagcaggatttgaaccttggccttgaactttgcctcctgtggaaaagaaaattcgagcctttgttttgatgtcttctgtaaacaggcagggtgtatggtcacgtgatgctctaaccggccatcctaaaagactcattccttcctggggtcaccgtggagctcagtcaccacctgctgcatcaatcaagctgcaaactgcctgcgtcaaggcacatttgtgggacactagcgggcccaggaaggtcgccttgaattctgagacatccaagaatagctccccatcaccaagcgcctgcactcaggaacttcccaaaagtcaaggccaggagagactagggtagtcgccagatacctggagcacaccccactgtgacccatcactaaggtgcctgcagtctagcatccaggggtgcatggtgaaagaagccagacattctgcaggcagcattaccaagagcatgcatgaggtggtacacataagcacagagcaacttcagagacctctagacatgagttctcaccatttataagccctttagcaaatcacctcactctctatgcctcaattttcccttctgcacagtggggataaatgcatctacttcagtaagtctgtatgaggattcgatggcaatacaagcaaagaccttggacagtgaccaacatccggaaaagcacttagtcccctcttatggtcaataagggagcgagatggtggcgcttcctccacccacacccccttcctccaaatgagaaacatcccagggtgagagacacgggtgcacaagtagcaaaaacatctcaggaagaaggagggaacgtctgtgctttccgggtagaaggaagaggaaaggacag

SEQ ID NO: 29277 - DNA, 746 bp, Bovine  19866880721506
  misc_feature (1)..(1): n is a, c, g, or t
ntgtagaggaaactctctcccctaccctgccccaaacaaatgaacattgttttttcattagccacagctcaccactcagagctgtgggtctgttcagtcacctttgacccctgacttctggccctgacccatgcatacaggccactgccccactcttttgagtctctacatagagaattttaagatctggtagggccctttgaggtcacttggttgtctagacttccagcatttgtgctttagctgtcaaacaattttttctaaagaatgttatcttggaagcccagtatgtaaagcaggcccatgcagacatgtgatggttgaaagataaggccgggaggccattcattttctgttggggggctttgtatgtgttgttccttctaactggaatacaattccatcctccctgtcccaattacctcgttaagtattacctttcctttaggtcttaaatgaagtaacccctcctccaggaagacttccctgcccttccactgattagatcagtttcctctacattttccagtgcgcacttcagttgcaaatttatgatgatgaaagttcattttctcctcctaggctatcagcaaaagaggagcaaggctatgatgatttggtcaccatcatatctcaagcactcactataaggcttgacgcacagtaggtgttcacttaatattcgattccttaatgaaaattcatctgattcgaccccttcttcttccagctggaacaaagattta

SEQ ID NO: 29278 - DNA, 3608 bp, Bovine  19866880754851
  misc_feature (1)..(1): n is a, c, g, or t
nggttggaatctgactgcagattcctcccgcaaagtcagcatccccaggacctctcatcctagatggggactgggagtgcttcctcattaatcacagctctttaattaacagctctgaggctggaaccaaaggtgcttaccgggagaacgccagcgggccctgaactctggccgcctgttctgatttggaagagttggcgcctgggggagggggcctggcatggctgggcactgagcccggcagggggtggggtttggagggcaagcagctggcaggccagccgcctgtctctgcctcggacctcaccttgcagagctgactcgactcagtgcaagttgcaggcagctctgtcctcccagggcccatggaggggagatggccagagaaagacactctcggacagcaatctcaagacttgactgcaccctagaatcactgaaggagcttcagaaacattggtgcagggtcccctgcggtcctgatgtgataggtctgggatgggatggggaaatgggagttttcagagcttcacaggttatcctgatacacagcaccatttgagaagcacggttcagcgggaggccctcaggctgtaccaggagactggctgagtgtccgaggcccgggttgatgaggggccctcctcttctctgtgttgggtggacccagcagcaatggaacccgcagtttccttctcaccccacatgccccaaggatgctcagaagactgtctgctctgagaagaaggaactcagggcagaggctgggtgggcagcctggagggtggggagaaagcacagcctgacacaggaggccatggtcctaggacccccgctgagcccacagtgtgaagattttcctcaacagatgtctgacacatttttaaacctcctgctcctttgtggggtgaggaaatagggagagactgataaagggtacaaattttcagctataagataaacaggatcaagggacttccctggtggtccagtggttaagaatccaccttccaatgcaggggactcgggttcaatccctggtcaggaactaagttcccacatgccaagggacaatgactgagcccgcttactctagagcctgtgctctgtggcaggagaagcccagtgagttgcaacaaaagaaagctgcatgccacaatgaagacccagtgcagccaaaaaaaaaaaaaaaaaaaaatgatggataaggtctgaggatctaatgtacaacacagtgactattgtaccattgaaatttgctaagagagttgaacttacatgttctcatcacaggcaggaaaaaaagagatagatatatgagttgatggatgttttaactaactagatggtggtactccttacataatggatacatatatcacatcaccacaatgtacactttaaatatctcacagttttgttagttagacctcaataaagctggaaaaaacctatcaaaacttttgtttctgtattctgaggactgatgatgaggctccgtaccactggacctgggtcattacagagtcttgctagtaaagttctatctgggcggccatctcctcatttgtaacaggggaatatcacagtttataaattcccagatttttgtttgacatgtgggaggtactcagaaaatccttgtctaaaccctaaagtccaaatcagggttggcaaggagatttcatcccacatgcttgtccttaattgattggcagcagcctcctgaaaaggaatgtgagtcccaggatgctgcagttgattagtgatgtctgtcagggatacgggaatgggaaatgatggatgaatgtcattaatttgccatccaggtctagatgtaaatttaatgaagttaaggagtatgtttttcttgttcacctttcatttggggaatttggccccaacattctccaatctggagtaagttgccttaggagatgaagacactcttgggggaggtgggtgtttcgttggtagtagaaaccccaacacagggatttatttgctggaaatgggatggagcaatggtgtgctagagctggctggtcctgggagggtctccctattcctctcacccccagatttagatcacactgggggtagatttgtggccagagacccaccatcctggcatgggcttcagacatctgtttacccacagagttacagccagacattcaacatgcttatacaatctagcaaaggctcttctgcctcagtttctctgcctggagcccagcttgtctgttggatccagactttggctttcatttcgttgggtagattgtcttcctaattctcagttggtacacttaatcccatcatttggctcattcttatgcatcctttagatcatgctgtccaatagaaatatgatgtcagacacaaataggagtcagttatgtactttctttttaaaaaattttattggaatatagttgatttacaatgttgtactagtttcaggtatacagcaaagtgattcacttgtacatatatccactcttcttcagagtcttacccatataggttatcatagaatattgagtagcgttccctgtgctatacaatgggtctgtgttggttatctattttatatatagtagtatgtatttgctaatccaaaactcctaatttgtccctctccccacaagatttccattttggtaatcataggtttatttttgaaatttgtgagcctatttctcttttgtaaataagttcatttgtatcgttttttaaaaactagattccatataacacttaatgcagtattctttcattccctgtcttacttcagttagtatgataattgctaggtccgtccatgttgctgcaaatggcatttcactctttttcatgactgaataatattccattgtatcagtgtatatatatatatatatatatatatatatatatatatatatatatgaaccccatcttcctgtactttcaaatgttctagcagtgatatttaaaaagtgtaaaaagaaacaggtgacattaattttgatagttcgtcttacgcaaaccaaattatcccagatcttatcatttcaatatataatcagtataaaaattacccatgagacattttgcattctttctttgagattcagtgtgtgttttacactcacagatacacttcagttggcaggaatcatgcttcacacactctatgacccaggtgatggtggctaccatattgaacaaacacaggtctgcgtctcaggaaagtcccatgtccccagggagagccttaagcctggacacatgggctcccaccttgggctctccttatcaaaacagttactgtattttactgttcttggtagtttaatatgtcttttgccctctagataatgtttcttcttccagtacttttacatttatctatttttttggttgcactgggcaattgcagcggggggctgctgtctagttggggtgcatggcttactcgtggtggtggcttcccttgttgcagagtacgggctctagagagctggctcagtagttgtggtgcacaggcttagttgtcccccagcaggcgggatctttcctggatctgggctgaacccgtgtccctgcatgacaggcagagt

SEQ ID NO: 29279 - DNA, 1518 bp, Bovine  19866880756835
  misc_feature (1)..(1): n is a, c, g, or t
ncgaggggaaatggactgctctgaagttttccggaggctgaacttgaaagatgaacagtgagaggtggaagaccactctgggcaggaggaacagtgtgtgttaggctctgagtggaggagatcctgaaaggctggtgtggctggagctgagagaggtcaaggggacagtgggcagtctgggcagagatggaactggatccaaagggatttgggaagaccggaagggtttactaatttatttatttaaaaaaaattatttatttttatttttgactgtcttggatcttagttgcggtatacaggatcttttgttgtggtgggcgggcttagtcaccccctaaggcagtattagttccctaaccagggattgaacttgcatcccctgccttggactaccaggtaagtcctgactggaagggtttaaatctaccagatcaatggcctgagaattctgagaccattcccagatttgctcttagcaaatctacttttggccccaatgccctggcatgggatgtcagttggtctgctctgggggatggctactgccccaggccctttcaaagagtcccatatattcttccagaccttcattgaagtccttcctctctgggaagccttctaaccttgaaatcagaagagatctcacctcccacgtcctcccctccccacacttggctcttggcatcttaggggcactagtgtgaaggggaaagttcttctgggggcagggcagcccaggctcagcgggaagggggctggggggtgaaggcccggtaccttgctgtgggcaggtgaaagtgttagttgctcaactgtgtccaactctttgccaccctatagactgtagcccgccagcctcctctgtcaatgggattctccaggcaagaatactagagtgggttgccattcccttcttcagggaatcttcttgaccccgggatcgaatcccagtctcctgcattgcaggcggattctttacgttctgagcctgcaaactctcctcctatacctcccagagtccacacccctgcttgcccctcacacctggatcttgcaggatatgtgccatcgtgctctataagggacttcatccacagacttggtaggggacagtctcttgtcctgattgtcaagtctgggtggggaacaatcggacatccactgctgtgctttgcacgtccctggaaccaaggctagggtggtagaaatgaaagattcctggcaaacccatcctgctgctccctgccccctccgtgggctgctcagagagtgggagatgccttctattgagaaccctcttcccaccccagccactttgccttctcggggaggggttggggagccactttcattgtccctgaacactggctggcagggggcccagggagggggctccccaatagcgaatctgcagctgcctgtctttaaggtaaaattaccgtaattactccaattaccaaatccatcaagagctttggactgaggaggccggtacaatcagttctgaggagtgtg

SEQ ID NO: 29280 - DNA, 1247 bp, Bovine  19866880761679
  misc_feature (1)..(1): n is a, c, g, or t
ncaaggctgaattatcttctccccctccctcactcttttttttttcctttttgttccaagttgtgtcactctatggacaatatgggtgtgtccatcattttgtgcttgatgtcttgattctcttggcaaactctacattagagggactatgattttatttttcagggaacctgaggcaggaggtagtttaaataacagcatattggtgtttagcagcagatctcttccttaacgacatcttgcttttgctgagaggaggatgggagtcagaatgtgggcttacttcctggtgtcatactgagctgcttcatgctgggagaagtgccattagcacaaccagagctgtacagttttataaagtgtgatcagtgtagttctctgcacttgtagtttctcttagcttgaggaaacatggcttatggcattgagcacttacaggtcaagactcatgcagtgacctcagaggttccaattttgatttcagccacaccttctgggggcttcccaggaggttcagtagtaaagaacctgcctacaatgcaggagttgccgatttgatctctgtgttgggaagatcccctggagaaggacatgacaacccactccagtattcttgcctgggaaatcccatggatggaggagcctggtggggtacagttcatggggttgcaaaagaactggacatgacttagtgactaaacaaaaatatcaacacataccttcatagcaatagaattcatccattcagaaagaaaggaagtatgaagggaaagaatgtttttggggaagagaaggggtgcctttgcagaaagctctgtcttgaaagaaagtgaaggcgctcagtcgtgtccaactctttgtgaccccatggactgtagcctgccagactcctctgtccgtgggattctccaggcaagaatactggagtgggttgccatgtccttctcccaggggatcttcttgacccaaagatagaacctgggtctcccgcactgcaggcagactctttaccatctgagccaccagggaagctgtgttaccataaacctgagtacttgtgtatgttggttaagaatgtgtctcctatatgactagcccctgcatctccacctgctcataacctttcctcttggtctagtccaggataccctaaaactgggccccagaacagctctgaatggaatttggaagaaaaaagtaaaaaactgtggtccaaacagttttggagagactgcacactctctccc

SEQ ID NO: 29281 - DNA, 1401 bp, Bovine  19866880762629
  misc_feature (1)..(1): n is a, c, g, or t
ncactcataataaaagcctacaaagtgtgtgacctctctggcttctacttattgaagtgaagttgctcagtcgtgtccaactctttgcaaccccatggactgtagcacaccaggctcctccatccatggaattttccaggcaagagtactggagtgggttgccactgccttctccaggggatcttcctgacctagggatcgaacccaggtctccctcattgcaggcagatgctttactgtctgagccaccagggaagaccttataagtaagaccttccacttactaccctcccctcactctgactgtcctcaattaggattagggcaaactcttgcctcagggccttttcactggctgttctgtctctccggattattattcattccgatattcacaaggcttgctccctcaatcgtctgctttagtccttgctcaatacaccaccgtaaccctgagtcctctccctacccatcttactgaaaagctgtaaccctctcctctcctccgtctatcatgccgtagaatctactgcttaattctactgtttattatcttcctttgcatactagaacgtctttccatactagctccataagcacaggagatttcgtgttatgttcccggacatatttcaaacacccagaaaagtccccattgagagtgggtgctcaacacatatctgttaataaataaatgcactaacaaacaaacccaaacagatgctccaagagaaaagggcgttattttgttcactgccatatcccaaccgcctagcacaggacttgcctacgttaggcgtttaatatttgatagactgaccgaaagactaaatgacaactggagcgactatcatctctcggagagcggagtgacacgggacacgaccacacccctctcctcaatcctaaccccacctcgcctgtcacctgtgaggagacacccagatgctggaagctgtagtcaagcagcaactcttgaagctccaggttcaccggcacgttgcggtcgaagggcgatcgcagcatccagcgcagcggctccaggctgcccagcgcgtttcccacctgcgggcccgccccgccccgagccccaccccgcccgcgggcgcacacagcgcggaactgcagccggggctcggggcccgggtccggtccggggcacgcccagcctgcgcgggcctggaacgacccattgtccagcaccagtggcaccgggagtgacccgtgtgccaccgggccggcctccagcaccggatctggcgcggcgcgagcatcgcggaacagaaacacgttcgtacccaggcctgcagcagtggccgccgccatgttggagcgctgctggctccgcccctcgccgcggcgtaaccacggcgcgagactccgcccccgacgcagcgtgcg

SEQ ID NO: 29282 - DNA, 1118 bp, Bovine  19866880807037
  misc_feature (1)..(1): n is a, c, g, or t
ntgcagtagtttatgaaggattctaatttggggttcaggaaatagcctctcaacgctcctaattcagatctctctcagagagctactggatttcatcataattgacaaacattagtgaccgccccctggggtggctgcttttagaaacagctgttgtcatattttctggactttgccagctgaaggcatgacaaatccctgcccaggttttttaaatacttctgttacctcgctgctacttttctgccagggataaatgttttgaggtggccagacccagaacatccttacaaggattcctgttacagtgctagagtgtacactgctcattctcctattcttatgtttattaagaagaacataagaatatttatgttattttcttttttattaaggttattttgtgctaagaagataagtgacatttaaaagtccaaagaggaatgatcacagttgtgtaaggggtgatttcctacttgaactctgatgtcagtagattctgtaggtcaggactatagtgggctgtttggttcaatgttttggtagtttacttagaggacaggggatagtataggacctaactcccagtgcagatatttctattccagaagtatatattgatatctaggagcaagaaatgtgggcatagcagctctccaagtttgcctcaccttttttcttcatgtttgttttaagctcaggtaaaggtaacctcctccttctatgactccagtttccattcagggtataacatttgattttctttttaatctgggcaataaattgatgttcccagatggtagcaatgggggagggggatgtatgattagtaagttctactcttaaattagtagcccagctactaagctatagagtgagatttaacaactttcatggaaattccagattgacatttcttggggaaaaaatgggcccttctttctaataggtgtgggcaaagaaggctataaattaatgtgcaacttgtaacattccagaagctaaaaatagctgatgtaggtatgcatccacagtgtgacccttgagatgacactttgacctttggcatagtgctcctgtcaggaaaacgtactggtggttgttcgtgttagtggcgg

SEQ ID NO: 29283 - DNA, 768 bp, Bovine  19866880810047
  misc_feature (1)..(1): n is a, c, g, or t
ntggagatgccgtctgggtgttgccccctccccacagtccttgacttccgagctcagggcacagacacctagcgcttatctgggtaccctagggagtgctattggtatggtgatggctccactgggacggtgaacgtggagcccaagcaggatacacaggccggagataaggccaagaacagattccctttggcgctcaggtgctgttcatcagaaatcaacagccccacaaccctggctggtgacaggcacaggatgataacaatgccacatgatcagtagccttggaggacaggctgtcactggttcagagagataagagaacaatgagcaacccctccaactagggaggggccctcacggagcctacagggcaaagcagcaggagctgaagcttgtctctgacccccacacctcaacagggcccactcgtctcagcaggcctggagttctcttctgtcacccagggaccccttgcccccattacacacccactttctcgacccctgttctctggagttaatcactgtatgtctagagcacaagtgttcaaggctgataacagataagaggtgagtgcagggagacagggagaggggccatcccagcccgacatgagaggtccaggacagggcctggagcccccgccccctaccaaggctaagtccaacagaatctgcctggaaaggtttcctcttgatgccagaaggaaacctcatcccggcaagtgccaagtgaggcctgaagacacaaatatttgctcagctt

SEQ ID NO: 29284 - DNA, 4469 bp, Bovine  19866880812323
  misc_feature (1)..(1): n is a, c, g, or t
nttggctgctgctgctgctgctgctaagtcgcttcgtcgtgttgactctgtgcgaccccatagaaggcagcccaccaggctctgccgtccctgggattctccgggcaagaacactggagtgggtagatggatagaaataattttgtaaaaatgggcttgtagccatatatttgtttttgctgaatttaacaaaagaagaaactgcattgaaataggaactttggagtactgaactttgggtaagtatttgttcagcacaagagaatttattaaagcttgaaagcgaagaaaaaggattacagaaagctttagaaggttacttatttttggaactatgttataggtagttgcctattgtaagagtaaattagcacgcttattctttccacctttctttcctccatttgtgataaattccgaactataattttaatttcaagattataagtacatgttcttttctataatcataactcccacaggtatttaacttcaattctagtttaataattgctaattattttccatggttttgccaaccttgaattgctcatttcacttttttttttgcactttacttcttgattggctgaattgtatatgcctgagaatgtctgaatgtggtctttgttgatataaaattcttgatttgcactctgtaagagccctgtagacactgccttttggcctaaagcatcactgtatagaaataatttgaggtccagcagagcccccctcaccttccaagcttgctttttctgcttgaatgcttgtagtactgctgtttcattgggatatgtcttgattctgattgttctcatttgttcttaaatgtggaagaacttttaaatcttcatgttaaataactttatatcagggcaggttttcttctgttatatctcggcatacttttctgttccatttattttttttctcttttctaggagcaccaattaagtgtatattagattgcctttgtaatatttatcactatctctgggctcatcgcctttccagtttcttttgtgatatttcttcaagcctgtccacaatgttcatgattgtttttagtcagacttatttgattttgttttctttgcatctctacctgggtctcacagtcacttctttgaatgcattttgtttttcctctactagagaagtgaatatttaaaatgggaggtgatattacaatacatgacaaattttaaaaactgataatataaaaagcaaaaccctgatatcaccaacattaaaaaaaaaaaaaaaaacccagaaaataacatagtatttttgttaattaacagtctgacccatttctgtaaatctttcttcctgcaatttttggctctgtccccactgagcccctctttattccctcaagtgagagcagagcagtgtctcagtgtctctctcgtgtgggtgattcacatgtgctttgtggtgttggtactgcactgacactagagaagctcctttagctttgtaactgacatttgtagcattgtgtaaattaggggggttgtcttcaggtttgggagaagcctctcggtagtttctttcaggtccaggctgtgagatctggaggatgtccacaggttgatttttctgacctgtccctttgagaccttgtttctcctcgactctgctgtgactttgtctcgtctttaagctgttttagcttaagcttgtgatttctttgaaactggatttctttggctgaattctgtctctctgagtaatacttctttaatttattttttcttttaaatgtgaatgtttatttttggctgccctgggtctttgttgctgtgcgggctcttctctggttgtgacgagtgggggccgctctctgttgcagtgcatgagcttctcatggaagttgcctcgcctgttgctgagcatggggtccagggtgtgtgggcttcagtggttgcagcacacaggctgagtagttgggctccagggcttacttcttttgtggcacatggcattttcccagaccagggatccatcccatatcccctgcgttggcagttggattcctgtccaccgtgtcaccagggaagtccccagaatgcctttattttgacatctctacctggacaagaaattaattctatctccttgcgttagttttcttctgtattaagttttaattacttcattattctttccccccaaagttcactttctacttgtcttctagttaggcatcatcgatgaacattttccaagttcttctgtgtatgtaaaaatggaagtagtggtttggcaacttgactgctgcgttagatttaacctttgatgtcatgaaagatgattcacttacttaaaacattcgagcaattttttctgtttgtagtttggaatcccagctcttaatcagtttgcatttttcctccaaatttgtagccatggataatttccatgcaaccacatgctttctcttaaaggacaaaaagtatataaattagcctagtagtattaatagagctgtcaagtttgaaatgctccatctccacaagtactttgtgtgcagaccagaatctgaaaacgatgtcagagccgaagaacagatggcacaagccactgcctgatctcagtgagaggcagctccttaatgagcatttcactggactcctggtctgggtttgacttcacgaccaggcccccccgcctgggcctgtgattcaggacaagtgctaagcttgtcttttttcagtttcttgctttgtaaaaaaagagggtctctggcccacccaatggactgtatgcatgtttaataagatacattttgtgaaagcttggagcacagcaccttcacataggaggtgctcggtcattggtggttggcctttcttttcttttttacaagtcttcattgaatttgttatagtattgcttctgttctgtgatttggttttttggctgagaggcatgtggagtcttagctcccggactagggattgaacccacactctctgtgttggaatacaaagtcttaaccactggatcgccagggaagtgtccctggttttcttttgacctcctttttcctatatctgtttctatcagtatttatcctgtctaattgttgagcttattgggaatagaacttatacagtagaggtaaaaaaaaaaaaatcactaaaaaagcccatagaatatggctttccagatgtctagtggtatgaccatacagaaaatttctaaaaaggaacttgaaaataaaatccattttatagcaaatgtatacaaatagtaaataaatgtttgacttcataaaatgatcacatttttatggagaggttggttcccttatgctcactcttacaagctggttttccccataagctccagtatctgtatgcacacactctctgtgccagtttttaagatttacagtttaatgatctgtagggtgggaattgaaacaataacaataacaaaactgtcctggtgaaatactggttatcgggagctgtaacctccagaggtagagcagtgtaggatgaatttctggtttcataagatgttttgaaagattctgtggtgcacaccagctgcttgatgacaggttctgtcttggcctctgagatctgtaatttcaagtcactgggcagagccactttctgatcctcatctgctctttagtttcttaaacactgatggtcagataacgcccagtgtgcttggcttgcagcactgggtgcagagcctctggactcctggacctggggctgctgcagcccaatggctgatgcagcccaatggctgatgctgaaagctctgcctcagacatgccctgtgtcagcttatgatccaaactcaggacctgtgaaaggaggagacaagacgcctgggggttggttggtaggccaggtccccgggaaagctctataattttgcttccctttgggtcttttttagttagatagtttacataatgagcattaaccctttattttctttcaaggtaaactaagttctaagtgttattgctcttctgcttttatatttattcattttatcagatagttttttaaatttatttttttaagcatccagcaattattttatttattcattcttttttttatttggttgcatcacatgccacgtgggatcctagttccccaaccagggatcatacccacacctcttgcattggaagcttggagtcctaatcactggactgccagggaagtccccacatattttctgttgttgaattaatagcctgtgagtggcctggagtagtagatcttacagctggattcttttttatctttcccaccctcacctttcatgtgtcatgtaaatgaaatgtaaaagtgaaatgtacaatgaaatgtaaacgtgaaatgaaaaggtaaaaaatgtatctgtacttcatggtcttcatagtgtgttattcatttctttattatggtaacgtggcgccttcattaattttctcctctcat

SEQ ID NO: 29285 - DNA, 1616 bp, Bovine  19866880859078
  misc_feature (1)..(1): n is a, c, g, or t
nccagtgagagcccaccagctggggactgagtgcctggaaaacctaccaatggaacacaggacttttcataaaagactctttgaagagtcatgtgatcatggaactcactaaaagctatctaaaaattagctagtgtaaatgtatttggtggtacagaagaataaatcccttacctagcaaaatgaatgtcaaaagaaagaaaatacagaccatttagaaaacaagttccacatttttacaaattactgcatttagaccatctattttcagttcctttgcagcaacctgagaggtaactgagattctaataaccaacgtttatttcaccaaaccattttctttttttttaatttaaagtttttattactgaagtatagttgatgtacaatattatgtaagtcacaggtgtacaatacagtgattcacaagttttaaaggtcatgctccagttatagatattatacaatattggccacagtccccatcttgtacaatgcatccctgtagcttattttctacattgtatcctgtagccccctaatctcccacccctgttttacccctccctctttcctctctccactggtaaccatgaatttgttctctgtatctgtgagtctgcttcttttttgctatattcattactttgttgtattttttagattctacacataggtgatattatatagtatttgtttttctccatcaaagcattttcattcattgatcctagcactatctgaggagactctgatttgcacagtggtatgcagtagacactgctgagctgactgtaccctgattctatgacgctaattattttaatagtagcaacgaggtcaaaacacacataaaatccatcatcatgtgaaaatgggccagcgctaattagcacaaataacatttatgaattctacactttatcaatttatactatttgtccctgtttttaagtcttttatagctaagtttctatatttagacagctacgtggattggtggggagaaacagtgaaacacacatgagaaaggacagctttgagctctggttctaccaccaatgggcacgacatcaggcaggtcactcaacctcccaggtcctcaacctcttcacctgaagaaccaagggcataactctacttccaaagtcctttctgggctaagatgtgaggacacagaaagagctctgtacctctcaacacgccgatttccctgagggccaggatactctcatacgctttctgtcatggcattagaggcttattcagcagcaacggctgcgtgtttttacctccccccaaataatcttcttcctcatttacagaaggaaaccagctgtgaacctcaccttaattctcgtggccagcgggttggtgcagtcatcaaagcggatgcagtagcccacctcatggcccagcaccgcacccctttcctcagccactctccctgcaacctttgggaagaaagatcatgctgaaaatagagacacagaaattcctgcccagagcacacactatggaaaatctaaaggtcacttattttttaaacagtatgctgaacacagtggaaaatgaaaagagaaaggggcaggttagcagagaactagtgtgataat

SEQ ID NO: 29286 - DNA, 956 bp, Bovine  19866880859983
  misc_feature (1)..(1): n is a, c, g, or t
nacctggcggcggtgctggagtacctgacagccgaagatcctggagctggcgggcaacgcggcccgggacaacaagaagacgcgcattatcccgcgtcacctgcagctggccatccgcaacgacgaggagctcaacaagctgctgggcaaagtcaccatcgctcagggtggtgtcctgcccaacatccaggcggtgctgctgcccaagaagactgagagccaccataaggcgaaaggcaaatagaagtctggattacttcgcagcagtttaggtctcaatcaaaccaaaggctcttttcagagccaaaaaaaaaaaaataaaaaaaaataaacaaactccacgagatagtgaaggacagggaagcctggcgtgctgcagttcatggggtcacaaagagtcggacctgactgagctactgaatgacaagaagaaggagaatcagtagagtgtttaaagtaaatgaaagttaagatcgccacatatggagtacaaatattaatgactatagctgttaatatccagttagaaatacaatgcaaaatagctcagttacaactgtgatattgataaaagttatcctaacaaactttattaggaaaaacacagacctagaggaaagaactttaagaagttattaagagatataaagtacatacgtgttatgttcctgaattagaagatcatccagagaacaagctgtgaggtagctttaaaaaaaaaaaaagaaccaggagcccgtgtcctataagatgtgttgtagcgcactgccagactgtggttccttctccacgatttcagagtgaaaaatgaaaagcagaacgttttttgtatgtttgtagaaaattcatttagtggaaaaatctgacctgaattgacacaaggctatttgtagtcttttttcattgtgttaatactcttctgtttgactgcagaaatagtggtgtctttaaagaca

SEQ ID NO: 29287 - DNA, 1175 bp, Bovine  19866880866663
  misc_feature (1)..(1): n is a, c, g, or t
nagaggagctccagagctgccagtgatatgctcatgtcttgccgccactgggaattgagtctttgagtgacgagatgaatgctgcgaatcaggagcccagcagctgaatctgtattaagagctaggatataaccccaatgccacatcccacagggagggaaaacaactaagcattagtaacgagaagcacagcattccactaggcacagaccacagcagccacagtgagcatgacgggcacccacacagtgttatgctccccgccccactggcctgagcagctgagcctgactgaacaatggtgcgcagggcacacacactggaccagagcagcttctagctcccagctcaggtactctcacacagacatccactgggatttgaaagcttcaatatcattcttataacagtataaatctcaacatttccaaattaactcacagagttacatttaaaaaaaaaacaatgaaaaaatcaaaaggctatcaattatttccttagaattttatagaggaaggaattcaaattttagaatctcttcagatgctgggaattatcctaaagcatctgctgaaattattttcagggttcatattgtcaaaagtcacatgcaatgcttttttaagcaaactttaacatttaattctctgagacaactttaatactcttaaaaaattaaataatcaagttactgtgtttttatgtagcctccaattctatatttaaaagtaattactagtcagttaataataaattaggacaaactaaattgaatttataaaggaagctttagggacattatacctgtcgatcctatcagaaagagggcagtgacaacagaaaaaggaatgatcattaaagagagacattcatgcaacactaacacaaatctggatttcttagtaaaaactattttatgacattacaagcagaactcactaacaccagttcaaaatgctgaaacaaacaataaccacttcgaacatttatattagaacacatataataatgcaaaaattctttagtttaaacgtgtcttagaagcaggaaaaataaacaaattttcacctatatttaaacacaagcataatgaataaaataacgatttaaataacttcttcataaatgcaatatttaaatgtgttaaatagccacataatgaccttatatatctg

SEQ ID NO: 29288 - DNA, 1433 bp, Bovine  19866880906153
  misc_feature (1)..(1): n is a, c, g, or t
ntaccactgcactgcatgggaagccccagctttctaaatctatagctcttggtgcattttaaaatgtaagtatccagaccagagataatgccagccagcaaggcaggtctagggaaccctggagctgaacttcagagggctctctcttcccctactttgtccaaaacatgtggcagcagatgttggagtggagaaactccttcatgggcagaaagatctcaatttggtctaagaaactcctaatctggagggcagaagaggaggagatgcaggtagtcccctaccccaggaagttaccttctgggagagggaggaatctggaagaggatatggcccatgaaagccccaagaccaattaaagcagtgttccgggtggccagctgaggataaaacctaggaaggcttctggggtgaagtgaggcgacatcagcccctaagaacaagaatgacaaggcggggagcaggggtcccttactagaaccaagaagtggtgaagcccaagtgaggtagcctatgctaggagaatggaagggggaactgagagggtcccatgggggaagaggcaggaaagagggagggaggaagaagactggtcatccagatgccaactgggggggatataggggagctggggccaagaacttcctcttactctgtggccatgtccagggttttgtttcctttctccatcagtgtctgatgactactcgttggcaggaggacagagctctaggggacctacacctcaagaggctttcaaatgcctgtttcattttctccagtgttggcttagggcagggtgtcgcctctggtccatggcttgctgtcttcataactgctctttcactgccctaggcctcccaagttttttggccttggcagccagtttcttttaaagaatcactgaggcctggggaaagcccatgcagcagaggcactcaccctggtcgcctgcccagcatcccaggagccaggcccccagatgaggacaagcacggtatgtctttcctctctcaaaatctcccaggccccctgaacagtttgcctgagccttgcactcaagggaggtgaattaagatggaaaacaagttcatgttccactcatcaacagcaaagcacccactccaaggaaggggcacctttcactgatttgccaaaggtgccgtgtgggcagcagctgtcctggctgtctcctctcctcccaagcctgagaagggcaggcattcagggtcagagcatcctgccccccagagaggcccctgctgggtaccactcttccccccccagattccacaggctcagctggttcctctgagaacagctgtgttcttgtctcctaaagcagtgtttctcagtccttagcatgccttagaataatgctaaatactcattaaaacaccagtgcctgggccttacctgcacagtttccgatt

SEQ ID NO: 29289 - DNA, 804 bp, Bovine  19866880918309
  misc_feature (1)..(1): n is a, c, g, or t
ncagttcagttgctcagccaagtccaactctttgcgaccccatggactgcagcacgccaggcttccctgtccatcaccaattcctggaacttgctctgcatctctgcccacatactgggccttgtgttactatggatgaactgcccctgagcttgtctctgataccttccattatcaccaatccctctactactaagcttatgtctctagcaattctctcctcattcctggatgatcagtctccctgctttactgtttcattcctatcagcatacaaatatgctgaaatatttttcatccttcaaacaaccctctcttaaccctacatccctctagagcttcctccccatctctctctctcacttttatagcataaagcctcaaacgagttttctatacctgccatctccagtcttcctcccattctgtcttgaatcctgtccaatcagactcattcctcattgctcaaccaaaacctcttgtcatgctcatcatgagggacttccctggtgggccagtggttacgaatccaccttcagtccctggttggggaaccaagttgccacatgccgctacaactagagaatctgcgtaccactaaggaaagatcctgctagacacaactaagacccaatgcagccaaattaattaattaattaaaagatcatcatcacagtgctaaatctaatagctaattttcatgcctcattccctttgtgtgagaagacatatgtacaactgtagagtgttcataaatgtgagaggttaccactagcatgaaaaaacaatatacttttcaaatca

SEQ ID NO: 29290 - DNA, 1458 bp, Bovine  19866880929967
  misc_feature (1)..(1): n is a, c, g, or t
nccatgctccaccactagagaaagtccacgcagcgaagaagaccagtacagccaaaaataaataaattaaaaaaaaaaaaaaggagatcaggagtgctaggcttgtgttgaagacataccagcatcaagctgctactttcttctctgccaaagcagagttgcaatatgactaaagagggcatgtccttctcacagcaggatttatatatttgaagccaggacaaagcactaacctgtgcaggggatttaaaatccaggcctggaagtagtgtatcaggtgaagtcattgagagctgattttctgagctaaatgatagcaggactagtcataataatagagattactcgctgtgcagttatgcacctcataccctgttggtcactaaaaacattagtttatttaatgcttgcatcaactcggtttatctgtggttttaaccactgtcaggtatcttgcctctcaccttgaagaaaggtctggtatttgcatccagcgtggacatgttggtgacaggggctgcgacggtagagaaggtactgcctgctgtggctatcgccatttggcatgcagcactggtggcttgatggcatgcaagagcggactctccccttcacaatcggtgtgaaaaatcaggaaagtcacttcacctttctgagcctcagttttcccatctgtcaatggggccagcctggggctctcctctcctggcctgactcagattcaagtcgaaataaagggcaggaaagcactttgtctgtaatctgtgtgacgatgattggcttaagagcatcttgctgatgatcactgcagaaactccctccccaaaacacagtgcagaagccacacaagcgagtagtaaaaggtacttaataagtaataagggcaaacactgagcacttactatatcgtatcactgctctagttactgcacacatagtgaccaattgataccttacaacagtcctacagggaagcgtttgttattttcatcctcattttgcagagtgggaaactgaagcacagagaggtcaagtaactggcccaaggtcaccctgcacgaagtggcagaactggatttgaacccaggcagctgggcttgagcatcagtccctttaccacgactctggtgcatctttacatttacaacagacaaaccagacgttgttgttgttcagtcgcaaagtcatgtccaactctttgtgaccccaccaactgtagctcaccaggctcctctgtccataggatttctcaggcaagaatttccttctcctggggatcctctggacccagggattgaacccgtgtctcctgcattggcaggctgagtctttaccactgagccacccaggaagcctcaaattaaatgacttcggtgggtaacagagttggggcaaatcccctgtttaatgaagccctggattgggttttaagtaaaaatcttctaattatgatgagaa

SEQ ID NO: 29291 - DNA, 992 bp, Bovine  19866880944191
  misc_feature (1)..(1): n is a, c, g, or t
naacagttagaaatgcaaactcgagcttaaggagaatggtgcagttttaagcccgcttgttggcgtaacgagaggcaggcaggccgagagaagagagactctgaagttgtctcaggttcatttagactctgagagaacaggattaacccagaagcagagtcattttcccttctcacctcaaaatgacagtttttctaggtcaaacccacaaagttaaagagcagactgactgcctcagaattttgaagaaaatggcaatgccaaatttgtctttttttttcctccccaaatgcctgtttttcagctcatctgctccactctgacgactgcttatgatcagagtagttttagagaggctgggcttagaaatcatgtagttcagcaacctcattgtacaggcgagggccctaaccctctcctaccccaagaaacttggtccctccttaactaagcagtccaaaggcacttgtcctaaatggattgatttctccaagagcccagccactctccagtggctgcccatgcatggcggagggtttggctgagcacagcgtagcgccccacagccatgcagagcccacaggtcatccccggctctgttcctggcattgttggtgactttccattaccaatgttttttagagtgttgctcttgccctgttaagaggcctgaaatggtccagagtcctttgtttatacacaacattctcttcagaaatgagcaccaaaaatggccccacaggcacgatgacctcatccccgttcctaagctaaggctttgggtgtcttccattggtgggcggggtcacgtcaggtgaagtgcgtggaggagagaattaggagacatccagcaagacccacagcgggagagggggacgggggacctgtccagagatttgccttgcaagtcctcaggctttttctcctgcttctgagcgatctttgggattgagggaggaccctccaggcctttgctggaatctgcattggtc

SEQ ID NO: 29292 - DNA, 2377 bp, Bovine  19866880967150
  misc_feature (1)..(1): n is a, c, g, or t
nctttgcttttttaggaatgcccagtgacatgggcttgccagttggctcttgtgagctcctgtctggcccaggggctgctatcctgctccggcccaagcctgcaaatccaaggtgcccatctgtgctccagcgtcgtgcaccgaattccagtggtggtgctggagttgggtcttgcgccagctttacagtttcacggcccccaatctttctgatgctggggagggaagactgcgagggacaggatgcctgcctcctctccactgcgtcctctcatgagccctttgaaattgttgcccatgagttggacgctgtccacgggcttggccaaaacctactggtgtaactaactagctgcaggtctgtttcctgctccgtgcgccttttacttgttctaaaactacctctttagagctctgaagggggcccctgaagtccagattcagaaatttgggggacaaatctgggttctctttaacccttttctttctgaacctatgagaaattctccctgtgagacatctgggccagaagttggggctggtgggggccccttgtgccacagtgctagtaagggggtctgctgtttgtcccagtcctccactgtggcccccagggctcctgtagcccagaggcagagctggattccaagggttctggctgatgcttcaccaggtgcagggcagctggaccggagagcagggcctcaggagtcacttcgcccctggtggctcctggatgcagggagagtcacagcatcagaccactcccaccccagtttcagggcggatccagtgtagagtggaaagtcaggtcaggtgactgcagacaggtgtgcgtgacgcctgccacatctctggggtctggggctggctctcttatctcatcctatgattgggtcagggcagggatgatccaaaacactcatacctttaggctttaaaaacagtgttcagatgagactgacactggaattcctcttgagctgtgagctgggaggtcccgagggaagccacacgctcctaggagagagctgtgcaggttttcagatctgtttgctcagagaccagagactgaaggcatttattgccccctctgagtccttctggctgtttcctccttcctcccttgcttcctgctcctgggccactgtctcccacccagaaggctgggagtcccagctgattgcctgacaggagccaactgcaggcttttgggcattaactcatgttttcagtcagggataaaccattcccatcaagtcccagggaaactttccctgtggatctccttggtgtcgagggacaagctggggccaaggtcattgagttattcactctgtagtttattgagtagctgaggctcaccaggcactgtgttaggctctggggatagaggaggaacgaggtggagtgaggacactgctctttacagttctcatccttggaggaccacgagtaccagcaactcccatttgattcagagacagaaaagctgtgtcctggtccatcaaccctgtgcttttctgctcttgagaatccctggactgtggattcctttagtttggaggttgctgaaatggccacccttggataacatttgccactaaatggtggagatgctgggtcttgggttccaggcagatgccatctgaagtctatctggaactttcaaggatagctgccttccagccagcatcttttgggcactgtctaacagcagtttgaagtcagtgtctggaagaaaaaggagcctggaatttgctgccaaatacaactcaggttcttcagcgcattgtctcttgctcgtttattacctaatcctcctgccccaccagtggatagtgggaggaaaaggagcttctcctttaacatcgaaagcctttcctcataagtctgcctctgttcctggcagatatggagcagggagcacggagaaagctggcaagatcgaccagatgcccagctcctggttagaccccagtctggtggcagttcctggcagattaaaggaggctatttctaaagcatgtgccacatagctccatgtgagctccagcccttgctcccaccctgaaaattggtgactcccaccagagactgagctgctggctagtagctccaggaagttgaatgaaccctaagcctaggtcttctgaagacttaaggatgtaattctccatcagattatgcagcattgatgaaactgctctgtactgtttgatcaatctcagcaggcttagaaaagttaacaagggtgtgtcccctgacctacccaccagttggctggccttgtcataacatgagacccatttggtgtcagataccttttgatctggagttctctctcccacttgcttttccagagcagaatactggg

SEQ ID NO: 29293 - DNA, 1466 bp, Bovine  19866880968160
  misc_feature (1)..(1): n is a, c, g, or t
ntctggggatttaaattaccttcttggcttgactttttggtatctgttacctcagccttaggcaagctcccccctcgtgtgtgtgtgtgtgtgtgtgtgtgtgtgtgtgtgttttgacagctttatggagatattatgtaattcacatacatacagtttacccacttaacgtgtaccgtcctgtgactttaaatacattcacggggttatatatccatcaccacaatcaatcttctcattagctcctaaagaaaactgttagcagtcgttacaactgtgtgcgtgtaacccatattcccagtaagatatagaatgctttcatctctctagacagttcccttgggtccctttacagttaattcccagctcctttcagaatcagtgagcctttgcttctatttctacattttctgatgaagtcattagactctgttcagagttgtgtaaacaaaagcatagggaaccagaaggttcaactgagatgtcctggaaatcacgtgggacttagagtctcctctgtgcagtgggcacactggtacctaccactcaggtcatgaggcttaggtgagcaacatgaatacatttgtctagtgtagtgcctggcgcacagaacaggtggatgcattttaaaagtaaaggagaaccatctctaattgttgtggttctgattctaattataataaataggaaaacagctcgtgatttcttcttatttcagggttatctacaatgaagttatccaaacctccaagtattacatgagagatgtgaccgccattgagtctgcttggctgttggagctggctccacacttttatcaacaaggaacggtaggaatgaacccccaaaccacctgttaacctgcctcttcatatttttaaatatacgtttatttttcaatgtaatgtcctaaacttgcctgccccccaaccccaacccgtggtacatagatgaaaggctgttaccatagtctcagatcgttctgggtaaaagcaccatactgtttgctcacatgatatttaaaatgctcacatgatatttaaaacgtgcatttaaaaataaatccctccagcttacatgataaaaaaaggagaatatatctttaactcttcccctctccctctgcccttttaaaccatttccaaagaaagtctgtcacactttggaccatgttcataagaagcagcacaaatactctgatgaggattgcctcgcagaacgtgtgtgcaagcttaaacctgtttcattttaaacacttggtgggcgcattgctgtgtatgtagtatatgcttttttctatggaagacgtgcattaattcagcatctttggcgtctctgatctattttgtttttagactgtttttctacctcattatgggccacatttcctgcttctcttgtctagtaattttttgctgtgtgctggacattatgggtggtttgctgtgaagaattgaatttgttgt

SEQ ID NO: 29294 - DNA, 1210 bp, Bovine  19866880980598
  misc_feature (1)..(1): n is a, c, g, or t
ntggctctggaggaaggtgtctgctacaccctcccagcccccgccaccttgggtactgcatgctttctccctgacccctttgtacccagcaccctgggtgcagtctcatccaggctggcagggagacaaaatctcccaccacgccccaataccttatcacacttaagggccaaacaacggcaccaaaacccagcgtggagagatgatttaatgcatggctttctgcattttttttttccagcctatggaaatgcaaactccctgcgccacccattcactgaaggtgcaacttcccctccaggctggcaggagggaaaagggtcagggctcttggcccctctggtttgcatctgctttctacaagacacgtgggggtgactagcaatgatagactcgaaacgccccgcagctgtctctggagacaatctttcaggaatttccccctaggttatgcgcttgttaagtcatacatctctaaaggaactcctgaaagtgggatctagagtcggctgacagccaatctgacaactggtttttaactgaaagctggaacggacaggatttccggtcaccctcccagggaatgtaaacgttaggagttggaacttgaacacaattcgcattcttggggatggagattcctcccactctccctggccacgaggagcggacggggaggagatcggggatccgaggggatacacacagagtggggagagttggggaccccccgaccaaccggcccgagctcctaggagacctcagtttcccattttttgaagacgatgtcccgtgcgaccgggaaccgaggagacccgaggggctgggccgcgccgctcacctctcgcgccaagcggagctgctggcgtagcgcgtccttgcagccataggggccgccggcgcccgcgccccgaggctggaagtgcgcctcgacgcgcgtggccccgcggtaggcgccctgatagaaggcgggccagccgagctccagcagcggcggctccaggtccgactgctcggggaagtaggtgccggacgagcagtcgtgcgacgagccgaaggagtcttcggcccccgccgccgcgccctcctctccgggccgctcggccgcgcgcagaatggagcgcacctcgtccgggttcaagaagcggccgaggcgctcgcgtcgcaggaaagccgagaaggcatctgggcccgcccgccagcagctcct

SEQ ID NO: 29295 - DNA, 2613 bp, Bovine  19866881002410
  misc_feature (1)..(1): n is a, c, g, or t
natattcagcaactctcccctgtggggaataggttgcttcaattggtttcactatgagtggctgcctgcatacttcacaagcaaagcacaggtccatccctcctgcttacactgcctgtcaggattcagttgcagacaaaagaatccatttcaagtggtttacagataaaggaattaaaaaatttatatcggctactttgaaaaatcatttgaagagctggagaagcaggctccagactgagcttccaaaagcaaaacctgatttcattaatgttattaggggcaaagatttttaacactggagacaagaaatacaacaaatataaaaagttaagtaacaacctggaaaacctaaatttgaattggaaatgtcagtacaaactgatgacaaaaactgctcattttaaaaatgttatctatttctgaggtcatccaccagaaaggtctagaaataattaataattcagtaacaatgagcatccattgcacatgctgtagtctctaaatactttttcctattcaaagaatatagagccacctttcttgtaggagctgtatctttgagttatcaaataggtgatgttagaataattcttccaataaatgaagaaggactgaaagaaatagaaggcaactattttgtgtgaatgtttcatgctacacctaatgatcaagttgatataaaaaaaacccagcctaatattataggcctcctagtggaagtattcaataccacctacaaagtatttaagcctgaattatcagaagtaaatctattgaagtctctagatctaactaccagtttataggaaatacagtggacaaaggattttgttaaatagcaccatgggattttgatcagaaaaatctaaactatggaaaaattctaaaggataaatgatctggtttctttaacaaaaaaagaaaggagaaagggaagacttataaattaaatgatacttaagacatgtcagtcaaaaggaatgagtgggtcttgcctcaaacaaatcaagtttaaaaagaattacttatggaatactaaatgaaatttatacattaatatgaagaaattatgtttggataatttatatgtttgaagaatttatgttttgggtataaatgatagtattatggttatgtttttattaaaaatattcatcttttacttaatactgaagtatttgtacattaaatattatgattttgcttgaaataatccaataagagttgggtgggcaggaagtggatagaggtacagataaagcaagattggtcatgtgagcaccatttctgaagctggatgataggtatgtaaagggaggaagtagagcttatactagcctctttgtatgtcttaaattttgatgataaaaagttaagcattgcattgtacatatgtaccacagcttctttacccaatggatctctaggttgtttcgtgtcctagctacagtaaatagtgctgcaaggaacattggcgtacatgtgtcttttacaattatgattttctcagggtagcccagtagtgggattgttgggtcatatcgtagttttattcctagttttttaaggacactccatactggcttcgatagtggctgtatcagtttgcatttccaccaacaatgatagagggttcccttttctccacattctctccagcatttattgtttgtagattttttgatgatggctattctgacctgtgtgaggtgagttcacattgtagtttgatttgcatttctctaataatgagcaatgttcagcatcttttcatgtgttcattagccatctgtatgtcttctttgaacattgctcagtcataaaaaggaacacatttgagtcaatgttaatgaggtggatgaacctagagcctattatacagagtgaagtaagtcagaaagagaaaaacaaatatgtaaagtatgtaaaagccatatgtaaagtagatagccagtaggaattgttgtatgattgagagaactcaaaccagggctctgtgacaagctggaggggtgggatgggctgggagggagggttcaagagggagaagacatatgcacacttatggctgaatcatgttgatgtatggcagaaatggacacagtagtgtaaagcaatatcctccaattaaaaataaataaaatttaaaaagataataagacctagggtggacgggatagttaaggagtttgggatgggcatgtacacactgctatatttaaaatgtatagctgacaatgtcctactgtgaatagcatgggaaactctgctcaatgttatgtggcagcctagatggaaggagagtctggggggagaacagatacatgtatatgtgttgctgagttcctttgctgtctagttgaaactataatatgcattaatattggctatactccaatacaaaataaaaagttaaaaagaatgttaagcactcccaatctcccatactctgctttacttttatccctcaagcatttatcactttaaaatataccatacaatttgcttatgtactatgcttattgtatgtcagtcctctggaaagtaaattaagggaaacaacgtttgtctttttcattcactgacacatcccaagcacctagaactatg

SEQ ID NO: 29296 - DNA, 1018 bp, Bovine  19866881004994
  misc_feature (1)..(1): n is a, c, g, or t
ncttaatgtaactaaaccataaggcatcacagaatgtataaaatatgtagatgaaatgaacccagagataaataatgcagggttataatggcagcttctgggcacaacgtatttttccatgggtccaattcgttatatgtaacatctcttggagtcactgcaccaactctgtaatgtaggtcttgttcccatttcaaaggggaaaaaactgagactcagggttaaggaacctgtaaggagtgctatttcagttgtttatggctggtatctcttctgattgatcaatcatatgctatgatggttaagtatttttttttatcatctctcctgcttgaaaataaaagagaaaatgtcagacaggaaagatggcccacaaaagcacgactaagagcaagaaaaggagtccttgcaggaaaataaatgaaatctacgcagagtaaagataattgattacagtcataacttcccttactgttggagctgtcatcacctttggaggcttaggcaggaaatatatgtatcttatcctgaatttcataaaatctgccttccaaaccctgtgagctcagccccctatgactagtgttccctttcttggtgagtactttctcattttcacttcacccaacagctcccaaaccagattcataacagcaactgtcctctctcctctgctctctgtgagatgaaactgtcagtagaataaatcaggaagtttccagacactctgcattttggtaaatgaagtttctgtccagcatacaggctttgaagtctctccgtatgggatttgtgaccttccaggtcaccatgcagagagaagcaagctgtagttgactgcctttacattactttcattcctcccctctttgatctccagccaaagtcccttcactttgattccctcctcttggctcctcttgggtgtgcagaactccaagcatatctctgcttccccctctgaccagctttatttctggttaaaattctccataagccatagattcaatcccatgaa

SEQ ID NO: 29297 - DNA, 1439 bp, Bovine  19866881052877
  misc_feature (1)..(1): n is a, c, g, or t
ngtggttggacaacaacgcgaaagtacttaatgctgcagaactgtccttttaacatttttaattgcatttaaaaatgagtaaaatggtaagttttatgttgtgtatttttcaccacaaatttatacaaaaactcaggtgtcagacccacaggaagcaaacaaaagcgtttcctgaattaatgatgacggaccttgaatcacaagttaacaacatgccccaaagcagacatctttagatgaaaactccttcaggcttaaaaaaaatgctggcacatgctacattgtgccccctcccccaaggtacacagaatttgagaaacaactttcccgacaaaataaaatcaatgagaaccgctggtctccacctacctgattcaagcagcatttttgcaaacatgggattcaaaggaaactctgctattctcatgccaagaggttcagttaggcgacagtctttgtctagacctgccgtaagaacaacaaaaggcagaaggcatgtaccagtgttggaagatgtacagttgttgggagaataaaaggtaatacatgctagccaaggtgtatccaggagatgaatcatacactatcagcttcaacctgattgctgttacagtagaaaaagaaaagatttcctcggagctcttgaatactcaattttgaaaaattaattctaatggcctctatgggcttccctggtggctcagtggtaaagaatccacccgccaacgcaggagatgcaggttcgatccctgggtcaggaagatcccttggagggaggaagaaatggcaacctactccagtattcttgcctgggaaagcccatggacagaggagcctggtgggctacagtcaatggggtcgcaaagagttgggacatatcttagggactaaacaacaatggcctctatgtaaagacctaagtataaggaaatggccccagagccgcctccggcccccatcctctcctagttctacttctccccagaacctccctctcccagggcccaacccacaaccagatagtgccaaacacagagggcactttccttagggccccagcagccttcgcgcctgctaactacagctccttggaaatactcttccccagcgtccatgacccacactgtctggcttctctgccacctctcctgctgttttctctgcctcacctctggactactgcactcacttcccacgctagcaaggtaatgctcaaaatcctccaagctaggttccagcagtgtgtgaatcatgaactttcagatgtacaagctgggtttagaaaaggcagagggagcagagatcaaattgctaacattcactgggtcacagagaaagcaaaggaattccagaaataacattcatttctgcttcacttaccacgcaaaagcctgtgactgtgggatcacaaaaaactaggaaaattccatttttctccc

SEQ ID NO: 29298 - DNA, 1852 bp, Bovine  19866881076680
  misc_feature (1)..(1): n is a, c, g, or t
natgatcctcttaaacacagttatgtcacagcctgttaaaaaccctcccatagtttacagtttttcattatacttaggttaaaatttaaactccttcctattaccctgcagttttcagtctctgtttacctctcaccctcaccttgacacgccttggcctttgccccctctactcttaccactcagctttctttaagtttcctgatacagctcagatttttctcacttgacgagaaagttttctcatttgatggttctatttatccatctacaatctatctacttatctatagactttcagctattgcaaccctatctgagatgaatccaaggttttggtgaatcccacacagtgtttggtaagagttggcaattctctctcaaaagtcatttagcattcaagataaatccacattaattgtttaacttccagtaaatagaatttaaattatgtaaaatataactgattgtctcgttcatgtatggttttgagtgctttatttttgagaatagaaaaactatataagaccttcaaaggacttaatactattcttgcttttgttaaccttattctcctcacaaggcagtaagtttttctattgtgaattctctgaccatagagagtttttgacaagtcaatcctagcttttggggaaagcttcctagaaaatgtattatgtttaatacataagcactttttagttctctttcccaaattctttcactacttcagctcatttgagcaaggaaatacccttatgaggtagatagggaagactttatctttcctattttacagatgataaaactaaatcagcctgaaatcatattgattggacgcaaaatgaactcactataggccaagcatattgagagaactgtgaagaaagatgagacaaattaacattttgactccattccctttatctttccagttaaattaccttgttttcctttcactgctacaaacttggctttgccagtgcagacctgacctgaatctgtccatgtttggatctgtccatacttttgcacagagggatgaccttaatgtatttgtagaatctacatgctgtacactaaaggccatctggcaaatgcaaatacagcaaatggaaaacgcatttcaggtgtggatcaaaactgtcccagcaagataaataactgcagtgacagggacgctggctgtccagatacatgctgaatgtctctttgaattaaaagcagagtgtttgatgatttcatgtctttcccatctgaaaatttaatcttcagcgggtggaggaagtcatctgggtcactgacttgctcagccagattctcaccaacaaaaaggcattatttggttgagtggaagtgatgggaaccttgggagaggtgacagagtgagaagttaaaactggggacagtcagatgatgggaaaggggaatttcaaacaattgagagaaaaaaaaagtcagcttgaatctgtgggctaagtcttcaaaatgcagggtgacaatggctggaaaatctctccgaagtgcaattctgcctgtgcaaatttttccagcaatggagaccatggagaagtaaccagagaaaccagtgtggttagccagggagctctgatgaatgccagtgcagaagagacacccagaaagatggaaagaaggactcaggatcaagaacaatatagacgagatggcagggaaacaagaagactgtgtcatggagagtcagtgcagcaggatctgagggttcaaatttgttgaggaaagcataacagtcatctcccaaaaggtggtctttagaagatgctcttaaaagctctaaaagtcatttttcatggaggcagtagatctttgaagg

SEQ ID NO: 29299 - DNA, 1235 bp, Bovine  19866881101205
  misc_feature (1)..(1): n is a, c, g, or t
ncatgaatcttctatcaatctcttctgggacatcagcctttggagctctgagctgtcatataagaactctggcttctagggtgctattctagagagagcacatggagagaccagagaaagatacagagaaatgtgtttggagtcccagctatcccagccccagcccaggattcagatatgtgagtaaggaagatgacttcaaacgtcaactgacattgaactgcaacccacgtgaaagaacctggacaggaagcaaccagctgcaccaagttaacccttaggaccatgagagatggtaataaatgattgttgttgtttcatgccattaagattaggatggtaaagagagcatagaagaagcccttttgtgatgagaaaggatgacactgacatgctggaatagatggaggtaattacttgactccttggtctagttgtctggaaactctcgtccctgcccttcctaaaataattccttagatcccttgagccactgaactcttcttatgacctaagttagctcaagttggatttatatctctggcacctaaatgaatacagatgatttaggatgaacccaaagagcttgatgtgtttggagcacacatctgggactgggtcggggaggaaagaggaggtggcaagtagcaagagatgaaagatgtggggtgatccccgggaagatcgctgatgaactgtaggaccccgcaaggagctttggtgtctttactttctgtctcgcctgtctccacaaatgatttggggtgaccaccaaggattttggactttattataaagacaatgtggagccagtgaacaattttcagccaaaaaatgaaaggctcagatatgcattgtgaaaaggtccacctgccagtttagatgatgtgttggagagaagtgaactggtcaggagtctattgacgtgatgcagggaagaaatgatgagactgaaccaaggtggagtaatgggggtggaacgaaagagtagtgagcattaaggtagaatggacagacctggagtcctttatgagaagcaggatgggaaatgactaaggtggtttccaagttcgtggtctgagtacctgaagaagcaacagtgcctttgccaagatcaactcaaggggtaggatgatgccttgagctttcacttgcagagcttgaagtgtctgcagctattaaaggggaaaggcaatgaatgcattagttcattcatttaaaacatttattaaaca

SEQ ID NO: 29300 - DNA, 873 bp, Bovine  19866881109022
  misc_feature (1)..(1): n is a, c, g, or t
nttcggaccggcttagcgggagatgctgatgatgcagttcccagcctcgcgcggataattggagctttgaatctggccctcccaggagggccgtgcggaaagccccagactcggagctcccgggcatctcagaaacccagggagagagagacgcggctccttaagagcttctcagaaccgaaagccgagctgcttgcgcgcgcatgtgattgaattccacataatgggccgctgttctcgctgtcagaagcgcccacccgctctcggcggccctgcacaccaggtgccacctctgaatcgccctctgtggagggcccggggccccggggtaccaggcgcccttgcccgccgggctctcccaggaaggcgcctgccgttagcctcctgggccggcgcgggtacttccctgagggccctgccatttcctgtggctggcgaagcaccggagaaaaaccctctgtgtgggaggcctcctcagaggctggtcataagcatcttagcttagccagtgactcgctttcttcccgagggcaaggcacttggcctccgggagcctcagttgcctctaggagatggggctaatcaggccgtgggaggatgggggcaggaccctgtgaggtcctggcagccggttgctccgaggttaatacccaggcctttcagaaagctttggaatggggcgtgtctccttttaggcaggagcagaagtggagccctggtgggtggttctgcaggcactgggggagtttccacatcttcctccctcagctttgtcatcaagaggcagcttgcaggcggctggtgggcgctggtgagtcctttgagctcccagcctgctcccgggccttcccacacaactcccctccccagccc

SEQ ID NO: 29301 - DNA, 1132 bp, Bovine  19866881234047
  misc_feature (1)..(1): n is a, c, g, or t
ntttagaggctctaagcttctgtagctcaggaacataacttgtccgtttgtcttctgtgtgtttgcttgggttcttgtgagaaggcgggggcccttccagcaggcactggtgtcattgtccccggggctgcttggctgtgatgatgtctgcaaacacatagcttgaaagtttatttttgtactgatcctagtttggatgtgccacttttggcaccaaacgtgtatgtcatttttatttctgttttataaacatgtaaataatagtggtaacttgttaataatagtaaacctttatacgtaaagtaaatgtagtccctcccatccatggttctcctggtctatgttttaagacagtccagtgaatttttacaagcgaatgcttgacatcagctgagaaaccagaggcttggcacatagcaactctggggtcatgtgggcacagggagccccatagagcaagatcatgtgatcaaatgccctccagacatccttagagcagacatgggatgttgtttatataaagtcccaaagaagtgccagttctcaccagtttctgattgggatccttgtggggaaaggtcagaaatgctttcataaagtctgaatttaggaccagggctgatcctgttgaacttctcttggggtgggaggaggcaaaggggcacaatccacatcccctgggggcgagaccacacatcaaatcaggagatcaaacaacagtccggggtgcaagctggagacagcaaggtgtctccggccacctctgcccgtgggtcccatctatcgccgtctctccacctcttgggcagtccccagcagggcaggcaggcctcccagcggtgttcactgtgtcacgttgcagcccctcgtgtgtggagatggatcatcaccatgaaaggcctgtaaccgcgaaatgccagccttggccccggggcccctttacacgtctctgcaggaccacgtgaccttgtcaagagagcactgactcagccttgctgagagaccagcagggcctgatggcctggcagctcccaagactttgtcccccagttgttccacaagaatgagccctctcaaggcccacacaggtgctcagatacgactttccacgactttgcagtgtcttctgaag

SEQ ID NO: 29302 - DNA, 1169 bp, Bovine  19866881272417
  misc_feature (1)..(1): n is a, c, g, or t
ncccatcctcacacaacagggaagatgcggttgtgcctccagagcgagacagagaccccaggtgacgccggacgtgttttcaaccctgtgggcggaaatagaaactcttagtcagctgtagggtttactgaagaatttccctggttaacagaaatttgaccgatggggaggggagagggcacagattctagggcaccttggaggcctgggctggtggctctgtggttcctgctcagggcctctcatgaggttgtagtcagcatgtcacccagatgcccatcatctgagggcttgactggggctcaagactctgattccacgatggctccaacgtggctgttggcaggaggcctcagcatctcatgatgaggtctttccaaggctgactaagttgtcctcacagcatggcagctccttctccagagtgagtggcccagggagcaagatggagcctgcagtgtctgctgtgacccagcctcgcagggcacatgccctcctatgatgacacttggcagtcggtcctattcagtgtgtgaggcacttgcacaagcgtgggaaccttaggaggaagccatgcgtcttggggactggatgccacagccacagtgccctttggctccacctcgtgtcagcccacaagacctccacaggtgcccaccacttggagccaccatttggtggcttgaagacggggctccacattcccgtgggatgactgttcagaaggggcagagccaactagctaaatactcctcctgttattataataccagtaataatctactctgaagctttcctggtggcttagaccaccagggaagaatctgcctgcaatgaaggagacctgggttcgatccctgggtcaggaagattcccctggagaagggaatggcaacccactccaatattcttgcctggagaataccatggacagaggaggctggtgggctatagtccatggagtcacaaagtcaggacacaactgagcaactaacacacacacacactaatctactccataatctctcagatagcctcatgaggttataactcctctcttacagatgaggaaaacaggctcagacagaggcgatgacatccctgaggtcagatcactgggaaatggggtctggattcttagctgctccacctgtgttttcaggcagggg

SEQ ID NO: 29303 - DNA, 1313 bp, Bovine  19866881287453
  misc_feature (1)..(1): n is a, c, g, or t
nacaggccttttggggccccatctctctacacagatgctgatcaccctgcttaccatctgactgctgtccaatctcactctcttgtgctaaagggcaagtgagaacttaacaataagcagtcttaagtatctccatgagagtggccaactatcagacagaacccttccctgcggctctttgcaaatcaaccttccctctctggcagctcaaggttatcactttacttgacaacaggcaagtacaagaaggtctggtactgatgcgtaagcccaatactttggccacctgatacaaagagccgattcactggaaaagaccctgatgcttggaaagaccaagggcaaaagaagaaaggggtggcagagatggttacatagcatccccaactcaatggacatgaatttgagcaaactgcactgcaggagcggagaaggcaatggcaccccactccagtactcttgcctggaaaatcctatggatggaggagcctggtgggctgtagtccatagggtcgctaagagtcagacacgactgagctttcgctttcacacgactgagcttttcactttcactttcacttctcacttttatgctttggagaaggaaatggcaacccactgcagtgttcttgcctggagaatcccagggacgggagagcctggtgagctaccgtctacagagtcgcacagagtcggacacgactgaagcgacttagcagcagcaacagcagcactgcaggagatagtgaaggacagggaagcctggcatgctgcagtccacagggtctcaaaacgctggacacgaataagcgactgaacaacagactacctccaatggacgggagcatggagggggcctttgtagcggcaactgtgcttactttgataaatgcttcatacacattgagcatggtaagatggtcaccctcctccacagcaaattttcggtgcgctcgaatctggaaagaataaggcaatgtttagaagctgactcctgtgagcctcttgtcctggaggtaacattacacgatgaatagctcagtataattcatttgcaacactgtcttaatttcaagtgtacataaatatcgtaacttttccttcacagtctttccagcattcacccatctactcatcacgaatgcctgggctggggagggccctgtcagcactttggctgtgccaggccctgctgtgcccaggcaagaactcctggcatccctaatgagcccacccaaggttgcccccagagaagccttgaaaacaacctcccttacttttgaaaagtcagtaggacaatgggttaagatttg

SEQ ID NO: 29304 - DNA, 1285 bp, Bovine  19866881305720
  misc_feature (1)..(1): n is a, c, g, or t
ntgattcttgcccggggcccagagtaggctcagaagcccaggtctcacctccgggactcgtggtcagggtgagcgaggtgcagtgcacggctctgcctacctggtgccctcccctcactggagaacttggcattaaagctcaaagcccagattctcgtggagcgtccagaacaaagtgtactgcatgcagagtcctggcccggggacgtgagggcacctgagccctgaacgcaggaggaaagctgaccctggccctgagtttgaacattctctggcattgcccttctttgggattggaatgaaaactgaccttttccagtcctgtggccactgctgagtttcccaaatttgctgacattgagtgcagcgctttaacagcatcatcttttttaggattttaaataactccacagggattctatcacctccactagctttattcatcataatgcttcctaagggccacttgaatacacaccctaggatatctgtctggctctagatgagtgaccacactatggtggttatctgggtcattaagacctttttttgtatagttcaaggaatctttggaatttggcttcttttgaaatgaaatgggaaagctacatccaagcaagcaggtatgggagttaaagaggacaggaactccccagggtcactgtgggtcagtctgcattctgagcgttgatttattcattcagcaaacagtgttggcgcttactttgtgcccagtcttagagagtcaagagcagatatccaataaatgtttgtggaaagaaggacagaggagagggggaggggagggagaaatcaaggaaggaaggcaggatgcatggatggatagatggacagaaatgccctcacagagtctgtagtcctgaaactaatatttacaaccagcacagtgctggtcaaaaaaaaaaaaaagtgagccacatacttaatttcaaatgttctaggagcacattcaagtagaaaagaaacaggtaaaattaatttgtatactttctttaactcagtctattctttcaccatataatctatacaaaaaattattgaaacaaatgttttcccatctttttttgggggtggggtactaaatctttccaatccagtgtgcatgttagactcacagtgcaaatatttcaatctgggttgtgcagacctcgagtgctccatgggcccctcgggaagggtgacaggtgggttggaggtgcacactgcctcctgagggcacttaattcaggctcaaggagggtggggcattcagtcacatattcct

SEQ ID NO: 29305 - DNA, 2826 bp, Bovine  19866881315923
  misc_feature (1)..(1): n is a, c, g, or t
ncaccatgccgaatgtgtgtacatccatcttcttcattatgagccacttgagggcaggtcctgccacttatttttctctttcttccaacccccatcacagtgccaggcacacaactggagtcggttagttggttagtctccttgcttgttctatcaagccactgggatactgtgttttgcggggagaaaagagagaaaatcgggagggaaggaagaaagcttgagaagtgcgcgtgtgtgtgcgtgtgtgtgtgtgcacgcgcactcagttgctcagtcatgtccgactctttgtgaccccatggactgtagcttaccaggctcctctgttcacgggattttcccagcaagaatactggagtgggttgccatttcctcctccagggggtcctccagacccggggattgaacctttgtctcctgcattggcagggggattctttaccgctgagccacccgggaagccctatagaaatgcttgttgttgttcagtcaccaagtcctgtccagctctttgggaccccatggactgcagcatgccaggctttccattggaggagggaatggcaaaccactccagtatacttgccgttagaaccccatgagctgtacaaaaaggcaaaaagatagaaatgcttagagaatgcttcatccactgtagttattaatatggctgttgggctctgcccaccatgtctccagcacagggcagctctgctttatcctttccctggtctccctggctagaaaccagagaaccatcttcctatcctttattctaatgctgttcgcctctcctgtgtctcctgcattggcaaggtgatccttggccaccaagccacttgagaagcgaggcagctggttaaattctcaggggctggagggaattgggaaagggctataagcccttgggtctgcatcaccgtttctgtccagactgtcaccactagagagcacagcgcacccaggaagagggtctgcggagccctggcactggcccagcctggccctgcgccgcccccacctccgcctctcctggcaacaccccagtgggcagtggagatctggatgaagctcagccctgccccagacactttgcaatcttgggcctaattaaaacaccacagacggtctgaacctcgcattaaaatttgatgagaaattgatcagccaagcaaacaggaaatttagctgtgagtgaaggtaatgtttgctcaaatgtgtaatgaggcccatggggaatatttgtggggacccccatcatgtctgaatctactcctgctctgcaatttcattttccccacgcgcctctcccctcgaaacataccaggatgcttccggagagaacggggaaccagaaaagttttgacttgactttacaaatttcctttgaaagcccaaagtgaaagtgaaaggcactcagtcatgtccgactctttgcgaccccatagactatacagtccatgggattctccaggtcagaatactagtgtgggtagcctttcccttctccaggggatcttcctgacccaggaatcgaacaagggtcttctgcattgcaggcagattcttgaccaactgagctatcagggaagccctaaaagcctcagcagtgtttgcgaacgatagctcaggaagagcagagctgggtgggtgggtgggtgccattacctactggtgtccatgttttgtgataattgatttcataattagttgttgactacctactgtgtgtcacctccacgttagaccctgaagatagactggtatgtaaaataagtcatggttcctgcctccagggatatatagttgagcaagagaagctctgaaccccaatttccccatctgtataatgggggtgttggtattgtttcatgttgggttgttggataaatttaaatgagaaaatatgcacagaacacaaaggacaggaacctcatatattaaggatcaaatgaagatttttctacacccttcctccccatagcctgcatatcaagtctaccaagacttctcagcttttctcttattcagttttctgcaggtgacatgacttgatattcacttgctggggggtgtaactgaggttgaagatgaaataagtcacatgacagatcttacgggaactggaattggctcagaagttctactagaaagatcaaagagaaggaattctttggtcctctgatggagaaagtttctccaaagattaggcaaaatttctggaagcttaacacttcccttggacatccccaagatcctttcagcaggagaagagaggagcctggagtgattttccttctattcaggctgtcatgaggaccctttgccctaagggtgatgaagtgccctcagctttcccatctttttatcactcctgtctccatcccagtgccaactatcaggcattcctcatcttcattcctaccttgaagcccaccatcatccattcccattcctgtccttttcaccactcttcgccatttgttcccttcattgctgccaacattattaagatcgtcaccattatctttattgcaaaatagccccatcattggtttgtagatgcagccaggttttgttggcctgtcttttattcatggccttacaaatttataagacggttgtgttcatgaaatttctggggtaatttcctttgcttggttctaaggtgtatgctcccctacctcatatgttttaatgcttctaaagttagaaggacagggaagcctcatgtactgcagtccatggggttgcaaagagtcggacatgactgagcgactgaacaacaacgacaaagttagaacgcatcctataaaaatagca

SEQ ID NO: 29306 - DNA, 1433 bp, Bovine  19866881385193
  misc_feature (1)..(1): n is a, c, g, or t
ngagttgtcaactccaaatgtcaacagtgccagatttgagaaggcttctactggccatgaggcccctcaggtcagtgactgtgtctgattcagtcagccctgtgtccccaattgcccagcatgacggcgggcacacaggagacagtaagcattaaagggatgaatgaggacttggaaggcctcatgtctcttggagtccaggaggtttggcttgtgggacattttgaatgaacaggagagagatgcagatgaacttgagcgtgaacgttggtcattcaggccaaagaaattcagaccaaagctattttccttcccgcccgtccgccaaggaggcacttgggggcccgaattatctgaattgttctatgatcatggctgcactttgctcacatagacacaggtccgccctttatctggacaagcaggctggggcaggggaaggtaggtactcacaaggaacaccctctcagaggggcccctgggatttgccaagctggggtgcagctgctgtcagcttcctgtttttttccctttctggtggaatgaaggaaaccactgaatggctgtttttccactgacatttacagcaatgtgataggccttggattaatgaggtcaagctccagtgtgaaatctgcctgataacttgaagcttggccaacaggaagacatggcttgttttctttgggcatttgatgtctttggatggctttggctagggaagtaggggtcacaactctgtacaaaagacgggaatgttttatgccccagaattacagaggccagaattgtcttttttttttttttttcaatttattgggaaggtttattttcacatggactttgaaataaataattcatcaaaaggaaggttcaccatgagccctaggttggctgctacatcagggccattaaaaggaccacgctgtttttctgggcctccctgggagtctgaaggaagagactggccccaaagggtttttggacaggttagagctgcacatggattagaactcattctgatgggggaaggggtctcaagcatatgcctcagatttgcttgcgggtttctgtaagaggcagaatctgattccttaggtctggggcctggacatctgcatttagaataacgtttcagaaggagtcatgtgctgctggtctgtgaactgcactttggggagcaagggtctatagctgaggggtccccggtgtcacccactccagcaaattcggcctgtcatgcctgctcgcacagccatctgctctgtgggctggcttgcaggagaacagacttactgtgccccttctctgtgtgctcagacctgggaccaagcatgaaggaaaggctgcttgctcccaaggggccatggaaacgcctagaacaggtgcgaggggcttctggtgcttccagaaacatgtgtcggggggacaca

SEQ ID NO: 29307 - DNA, 521 bp, Bovine  19866881411263
  misc_feature (1)..(1): n is a, c, g, or t
ngggagtcgggggaggggacaggcagagctgggaatcccgcgctcacctggatagcgttggtcacgttccagcctgcctcccatgccgtgatcttaggtttgtcgtggcctccgaactcgccaccagctcctagggactggtccttggagcccgagggcggcaggggcgcgccaccgccgcgctggtaatggatgtctccctcgacgggtggttcggcgccctcgtccccgcagggctcgccctcgcttttcaggatgtccatctgcaagccctgacggtgctcaaagtcgaggtcgtcgcagtgcgcgaagcccaccgcttcctcgtcggtggccgcctgaaaacccatcctggcgaacatgccgctcaccttggcctgggacttgttggacacggatgtggccacattggacagcttgctgcggagcagggtggccatggcggcggtggggcccgaggagaggacaccagggaccggggacccgggggacgcgcggccaggcggcgagggccagggggg

SEQ ID NO: 29308 - DNA, 884 bp, Bovine  19866881416160
  misc_feature (1)..(1): n is a, c, g, or t
nttttttttttaattaatttattttttatttgaaggataaaatttttttatagaatgttgtcattttctgtcaaacatcatataaatcagccataggtgtacaaatgtcccctcccgcaatcaatattttttaagtgaatgaataaattgatgttattgccaggactggctggggctcttgcaattcatcctgtaacccagatcccaggcctgcctcatgtttccttgcacaaacccagacttaggtcctgacccaactgcatgctactgcagggtgattggtggattcctacacccatcctggtatgtgggagggacgaaggaggtgcaggccttaagggtggggaccccaccaaagggtatgggtagaagctccctggaaattagtcacacttgggggcagggagtcagggctgcccctggcccatttctatcttgttgatgtggaattggagaaaatgctgatttttttttttttttttttttgagcactggagacagagagcaatctgggttgctatgcaaccagtgcctgtgcccagctgataacaccagaggaattaactgtccttgtcccgcacaggctctggaggaggcggctgatgctgcctcccagcaccctagcctcagccccacaccagctcagtttctggcccagctatggatgggggagtctggcctctctcttgcttcacaaagagcaaccaggggagtcccttgcctcgtgccaaggaggagggcattgcagagtgtaaggagggggctgcgtgggggtctcttggacacagggcatccttgtcttctttgatctgctaatgagctgtgaattaaagacaaccacaaactcagagggaggctggaaagagggcaaggcttgtgagggc

SEQ ID NO: 29309 - DNA, 819 bp, Bovine  19866881418660
  misc_feature (1)..(1): n is a, c, g, or t
ntcagtcctactgctggagaaaaccatacaactatggagactgggttcattagacatttatgatttccatatctatttaatgtcctaaccctctgctgagctgtagctggagaacttctcttttccccatagtacctactcctaacatcatgattgtcccttgagccccaagctgttctttattgggaaaggtcccagtgcctacattcagatgtctcaattttggacggatgccaatagactgccccagaacccactggaaatgtaggagtgagaagatagcgaaagtaccaggttttggggtgtattcatagaggtgatgataaggacctgatttactgaagagaaacgcagcaaggagactgagatagaagttggacattttcttctagagcatgtgaaatgcttccttttttttgatgctctcagttttccaagaattctaggctcagtggcttttcaagtgttaacacacactctctccagcctgtgcctctgcctttaattactctactgactgcagacactacctggagccaggtcctggctgtcgcagcttcagagggagtttattgccaaccatgcattgtagggactaattgtgagccccgtgcacctgctggtgccccctgtggcagggacttcagggggaagggttattaatgagcttgttgctcattataataaaacaatggggaagttggcagagggactggaggtccaggtgtggtgtcagcaaaggttagttggcatttctggaaacaggactttacagtcttatcacctacctccttctgtggctcttgctgtgacatcagt

SEQ ID NO: 29310 - DNA, 1060 bp, Bovine  19866881543413
  misc_feature (1)..(1): n is a, c, g, or t
natagtcgtgtgtgccgtaaatatttttttgaattaaactaaataaaatctaagttggcatttgaaatattatctcagagaagtggatagtccagtattgagctttctttcccccccatttataattatctcttccatactctttactgtttaaccttgttaatataaaagtttatagaagtaattgtgtatattatttctgtcctcaaggaaatttttgaaagagaacctccagaagataaacataagcagaaaaatatttggatgtccatgtgttgctttccttctcccttttttagcatgatttattcttgatttctggggtgacagtaggggaggggtcataaaaggctcgagagaagatggagaggatagttttgtttgtgtgaagtacagcctgcgtttttgatgagtttaaatgcatctgtgggaaggtcttgctggaagtgtttaaaatgtacttgagacaaaattgctctgcttcccaaggaccatccgtgatgatcatgaattgcacatccacccagcatcggtcctctatgcagagaagccgccccgctggtaagccccctcctgcccctctgctttgtcagtgctttgaaggcaaggcctcgttctggttcgtctctgggtccccagcgcctagagtccaggtgcccagtacacatttgctgactctgttctacaaagaatttctactctgtcaaggatccctgtaagccaatggtcttattcctctgcctgctgatcccctcagcaaacattcatgttcacccacagactgggtgctctgtcctcactctcggtatagctgtgcagagagaggaatccaggtcccattccacagcccgacagagaacagatggactccagtacctggggagaaaggcttccgtagagggatgtatttgataggtggctgaggttcacacttccgcgggccaggctgtaagggctggcttcggggagcagatactaatactcgctgtggaagctgatacggctgcagggtgggcatgggtatctagttccccgaccaggaagtaacccggcccccgca

SEQ ID NO: 29311 - DNA, 931 bp, Bovine  19866881700960
  misc_feature (1)..(1): n is a, c, g, or t
ntggagtgggtagccgttcccttctccggggatcttcccaacccaggaatcgaacccgggtctcctgcattgcagccggattctttaacaactgagctatcagggaagcccctgacacatagtgctgaataaatgttggtcgactgaattaattaatgaaaccctacttggtcccattatatacaatctatgattggacactaacccctctcagagcctcagttactcattagtcaaagagggatgtgatcctgccctctagccagatgccttgcagattgtcaggtcctgcccactgcaggaactggttctattcacttccatacccacccccgctcctctatgcttgacacctggatttctgagagcctgggggctcagccccccagcacatgcatttattctaaaataggagaccagcacacacatcggtctgcctggtccccctccccctccccacagcttcagatggaagtggggctgagagccagccagcgacaaaggagcaatcaagagtcattatggcttatttagggtgggcttagtgattggctgagaagccccagctcgctcctcactcaagaggaagaaggtctgagcaaggcagctggaaaccagcccctcagctaattctttccagcacccagccccaaggcgggctgtgagagacaggagggtccctgaaggaagccttgtcctttaggtaggcagtgactacccccaccccctaagcctatgcacaagcatcccctgagctgaagattgcacctgtgtgatgctaacccggaagagttctaaagctaagtctggccatctatcctccaaccacatttacgatgaagtccaaactccctcccttgcactcacagccaagaagaccctgtgtgtcctgaccccagcctgccttagcattttcctgtccagcagtaaa

SEQ ID NO: 29312 - DNA, 771 bp, Bovine  19866882075752
  misc_feature (1)..(1): n is a, c, g, or t
nacccgtccctgcacggccagaaagccttctcccgggtgtctcagcctcacgtccgtctatctggttgccacggtgatggcagaaacatgaacccagatgaggatgactcacttcaatttaaataaaagcattaaaagctactctttgggtctcaaagtccctggttactgggactctcccaatgagcagaccgtttctcacagttccacagttagtgctggaaccccaatcaatcaccacaggggaaaaagtccctgactctgcaagttttgagtgctggtactcgcccttctagaaaaatacaactgagatttgcagctggagggggaaatattcctaaagaagcagactagacctgactggtcattcacgccaagcttcaaagcataagcaaggtcaaggctacaggaggccaacctggactgtggccactggcttctccacttccggcgtctcctccgaaaacaggggctcgaaatcgttgatgttttccacatcttccagagatggttcgagctgctccaggtcaggagtctgagaagagaagaaacataagacagaacctgtgactcagcgagccttagctctgtgagctcatggtcaccaaaaagaactgggatctcacccagtgtcctgaacgtatgtccacacataaaaacgatgaaaagtttctaaactattaaaaaaaaaaacccaaacacacatgaacacaaggttaaaagactaaaaagccagagatgggctttgttcttaccccctaacttccccac

SEQ ID NO: 29313 - DNA, 2339 bp, Bovine  19866880458358
  misc_feature (1)..(1): n is a, c, g, or t
nctcccttggtgatcgtttctgcaggctgtgtgagaagaatatccccaacccctgatcttgaccaaaagtaaacagtactgtggatgcattccaagctatttggaaacctcactctaacataaggaccatttttcctattggagagaacactgaggagccacagatggttcaggaacacacaactgggccaagttttaacattttagtgttgccacattgggttttgttttccagtaataatgcagccaagaatcttgaaactcctgcccttggcaggaggctgcttctcagtgcttcttactcaggagagctagttttctgagtatcctttttttttttttttttcattaatacaactgtctcataatatctgcggcccaaaggtgtctgtcatactttaattttaatttgggctacttatagctcctggtaacacaaataattgaaaaacattttaatttttatcagtttctcacctttatcagggcctccctggtagctcagcagataaggaatccacctgcaatgcaggagaccccagtttgacccctgggttgggaagattccttggagaagggataggctacccactccagtattcttggacttccctgatggctcagatggtgaagaatccacctgcaatgagggagacctgggtttgatccctaggttgggaagatatgctggaggagggcatggcaagaacactggagtgttcttgcctggagaatcaccatggacagaggagcctggtgggctacagtccatggggtcacaatgagtcagacacgaccgagtgtgtatatctcatggacaggggagcctggtgggctacagtcaatggggtcacaatgagtcagacacgaccgagtgtgtatagcacatgcaccaactgcattaccaatcaccactctaatcacagaactctcactcacacagatactattcacaaagcaacctcacatacatggaatagggctgagaaatgggacacagggggaaatggcccctgaattgccaaaactcaggctcaatcagtccataaaccctacagtttgtgcacttgactcattcaataacttactggctcctcacgtggaacctgctctatgttgttatacacataatgctaacaatcctggtgaatctgacttttaggaggcctattagaaggagaagagcctggtaagagcaggaagagtgaggactgttagagacaacctcaggaaaccttacaacctgggatcgttttccatttgtgctccacagagtttaataaatgcaggagctatcagtcaccatattaaaatgtcatacacaataaatgatgtgtatggatcactgagagataaaaaagactatgattcttcttataaaataggttcccataaaaagtcaactcttttctaagtggtcttatagatgtaaagattcaggtatctataacatttacttacattgattgcctcatctcccccagatgccatatattaataatggctaacatttttttttaaacacttcttgtgtaccaaatactatcttacgtgctttaacctttacaacatgattatgaatacctgcggagagggaggtgaaaactgactaaacagagtgaggaaacctgggacatcccaacatttttgataccctggactgggaacagtgggttaacccctgttcctgggcaataaaaatcccagggcagttcttcagtctgttcattcttatttacatcctagaaatcagaagcttcaccagggtgtagatgtcttgtgctcagatggctctactgtttacgcacctttcaccggaaagatcatgggccaggagaaaccttataaaaacaaaaatgccatcaataatggtgttcggatctctggaggaggtaagaagtggtgtatgtacctggggcatatagtggagatctctgatgcttacttcatgtgtattctatacagagaagttgcattcttctttcaaaggaacaaaacctaggaactaaaggacaagggtactgtactaaaagagcccacacattttccaagatgtttcaccactttccctacagtcatcttttttatacatacactccccacctagctctatacctgactggggcactttcctcctgaggtccacatggctttgcttaatattctccaagcaaaatcactttcagcaatattagctataatgaatggatgctttcatttaccagttccacaactggaaaatgttggcatttctgcaagagtttatgtgaactgttttcaaatgttcagctgtacatgtgtctagtggtcaaagtaaagtccaaagcgtaaagaacaat

SEQ ID NO: 29314 - DNA, 1593 bp, Bovine  19866880499303
  misc_feature (1)..(1): n is a, c, g, or t
ngcacgcttcctaatatgctctgcgaacacagtgtaaacagtctctgagtgtgtgagaggcaggtctgctccaggacaggctcacctttaggaagcacaggggagccaggaacttgtctgccctttgaggacagacatgggacctgaggcgatcagagccaggaagatctgactctgaaagctcttttctgaaaatggggaaacagcccaaagagggcagacatctgtttcagggctctggtcagctggccgttgctgccccttagggtaagagtggctctgattctaaagggtcaagcccaaggtccttccctgcacctgccgcagaaggagtttatcaggtttctgggcagcagaggggcatggggcaccttgagggaagatggtgtggttggcaaggagttatcctcatcatcttgtggttgtagccagttttagagttaatgaaccttaagcaattgtgtttcaccaaaccacacaaatcaccgagagatccacgccaggtgttcatccagccgttcgaccaggggaaactaggggtcagaaaacttaagttacctaaataaggagaggaattaagactatcacaaactttagttcactaaagaactttcgatgcttacagctgtccaagagagcagtaagtatagcactaagtggtgagttccttgtccctgggagtacgtaagcagcatctgggtatctgcttactgtgacaactgtggtgggcattcatgccttagaaaggctagatgacctcgagggagtcgaggatctggctttggtaggatagtgggaaggaaggtgaggggtggtgggccatacctgcgcttctcgttccaggcgttgtaccatttgatgaaccgcttggtgctctgcagcttggggtgcaggcagtgctcctgaccccggtacctggacatgctcttggtggtgatgctgaaatggaggaaggtgaggtggaggattgagaagccagaatgacagcccctccgtgtggctcccggtcaggacactgagagactgtggcctcctttcaaagcgccctacccatatgtgccctccctggttccttcataaaagtttctggttgtccccttaatctctgactccacattcaggtctagccttgtacagagtgatgggctgtcactttttctgctggagcccccagagtctgggagagtccctccccaccccccacagcactcatgcctcccttagggaacagatgtcaggggacccttccagcttctccaaacctgggatggagacgtggaaagagctaacgccagcatggtatatgtgccaagacctcattccttggatttgaggcactccatggctgggcttgaatgtgctgtggtctctgtctgatcttctaaaccctagttccctggatcctctgcagattgttctggggctgggcatttgttgaccttgaagctgtcttgttggccttgaagcccattctgactcctgagtgtgaagtcccagttatctcacccttgggaaggaaaataagactgcccttcaggtctctatccaccagtgtcccaacaccagggagatcagccacaggtagagaagcag

SEQ ID NO: 29315 - DNA, 622 bp, Bovine  19866880537494
  misc_feature (1)..(1): n is a, c, g, or t
nacaactgggggaaaaaggaagaaaagcagtgattagccaacccatgaaagaatgttcatcctcattaacagtcgaggtaaagcacattaatgacttcagtattgtggcatacaatagtgaaatatttattttaaatagtaatgtctaaagctgcaaactgaggaaaggccacataaccattactagcagggtgagattcggggaaatcatatttattgaatgtatccagagtgtttcacgtaaaactatttcatccttttaatccacttcagaaaatctgttttaaaagttgacaaaggagaaatgccacatgcaaagatattctttgttaaaaacagttaacctgaaagcccaacgcaagggaattgttacctaaacaatgaaagttctaaatgaaatattatatgggtgtgaactcatgattacaggatctgaggaattccacggagtaaatgctcatgtagtacgtagagaccacataaggtcatgtaaaccctgtgattgcaagtatgtaaaacagcaaccactgtataaaacatggcaaagacagagatacaaacatcattctctttgagtggtgggacttcaggcgtcttttaaagcttctctcctgctttccaa

SEQ ID NO: 29316 - DNA, 873 bp, Bovine  19866880570030
  misc_feature (1)..(1): n is a, c, g, or t
ncatcgccgactcagtggacatgaatttgagagaactccaaagagatagtgagggacagggaagccggcctgctgcagtccatggggttgaaaagagtcagacacggctgaagagcaacaacaattcaattcctgtcgtgtaaaggcactgttctgggcactgcatcttccattatcctcacagcaaccttttcaggagacataatcttccctgctaggtagatggatcatggaagttcagggaacgaaaagctcaggtccaggtgtacacaaggcgagggctggatgaaaagctatgctgttgacacatggcgtcaggggctttggggagacgagtgccagccccccaccatgatgttgggaaggggcctgttagtgagtatctgagtatagagctggtgagtgcctctttccgagtcaggctgactccagactaatgcccccagtttagctctggtttctcacctgggggcacagccaccacagcacacagcccttgctgtcctcatacaagacctaggtcacctgggccatcttcagggactcttatgtgttcacttgcctggccctgattcctggttgaagtttcacgtacagcctgaattctgagcccaagtcaaccaataatgatgacaacccatgacatctctcacccctcctcccaaagcgacttctcaaaaccagccccttgaatactctctcagccgtgctgagtcctcagtctttcttttctcttccttcaaacagttcattatttgcacggagatttcgcttttctttgactttttttttcttcatatataacctgataaaagggctcccgttatttcagaatatattctgggtcctattctgtgctcaattacacaccat

SEQ ID NO: 29317 - DNA, 1940 bp, Bovine  19866880620553
  misc_feature (1)..(1): n is a, c, g, or t
nttttcactttcatgtattggagaaggaaatggcaacccactccagtgttcttgcctggagaatcccagggaccggcgagcctggtgggctgccatctatggggtctcgcagagtcggacacaactgaagcaacttagcagcagcagcagttatggggagaatatctaaataggctgagcaacactgctactgaggggctgtcatgctggcagcagcttggggtaaatggtcacaagggccactcctcctagtctggagtttcccacaaccaggatcccacacttgtaacttaaggtttcagacccatgggtctatcccttattaacctttgatatagataaatttagggactgcctttttatcacaatatcaggaaagactcttagctggacaaggttcctctcacagatgtctgaaacctcttgaagagaaagcaaagccaaccatcttcccaggtggcgctaatgataaagaacctgcctgccaatgcaagagacacaagagatatgggttcgatccctgggtcaggaagatcccctggaggagggtatggcaacccattccagtattcttacctggaaaatctgatggatagaggaacctggagggttatggtccatagggtcacaaagagttaaacacgacttaagtgacatagtatgtaccataagagaggtttacactctactcctcagacagcatcagactcattcacactagggtgtaaagacaatgataaccaatgagatcagagagtggtccctgtggggaatttcatcttaccctggtggctcagatggtaaagaatctgtgtgcaatgcgagagacctgggttgaatccctggatcgggaagatccactggagaagtgaatggctatccactctagtattctttcctggagaatcccatagacagaggagcctggtgggctacagtccattgggtagcaaagggtcagacatgactgaacagtttcccttttctgtggctgctcaggagattctgctgagtgcttaggtcagcaataagctcactttctttgaaacccagcccaccacctactcgcaggcccatatataaaggtgctcatcaaaacctcagctgtctatgtcaatgcaccaaccatgtgcatggtgggggcttgagcagctctcctgagttttctcagtgaatgtgctcggtcctgcactgatcctccctgaggaggatcctgagggatgccctggagtagggggctagcgaagactgaaggtgacttttccctgtaggaaacagcctctaccttaaggaaaggaggacagtttggtcaaaatgtcttctcagcactgagaattgtgtttcaaagtggaaacaggccacttggtgacaaggggcccaagctatgtctaccacaaagccttggagaacagactctgggagactggcacagttaacagtgctaggaattaaagaataaatcttgacaggcatctatgagaaccaagtaaatgccaggagacacaaagaaggagtcatgcagcccagggaaacgggattgcacgagggcaagggcgcaaagctatgccctggtcaagtcagctctgtaacccagggccacggcttcactggggcacagtttcctaattacaggtgtgattgattccaagcaagaaaaggcagtgttatccaagttgaaagttttctttcaggaggtattagcacagaacggatggattagtaatttaagaaatttgctttttcctacaagtgcatttgtatgccaactctcccatatccaaacctttcatacttcccctggagctcttgagagagtcctgagaggtgaagtcacctccgccagccatagcttcctggacaccctcctgggcagcagcccattcagcagctccggtgcagtgtctgtgtcagtccatgaaggggtggtggctcagccaagt

SEQ ID NO: 29318 - DNA, 699 bp, Bovine  19866880635154
  misc_feature (1)..(1): n is a, c, g, or t
nggaagaacaccagaggaggggccacagagatggagaccagagattcaggccttggctgcattcccaaggagcctgaggcatccaggtaaggaaaagtccagatggtcccaggcagcagaatagatacttaagacccctcctcaccttctgctggaggccctgggggactctgtgagtctccgggcacaagtctcccagtgagttcactggccccatcatggagaactgatctgatttccggaagatgcctgcctgccctttgtccccctgagcctctgggaaggctctggattcagctgaattaagaggcaggagatgatcaaggtgttgggtgcttgggcaggagtctccatggtaacagagccatctggctttcttgcctggcaccaggccttgtgacttcatgatggaatcttctctgccaggcacagaggtttcccagggggaagaggaggccaggaggaagggacctgctgaggaggctttgtcttttcacccagagtttgaagatgaagcttgatcttatcatgactcagggctgctgctgactctccaatggccgctggaggtagcatctggggggagatagtgtaaacagcattgtgcactggccacctttggctgagccccttggagagttagtggaggcagctctacctccttcagtccaggcggctggtggagggagccaggaccca

SEQ ID NO: 29319 - DNA, 3508 bp, Bovine  19866880636893
  misc_feature (1)..(1): n is a, c, g, or t
ngaggatggtagaagtgggggaaatcctggaactttctgtggacccagtaacccagtaaattcaagggacagatgtcactatagaacacaggggttctatagtagtcctctggaatattttaggaagtaatgattacagcaaagtttggccccatggctggagcttcctctcctctgttcaaatacttgtctgatcaacattttgtgttcctgaaatgtccaacaagacaaagaacaaaaacagcacttgagataaacatgaggttgccattaagccacttgtggtttctttgcactttctgggctccaactctgagctcagtgcagtggagggtgtgttcatagctaagtgacaagcattattgcacaggatgagataattttttgtggcaatgctcattccaaggaaagattcctcattaaagaacttgtcaaactcactctgaggcagccaaaggacagataaaacagtcaagatatttgagtcttttctttcaccatttagaaagaagtctttccaagtttggcagagatattagatttttgaggattacagagaagtcgcatcttctgtgtagagaaaccagtcctctctaaaggcccctggtccccaagaggagtggcccggtggggaactctgttaaggtgctggtgtctctccacccacgggtcgtgcctttatatctgtccagtaattctatagaaaagccagtcattctagcaattccatgtgctaagagctttactatacttccctcaaagaaattagacttctgatgcttttataaatgtattcataaaatgtcactgctaaacctcatcaatctgctaatgtccgtccatgtctagcaaatgttgagatttctgtttccaacttaatggtgcatttacctcctaatagttgctgtccaaatttaacaactatcagggaccaaaatttctgagcctgccagaataacctcatcatatctttcctattgaattcccaaggctgtccattatatttttaagtttctgagggtccctaaaagacagctgaatagggagatgatataggtgaagagtgtcaacaggaattgagcttactaacacggagactaaagagggtaaccaagtcatagacacgtacatatggtaataactacaggtctggaacacggcactggtttgtcagggtcaataaagagaatagtgatttttcatcgtttcaccactgaagggtcggtgagttcttgttcacatggatgctctcaggtaaatctcttcccagagagctctttatcctctaagcaaggataaagctcttttgccatgccaaagagcttgtatgactgattgcactgttttccatcctttgatttcccattctgatgcataatttaggttgtctgtctgttaaaatctgagagctgagaaaataaccatcatcctcaagggctcaaaatacctctcagcagcaggtagatgggagaagtccgcatcaagagtgctgaggaactgcacaagttctagttatacaagtacaagaggggaagctgtctacctctgttacctgttaacccttgtggtccagctgtccttacaaattagtacacagacttggaaagcgagagctgtaaacaactttagactcctacctgatgtttttgcactgtgcagtgtaacagttcataactcttgcatgtagaaatattaaaatgttagtcatttccctaaacctcctttagcctcatcccaacaaaatcatctcattagaaaggaacgagagactacagcttttgaaggcccagccttgacaaagctgcaatgttgtccagagacaagacagagagaggacagtgcctccacaggtctttgtatcctcctcatctgtagctaccagagagccgaaaatgaagtgaaaggcgcttagttgcgtctgactctttgcgaccccattgactaatacagtccatggaattctgcaggccagaatactggagtgacacacgattaaataaaaatcctaaggcaatgtttaaagcattgccacagaggggaaatctgtgccaggaaatagagcattttgtgctcttctgttccaatagctgctgccctcaaatccagacagagggtccatcacatgtcaccctgctgggagaggacttacgagtgccagacgctgaccacctcgtccttagccaagtctgagccctgcaaaattctctccccatctctccacccatttcctaccagggttttttttgtttctgtctccactagaaagccagccactttgaagggaagacccaactcttacagcttgttttagctccatcacctgcagtgtccatcatcaacttgtccatagatagttccccaaagggctcataacataaatacataaggacgctatagaggtctccctttgtgaatccttgcacacaagcttttcaagagtcagttgattttttttttcccttggtctttttttttagtcagtcgattttaagttcccccttaggagaactgcctgaggctctccagtgccacgtactatagtatttcctataggtcagcagctatgctgcactgcacatgttaaataattcattcccaacatccactctatgcaataagtactattttatccccatcttacaggcgccttcactgagacacaaagggattaagaaacttgccaaaaaccacagagctgtgatttaaatccagggtctctgctgcagagactgtccatgtccacacacacacaccccagcattcccaatcacccagtcacattggcagcattacagccttcagtgctggaggtaaaggtcttagctgctgactactgaccttggaatgaatctgattcagagctttatagttagcagggcttctctagaagggaagagtcaaaatcaacatgtgattttcactactcattcctcttctttccgtagaagccctacctttataacccactattactcagcacctctttcagcccccaggacaaagagtagaatcacatggtaatgtgaaaacacgatgatcagagacaccatgtgctgagtgaacatatactccccacttcaaagaaagaagattcctgagccctgggttagagatttttaaaaagaatttttgagggagcattctgagtaatctgccacgaatttagtcaaggtcattcaaaaatgtgagacccactccagccttgtatgtttcttttggaaaacgcttgatccaaagcctgcctcagctgattcagctttgcacagcttggacactaagcccttgcttatggccactggcagcaggcagcgagtgagggtggcatttgatgagaaagactgggggttctgagtgaggagagatgctggcaacagtcgctgcatgctctcctgcagtcatggcctgcctcgtgggcttgtggctgcgaggtccccattaactgcttccacttgtgggctaagagcccagtgccactaaacacagaggggtgtcgacaagtaaaagcagg

SEQ ID NO: 29320 - DNA, 2475 bp, Bovine  19866880638926
  misc_feature (1)..(1): n is a, c, g, or t
ncagattctttactgtctgagccccagcaaagcccttgttgaacaaagtgagagtcttactaagagaatttcaagccctatgaagtcagaatagatagccagatcccagcagagagcatggtcagcagtcaaatcctaggagcagttcccaactttcctgcttcctttaccttcagaaccaaaggtctgcttatgtttcacagtggcttcagtatcacaagctggcattcagggaggtgcaagaacagaggcatgtgtgcataggccactgggtagtgagctgggcttgtctgcccatgacagacaggcacctgctggcagctcactgtgtctaagtcatttctgttagatactgcagacggccagaggggaggaggagaaaggtgtgcagacgagcttcatgctctcagagcatgaaaccgaagtgtcctgagacaagggtaaggacgtggaagtgaaatcgcctgaaaatgcattttctttcaaaaagtcttaaagttctcaattccaactgtttgaaattgtgttcctattgggaacatatctttgatgttatcatggaaatcagtagacacataggatttgctctctggagttttgttttgcagccccctttgttggaatgcacatattccataaggcaaagcttttctgctgagagatcatttggaaaccttgggatccagtgctctacttagtgttggaaaaagagagataaaaatccttggctcactagtgacgtacagctggatgagaatgccaggggaaagggtgggcttccctatactccaatgggcaactgtggtaggacaggtacccaaaaaatagaaggagctgggggcaacgaggggacccagggcagggaagtgaagggctcgctaacacggcccaggatgggctctggtcttccctttgggtgaacttggcctcccccacttagttttgattggagattcagtgtaggccctgaccctcaaaagggatcccagccgatcttttctacaggctgtcgtggagtcaacttcatagcatagctgggttgagacatttctaatcgaaaaatacctctcttaagggtatgccatttctaaagaatcattttaccaaaaggaacttgagcagtgctgggcaaaattagaagcttctgttttctatgataggcatggaaactttccatactctatgtacggaaactcatatgcacgccaggggcagaaggcattgagtcagctccagccagctcagcggggctgcaggaaagccagctcctccctccagagagccaggaggcgagccctggggctgaggaaggactccctgagactctgcccacacataccacaccccaggaccactgtaccaccctgctgctgaacagctcttgacaaaccaatgatctgccctctcgtttaatccacacacctatggaataacacagacactactaccaagaaactgaggctcagtgagatggacttgcccaagaccacagaaccaaaaagagatttggacccagatctgcatggcttcaggcctgtcttctacctcttgacctaaaattccccaactcccacaccagggcctgtgctccaaggtagaagctaattgtctttaaaaagttgggtcactttcctatgacactaaatactaaagaatggcatattaaattcagatttggattgtccttaggagcttgatgattctacatatctccactctcaataagcagcctgtgattgtccctgggtaaagtatgtttctattccaaactgtgttcattcatttgacaaatgttatggagcagctactccatgccaagttctgtgtttggccctgaggttataaggattaataatataatcttcccatccttgaggaactcatagacaagtatggaatttcaacaaagggtgggagcatcagttatttacaccatgtgatcaaagggtactcgggcagcccagtgatgaggaagcactgaaatctgcctggcagggtcagggaaggcttcgtggagagggtgaccctaaacagaggatcatggaggcctgtttaaggtaaaggagctgagcattttttttaagtggagaaagcagctgcctcgttcccctgatttggatttgttcagatgtttcaatgcctcataataggtgagaattttcttaacaatagcaaaagccgcttccagaggcgaggtctggggaagggacaacaaatagcatgtcaggccacaaaaggtggcaagaagaagcccctgaagcagcccaagaaacaggccaacgggatggatgagataaggcacttatgcagaaacaggaagagcagcagaagaaactctagaagctaaaaacaaagaagggagagccccctggccaaggagcaattaagaaatctgcccaaaggtaagcttgcagactgattgggaagacagatattaatcagtcacaggaatgagggcatatgtgcaaccgagca

SEQ ID NO: 29321 - DNA, 1007 bp, Bovine  19866880651996
  misc_feature (1)..(1): n is a, c, g, or t
ncctatgccttagttgaagatttcttccttcagtcacttgttcaagaatgcatttcatttgtgtgaggtagagaatctggccccaagcatggacgacaaggttaagattggggagcagaatatagttagactgaagtagcaatgatgcaatgatgtgactgagcttgcaaaaccctgatgacatggcaactctcctgtgctatttctcatcttccccaccccccctcccttcgttagaatactgatgactggctcttatatcagcatttccaataaaggaaaaagggggaaatacagacctgggcttcatggaaagtattttcactctcacaaccagaaccttaaaaaaaattatcgttttaagatctttagcttttcctacagcatcgtggtaccaaactttttgaaaagcatcatttctgaggaatgatacttcctgggacaaggtagcatagtcttcgccaagtgactcagtttgagatatatgtatacatacacattttttttttcaatgtcaagtgacccaaacttacagagaaaaagtgggcattggtatcagtttgatgtcagggttttcccatgtttgtggctttaaatacaacgtgatctgaaggcatttgaagtcatttgaggactaagctccagctctgtgtcaagatgctcctggctgtggtccttgcctctgccctgttcctctgctcttcagccagccaggggtgtttcaccttgacagggatcaggaatgctgtgtacctcatcgacaacctgcaggtaagatgcagaggcgaggcgccagtgggaaaggcagcgattgaaaatttaagtgaaatatacgaggatgaaaaacacaccactcttcacgagttcttatttctctactttctagaaagacacgtcttcaaaatgcagctgcagcaccaatgtaagtagatgctcttaagaacttttcagactgattttaatattcacatctgggatcttcacatcgaaatttctcttttgcaggc

SEQ ID NO: 29322 - DNA, 1858 bp, Bovine  19866880700929
  misc_feature (1)..(1): n is a, c, g, or t
natatatatatatatatatatatatatatatatatatatatggtgtttgctgatacagtgctgccttttcctgtaggtggccggggtgttagagctgggggctaagactaaggcttcatgcaggatccccttcttcctctatccacttgtctttttccttgttcagtctacactcttgagcgcagagccaagtattacaggcatgctcagtcatgtctgactctgtgcaaccccaaggatcatagctcaccaggctcttctgtccacgggatttcccaggcaaggatactggagtgggttgctatttcctactccaggggatcttcccgactccaggatcgaacctgcatctcttgcgtctcctacattgccaggcagattctttaccactgtgccacctgggaagcctggtgccgagtatataccactctgtttgacccctctctgtcttggtacatgctgttcctactgtatagaatagtgtttttttggagttttatggaccaaagcttccccctaaaatccatatgttgaagccctaagcaccagtatcttagaatgtggttgtatttggaaagtctttaaagaggtaattaaggttaaatgaggctttaagggtggcgtcccagtccatcatgactggtgtgatcataagccgaagagacacatggaggaaaggccctgaaagggcgcagcaggaaggcagtcatctgaaagccaaagagagaggcctcagaagaaatcaagcccatagcttgaccctgaccttctagcctccagggctatgagggaataactttgtgttatttaagccacccagtctgtgatattttgttgtgggagccctagccaactgatacatgacaatcaattatttttctatacacgaataattgtttcttatatgagatttaagtaccgaggtataccaagcaaatgtgaaagtcccctttcaaaactcctttcttgtttcacttgctgcctcagagggtaccatttcctacctttgctttctgcataggcacatttgtattattatgtaaatggcacttgcccaaggatatttttctacagcttgcattgttttcatttcacaatatcatagagatttgctctgtcagcacaaaaaaagtcttattgtttataaacagcgttttaacgtctgtgctatctccacttatttaaacatgatgatgggctatttccagcgttttcttttaatgaatgtctatgtaaaatcatatttctgcatggaattgttgtatcaaaagcatcagtgcattttattttgttttaatgttgagtttattcatttaacttctaaataggtatacagtgatatgattttaagcaggaaagcgtttaaagaaaaagcgtttacagccatcctgtcctccaaccccccacctctcaacagtacaccccttcttgtgtaccctttcaggttatttttctttttcaaatgattttacaatcaaaaaggaatacgttttcattcttcttcctctctacgtaaagacagttcaatatatacattgttctgaagcttgattttttctgcttatcattataattggaggtctttctacatcagaatatagagaccgtcctcatcctttttagaaactgcacaggttcccatggttcagacgcatcataatttatttaactagattcctattaacgctcagtttgtttttcatttcttgctgttccaaacaaggctgcaatcaatagctcatggttcatgcattttagattttgataaattgcctcccaatacactctcgatgcctttgactgtctagcagaatcagtctttgaatggcctctgcaagcttcctccccgcacactcac

SEQ ID NO: 29323 - DNA, 1518 bp, Bovine  19866880748047
  misc_feature (1)..(1): n is a, c, g, or t
ntcatgcttccctcctgggtcctactgggtggtacctgtctgagagtctgtcttctgcatgcacctggacctccttgagggcagagcttgtcttcatgtgcttgatcactgcagagcctatccagggctgggtgcagaggaggccagtttcctttgagtcctgcctgctccttgggaagaggtccaggagccccatgtggaaatacacatcaatgagctggcacttggctctagacacatgccggggtagtgtcctgagcggggaagtctggcaagcttctgttctgtgtgtggaaacaactgttggctcccatgggctcagagtacatgcatacacgggggtggcccaggagccccacagcctagggatcctactaccaccaaagccttcactccccagaagtttccaggatccatctatttgtcccagactgaaatgcaggtcacgtggggtctgtcttccactccaaagtgaggtttctgtctttcactggttttgaaattccaatttgtattaagctggtaaaggagaattaaaagcagacaatttaaatttgcaacacaaagccacagaaattgccagagggccttccctttgttttggcaaaatcaggccacattgcactctgtatgtgtggtgatggcagcttcccgaggtggcaattgaggctcccagccccaaagctgggccaggctatttttcttggcaccagacacctcccgtgatttagcattcttcccaggaaattcgggtccttcttcagctcctgatgactattccagatgcgggaggtagcttgaggtgtaagcagcagagggagcaagttgacattgagcacaggcctcccccagacgccctctaccggtggcactctgcatcctagagagtagttttccctgtgggtattatccaccagtgtgaagaatcagtcttctaggaagagctctaaattaggagcaaatcaaaagtttggaagtgctttgaacctctgggttttgtgtgtctcctgcatcaggggttcagaactctgctcatgggctctgagtctggggtccaaatccgcaaaacacagtgctcggtggtggcagtctggccgcaggtttatttagaaacccaaggtagcaaaaacgtaacagtgacaacaacccttactcctaaaatctgcgacatcgggaacactgggacagtgcagagagcaggagcacaggacccactcacaggcagaaaacagccggtggttcacggatccgcccactaacacctccctggagagttatcttgttagaaaacaatccacactgctgagagtgcagcgtgttatttgtgttattttaaatgaagaagtatttctgttaaacaatataaaggatgggaacgtgaaattaatgaaaacctacaaggtgaatttgaatgctttttgttttgcattggtagccaaggtaaagtaacttattttattccaccaaatatggtcaaatacgatggaattgtcaccatcaaccattacatcttgtttt

SEQ ID NO: 29324 - DNA, 1740 bp, Bovine  19866880763034
  misc_feature (1)..(1): n is a, c, g, or t
nccctatgtgcatatcaaagctctttgctatgcgttttgtcactcggtcctcatgtcatgttgtaagggacacatttagaggacaaaatgtgccccaaacttttagtagtttggtccatgtcccatggtggtgtctgagctgactgatggtggttcagaaagacagccctgactccctgttctctgagcagaagctcacagagtcgagatctgggcattcctcacacatgtgtgttatcatggacagatgtgttatcatggacagatacactgtatggggtgtttcctggaatgcacccaaaatggggtccagcatgatcaagacctggaccctgccaactcatcttccacacagaaaccagggtgactgttttcttccaaaaaactaatctgaccatgtcactctcctgcttatttatctctttaaccatcacaaccgtcctatgagatggatgttaggctttgacatgcaggtgagaaagataagcctgaagacaccacctttactaacttgcctccagcactgtgctgttgttcagtcgctaagtcacatccaactctttgtgaccccatggactgcagcacagcaggcttccctgtccttcagtatctcccagagtttgcttaaattcatgtccattgagttgatgatgccatccaaacactcatcctctgttgcccccttctcctcctgtcctcagtctttcacagcatcagggtcttttccaataagtcggctcctctcatcctgtggccaaagtattggagctttaggctcagtccttccaatgaatttcagggttgatttcctttaggatttacttgtttgatctccttgctgtccaagagactgtcaagagtcttctccaacaccacaattcaaaagcatcaattctttggcactcagccttctttatggtccaactctcacatccatacatgactactggacaaaccatagctttgactagacagacttttgttagccaagtgatgtctctgctttttaatatgctgtctaggtccatcatagcttttcttccaaggagcaattatgttttaatttcatggctgcagtcactgtctgcagtgattttggagcccaagaaaataaaatctgtcactgtttccattgtttccccatctatttgccatgaagtgatgggaccagttgccatgatcttagtgagaaatcagcttttgttgtgttaagtcatccagtttgtgactttggtttgcagctctaggaaactaacagaggatcttattcttagagtggggagaatctgggtcatgcctacaggtgctgtcttctctcctggagattttcagtgcccatctacatatgaaagattccaagaagtctcaaagtcaggaaacctgttcaacatttttaaatctagtatttcccaaacaaacttgatcttgggatgcctttctcacaaaacaccttttagcttggtgtgaagctggggctccaagcagcatacttagagaaatactattaaatgtcaaacaggtctcctttcaggctacatgcaggaaaaaatgccttcttgatcagacctgcctgtgcttttccatcactcctgacagcccttcaccactctcatcagcagtgggaaaaaaaaaccctcaagaaatttaattaccatagaaatggctatgaaaatgccattcacagtgagcaatgaacaagatggtaatattttatatcagacagggacccacaggcaaaaa

SEQ ID NO: 29325 - DNA, 1239 bp, Bovine  19866880791830
  misc_feature (1)..(1): n is a, c, g, or t
ntgtaaaacagctctgaactcatgaactgctgatggcagcctgatgaatggaaggaaatacaataaacagattccttgtcacgttgttggcttcatagcaaatatctgtgttctccctgggattacgtgaacatttgcttttctttgatttctggttgttctttttaatatttcttttgtgagagaagacgcttcaaacagttctgtaggagcccctgactctttcctttgcaagagttgtgtttaaagtttggcgcagcctccacgcatcacctgttagttgttaggggtctaattctgcaaaccatgacttcatctccctgaaggaagatagacacaatgcttcagtacaacagataggactatatgcaagacgcttggagaaggaaaaaaaagacactaagcctttggtctctgagtgaacttggaaagtagacctgtcagaggcattcacgttcagacagctgggctgtagccgagaaggctgccaaataatgctgttactcaaggctgtggggatctcgtcaagtggccctaaaatggtcgcattcctcgtggccagggtatggtgggcccaggggtgcctctgccctgcctgctgctctgaggggagagtaaggttgcatcactaggcatgtgatggagccagtaccactggccagggactggccaggagttggagccagagatactcaggtgttttaccaattagatcttaaaaagatcttagaacaggagactggcacacgagttggctagtgtaactcatcattcgacctgacccctttgcagggtctgtcactgcggaacttcaccaagctgagttgtctcagaggtgaccccccaggctctgagccccaaacctgtcccagcgttggtcattggtgacaaagttagagggggtgcagaccctggtcagggggtctgtttcttttcctgctaaccactctttgctgatttcttacagattccatttgtttcggttacagtctctgcactgtggctcctgaaactccctctgaggcaggatccaagcacagagcactgcaaaccatggagaaaagaattttcgtctgtaaatgtggtgcttgtctagttctctttctcagaatcccttttctcaaaatagacagaggcaaaaaaatttagagacacacaaaaccttctgaaatacaagatgaatcaagtgcagcaaaccctccctggtaggaaggcatgggattccattcaagtctaggt

SEQ ID NO: 29326 - DNA, 890 bp, Bovine  19866880814128
  misc_feature (1)..(1): n is a, c, g, or t
ntgaacccaagggcttcctgaattaaggtaattgatagcctgtaattttcctagtgctcagctaaaagcagtccaccaagacattaggaattttaattatcagggggagggggcaggcgcatagaggaaagaaacaaacattttttccagctgtaatggtttttcctgtaacatactttaaatacctatttgaacaggcacagatgaaagtacatttcagtgttaaggaaattttacttcactgaattaccacaaaaattttcaaagcataagtttaggaagtaaggctttgtgaagataaaaagcggaaacaacaaggtgtgtgtggtggtgggagtcttgtaaaaagattttcaatggtttgggtcatttccttttgcggagactccaatttgatacaaacatgcagatcttagaatctgtttcattcaacaaagccacaacttctctaaacagctgtgggagaggcaggaggaatctgagaagacaggccatccatgtttgatgctcaggagccaggagggtgccaagaggctggcggtgttaacctttagggaacatggtcaatgagctggaattttctcactaacctaccagttagtgattcttttaccagattaacctcctaagtaagcaggtgacgtgtaacatggcataacacagagtgggctagttctgcatcaagtctttcctatgtctgagtttctataaactctttgatgttaatcagaaaacattcaagagtctttttccttcattaagtgttagttgctcagtcttgagtctttgtgaccccataggctgtagaatgccaggctcctctatccatgggatttcccaagtaagaatacggagtgggtagccattctcacctccaggagatcttccca

SEQ ID NO: 29327 - DNA, 1526 bp, Bovine  19866880924358
  misc_feature (1)..(1): n is a, c, g, or t
ntgtgaggggtgaccttggagggtagggaggtgtacacatagcctgtgtgtgctcagttgtgtccgactctttgcgaccccaaggattggggcccaccaggctcctctgtccatgaaattttccaggcaagaatattggaatgggttgccacttccttctccagggaatagcctggggctaaggatttcagaatacggacttagatagacttgggtgcaactctgactttaccacagactgactatgtgacctcggatgaggcatttattctccctgagactcaatgtccttatctatgaaattcaaaggatacagtcacctaccttaaaagttcttgtgcaggtgacatgagcctaatctctgtaaatacgcttggcattatgcctggaatctacatgctagtgttagttgggagaactgcccttccatgctaatcctccaacaaggctgctgtaactcttcccccatgacaaagggtcagaaacctatagcctggaagacagacataggaaaatatagggtttgttccacaggtgaagtccagaatagtcccctttattttctcttaccactccctctgaaccctctctcccctggtactgcaacaactcatttctcatgattgccagagtcattttatccataataatctccttgcaatttaatctgagatctgataataaccactgatgtaattataattaataagaatgcttagaacatgtagagtgttttttctcctatgtttcccagaaagcagtgagaaaaaacaggcttccaggtcttgcaatcttgagcttaagtaatggctccactacccactagctgtgtgaccttgtacaagcgacttaacctccttaaaaatgagaagatgaggcagacttattgtcaattcaaccctccttccttggagagcctgggaagttccccaggctcccttgcagctaaagttatggatgggaagtaagtcccactagttggtggttctcatgggaggtttggagctgaaggaaggaactgattcctctgccaaggcatgcttggctgttttgagtctagaggcagtcaagaaagagggtcatcagcttcaggctgggagaagtcatgtgacagtagccatgttggcagctatagcagcttcctgatgtcccaccaatgtagtgggtccttatagatacagcttttatcacccctttgcatatgcagctcttaccataatcttattggcacttgatttctgatacaaaaatccccctttgctcaaaatacctagaacttatttcttgcactgaacctgacataggatgatgatactgctaattttttaggattacaaggattacgcaagctgttaaatataaaatacctgtcacagaaggagtactcagtcaacagtagtcactgatacttattataataagactgtgtaggtgttaaaatttgggggaaaccagttctgtaaattgcatcttgccgcccactgatgttagcaggatttaacacacacacaccccaccccccgcac

SEQ ID NO: 29328 - DNA, 922 bp, Bovine  19866880941092
  misc_feature (1)..(1): n is a, c, g, or t
naaacataactaaaagcatggatctgggtaagtccccaactctgttatttaccaacccatgtgattctgtctgagcaaattaatataagcctcagcttcctccccctgaaaagcagggagaaatgcattacgtctcataaggttgtagagaggattaaagtaactcaaggtgccagcccatagtaagtgctcaataaatgtcgcccttgttgttaaatcatctaatgcattttcctgaacaaatttcattatgttgcttaagctggagcacagttccaacgaaaagccaaatggcctgtgacagttttcagatgacaccccaggacatgggagatctagagaagcgggatatggcagggactgaagccgcagcagcatactgggtcctcactagctgatgtaaacatagcaaaggaacgagcattctttcccaacagaaagaaaggatgactcctattagctggagacaaaactaagtgcagacaaaattcaggtatagatatagccaagtatatagggttatcttgtacatatattttacataagaattcaaagtattttaagtatacattttaaaatagtaataagggtagttctgaattttatttaactttggttgactctttaaccctcttctcatccctggatgctaggtatgtgtatgtggaagatttggcatcataactgaaacataccttcaaatctaatgaaatatttatttaatatgtaaatatccctgtctcacgagtcactgtctgatgggaaacatttcttaaccacaacatagagatggatcccagaaataggaatgacccataaaatcactgagcaaaatgaaaggccatctttagggtttgggaaagggaaggaggggtaggaaaaaactgtatctcgagcactaggcagaagagccagtgcacat

SEQ ID NO: 29329 - DNA, 1806 bp, Bovine  19866880959584
  misc_feature (1)..(1): n is a, c, g, or t
natgacactgttccacctccaatggagcaacaactgaattcaggaaagatatccactatcggccctacacactctacactcaatgtaactatgtcaactggcacttggaaattctaaatacaacacctagattttatattaatgccatctgctgtgacacaattattaaaattacaaaacagatctaaagaatgaaaccatgcattagatatctcatcaaaaatatctaatgtgtatctaagtgctagtcaacaaaaacccgctttaagtaattatttgaatgcaagtaaggttgtgatctatttttaggaaaagaattatgtttgactgaatgcatgctcagtcgcttcgtcgtgtctgattctgcagctccagggactgtagccctccaggctcttctgtccatggaatttttcaggcaagaatactggagtgggttgccatttctttttccagggaatcttcccaacccagggatcaaacttgcatctcttgcatctcctgcactggcagggaagttctttaccactagcaccacctgggaagccctgtgtgtgtctagttcaataatatttaagaattgtagtcaatctcacaaaaaaaatcatctttaccttggacatattcagaaaacttggcttggccgttgaaatcaagcccaaagtctggatagaacaatttaccagctgcgaaagtataccacaggcagcttctgctgactcagtactactatcaacctacagagacaattaaaaatcttaatttcatgaatgtaacattagaaggttactggcaatataattatttaacagaattcaatactcaactacaaaactgtacttatcccttcaaactataaaataaatgagtattttttctctaatatacactatatttgacaaaaaaggaaaagcagagatgatgacaaatgaactttctaagcactttatactttcgaatcttgtaagattacctgaattttattaaaattattaatggcatctacatgaaggaagctgaagtttattcaattgtagctcaagtactacatctaaatctacgcaagtaacaacaaagaaacaggaaatagattgggataagaattctgaaatattcattgactgtttcagtataatgatctaacacaaatactaacaaaacttaagtcatcgcttttatgtactgcttatttttcttaccttaaagctgacatactggagatgggcagcatgctttttaatgatctgctgaatgagatcaggatgagtggagttaaaatatgaagtagctgactggttcagctcaaattcaaactttctccaaaggtcaggtatgtggaaaacttcattccatctcctacagacagaagatgcccgggctcgatctattaaaggaagatactgaaaaatgcgtaacactacgtggtgaggcaaattcccccagtccagaagagcagcacgcatgtgagtctggctgagagaagaatggcacccaagttttggctgtttcactgcaggtgaagactggagaactttattcatgaaagataaacggttcctcttcattctgtaaacagtaaacaatggtaagtgatcattttccccacattcccatcctatactttgctttaattgtatggaataacaacatcagaaaatgagaaacagtttaagacaattttcacaggaatctttcactttcatgcattgataggcactacttagcactagacatacagagataaacaggagggaaaagtcaaagcgttagtcgctcagtcatgtttgacttgcggcgacaccatgg

SEQ ID NO: 29330 - DNA, 1390 bp, Bovine  19866881041856
  misc_feature (1)..(1): n is a, c, g, or t
nttactgatcattttccatcctaaaagaatgtcttactctcaaatgttatgaaaagtataaaatagctataccctcttttcatactgttaggtataacttactgaactacctagtaatcttattgtggatttcacctcagaaacccaggccaattctattctcatagtttacttatataacaagagaatggaaaaatgatttatattctgttgtatatatttgacatttagatcgatgttttctttaaattttctctaaaggaaaaaagttcacttcagtagatcaataacatgcctactagtttatactccgtaacttaagccaggtaattatgtagagatacaatagtgagatgcacctcttaaattctgctgttgtttttttttttttccagtcagtatatttttgttgctttaatacattgactgattgattgattgccttcgctcagttgtgtccgactctttgtatctacctaccaggctcctgtgtccatgggattttccaggcaatagtactggagtggattgccatttccttctccaggggatctccccaacccagggatcgaaccgggtctcccgcattgtagatagacgatttaccgtctgagccaccagggaaatcttactttaatacataactgagattaattttgattctattcttctttttctcatttaccaaactggatgtagttttattattcccaggctctgtcttttcagttggcgtatatttatatgctgtaatgctataaaacaagatcattttgggtgtgatgatgctttcataaatttgactataaaccattctggagattaaataaaaacttagaactgtaattttatgaaatggtttctttcagaggtacttttctcacttggtaaaattttagtttttttaatcttactggctaatttttatttcccatccagtcctgtactgagcatcgtcaagaattacaggatctgctggattgaatgaagttttcatgtaaaacccaggggtgtggagttaacagcttttaggaaatacaataggcttatacttttccatgaaactcttaccagttaatagcttcagtactgtcattcatgaaacacaactctttagagaaaacacagaaaaagccaatcacataaaatcttgctaactctaaaggttgctacatgaataaaaacaatttttaattaactcagttgaaagcatcaataaaaacaatagtttccatcagttcaggcccactgatgttgattattgattacatgcatatgccagatcaccctaggtgatttttctacaaatgtgtttcaaagattgtgccatgaaccggctaagtgtacaatgatgtaaatagctaagttctatcactaagcaaataatcct

SEQ ID NO: 29331 - DNA, 668 bp, Bovine  19866881043274
  misc_feature (1)..(1): n is a, c, g, or t
nctatccatttgcccttttaatattcaaattcattaacatattaacattttttactgacattgaaaagtaaggtctagttttactaagtgctttaaaaataaggactggtttcacatttaggttacatggctaacctggaatattttctataaattaaatgagctaaatttgatgctccaaggtgtttatataaatgataagacagaaagcattttattaagaaacatggtattagcaaagatctattaaaattatcgctattctggttctcctaacaatttgagtgtatcaaatttgacaagtaaaagagaaacacgtataatcaacaattacatagtaagtcttagtaaagccttttttgatatactttccaggaaacaagaaaggcaaaggctggatgacaaatcctttcacaagtcagatgtttctaattctgtgctttcaacaaaactgaagaaataccaaactgagttagcagctgattcatcattaaagaaaggactgatggagcttaattaatagtagagtaccagtgcaggtttctcagttgtgatgaatgtacagggttatggaagatgttaacaacagtgagactaggtgagggatattcagaaattctctatacgcgctttgtaacttctataaatctaaaacaattctaaaataa

SEQ ID NO: 29332 - DNA, 1230 bp, Bovine  19866881062654
  misc_feature (1)..(1): n is a, c, g, or t
ncttgttgtcacctccatgacctttggcggtgctgatgctgccatcaggttagctgggctctgaattgctgaggcccctctacctgctcagcagtcaccccgtgccccaggcaggcaccaaccgcaccaggcccccaagccaggcaaggctttggggcgaggagtaaactaagctggctcctccacctttaggaggagacttcgaagttaataaactctgttcacattgcaggttgtggtccctcttaccttgaaagtgaactcacaggcggattaaagtgaaataaaatctaccatttgagttccattctcagctgattggaaacatgcgttacctccctgtgaccgggccgtgagaagggaagttattatctttctttagagtttgtaaactctttatggctgaggcagctttaatcctgcagcgggggggaaaaagtgatccaggaataaattgctctcatttacctttgttttccaatcatacgctccagtgggaacaaaacatcctaagtgaatggatggggggagccaggtgatcctcgacagaagagtttaattattttcttctttacgcacgtgagttgaaagggctttatattgccatttggcaaggggggcttgagccacaaaaatgtgtgttcctgcagcaatgtcagcacaatcgagctgttcctatctctgcctccatttccccacgatgccagcttgtttaaggggctcagtgccagtcactggggaacaagaaagaagagatccgagaaagggcacttatgagtcaaaatcaaaccacagtccggaagggagggagaaaccgtgggatctggagttgtggaggggctctccttccccctctgatggtcctctgatcccctcggtgttacctgacacagagcttacatagagcaggtactgggcaacgccgtcaggatgccccggctctgagccaagcgctccaactgctgcaaggaaccccagctgggctgtctgcctcactttcctttaaagatgtgggggcagggggtagcgggtggggaatcttcagagtaaaagcagagacaggggcctttggagagaaagctcagccaggcagccagccacagggtttccgtaattgcttctctgagggatgaggatgctgtgatattctttcattcgttggcctcttgctcacatgggctgggaagatggacccttatgttcaccttgcttgtgggggaggtggggaga

SEQ ID NO: 29333 - DNA, 2016 bp, Bovine  19866881064760
  misc_feature (1)..(1): n is a, c, g, or t
ncgatcttttgatggttggtgccaaacagattaggcttccccagaactctgtcagaacacgcaggctgcagggcagtcatggtgaacgccacctccctccatgctgttcatgatgctagaggcaccagaaagctctactgtaaccacagggggccacaacccctggcgtctcacttctgtttatgcagctaagatttgcaaacaacagcaactagcatttactgagtacttactatgtgccaggctccaaatttagcctcttctgtgtattacttcattcacatgaacaatcccataaggtagtcctattgttatattatggatgaggcaattgagggttccaaaggtgaagccaactgcccaggtaggtggcagagccaaccttcgaatcagagagtctgagcctgtgttcttaatatgctgtgctgcctcattccgtgcatatctctaggcactctcagtcttttggagggtatttaccttgaaatgctagagataaataacccacctgccaatgcaggagacataagagatatgggtttgatccctgggtcagttagaccccttggaggagggcatggtaacccactccagtattcttgcctggagaattgctaggacagagaagcctggtgggcttgtccacagggttgcatagagtcggacatgactgaagcaacttagcatgcacgcactttgaaacacagagcaagaaccctgtataagttcaccaatggcttttctttcccagagtcagaggctggtggcttctacactgaatcattgtatttgtatcatttagtgaggattaagaagtgcccgcacacagtttcatgtttcttgcgatcccaagtcggccctaaaaaacatatccaagtcttgttaggcggcttaaaagtgtaaaacaaaatcggccagcttactgaaaatgccactcccaagcacacagttctctgacatgtgtacacatgcatcttcgtggctctgcacacggtgccaccttccaaaaggctggcccacgcccaggggcacctgcaacccacacacaccaagggtggcctcctgggtggctggtgggcatcggtggttacagatactcacgttgatttgccacagatcttcctctggtaccactgcttgcagttggtgaagtacttcttgttggtcccaatgagcttctgcacagcgcacacgttggggctgaaaacaaaagctgcagtgttagcaaacggtcggcatgtcacctgcctcctcgtccttcccaccacgtgggccctcctgggtcaccagaaccttctagatacagagaagatacagtcatttcggtcagcttgggggtacattctggtcctcgtgatccagacttccatcatccctcgcaaaaatatccccccaaattcaaaaactgtcaaagtatatatcatacagtgacatcatttcatttaaacattctttgacactgacatttagtaagtataaataaaaacatcttaaaatttttaggctacatgttttatagatggaaaacaccaccttaaaaagaaagtggtgtttgctaagaacagcagcagctttgagggaggcccccagactttctttgtacccccactccgcacatgcacaggattgaacctggcctcccagcaggcatcgctggtcctgtggtccaggccccagcactctgcaggcagctccacacacagacatcctctgcatccctaggcagctgcctggctcccagacacagcctatctggtgtgcccagcctggaaactagagggcatggccaagctagctgctgtcaggacctcagaaggagacagtcactcactgaactaagtcgtttattactggggccccagtttgcgtcccactccccccagaaagccctccttcggtgccccaggtgatactcttctgcccaccgctgagctgtgtgtgatacagccattgtttgatgctgggtatagaacacaacccaaaactaatcagggtgtgtgtgacctttcagctatc

SEQ ID NO: 29334 - DNA, 1460 bp, Bovine  19866881090233
  misc_feature (1)..(1): n is a, c, g, or t
naaagtctggggtaagccagagacttagggctgcaagcttgggtttcctgatatgttttcaactcatcagggccaagtaatgatgcagctgcctgagcccacgtctcagactcaccagctgtgctcttctagcagagcacaccaaggcctatgtcttctgaagctcttccacctctttttacacctaactctgttatctgacccagatttaatgactccacaactaagagcagcaggtatatattggttaacttttctcctttattttggttcacctggtggccttgtgaaaggagcaaattttccccaagcataatttgcttcaaaaaattgagacaaataggaaatgtcaccaaaataaaagaaaaaggaaatcactgaaatgatttgatctcatctgacctttataatgtttacctgctaaaaagatgctttcaagaccagaagaaaaataggaaaaatgcatcaattactaacctcgcttttcctccctatggcttaaatcaagggggactgagttcagggtaaccttccacaactctgaagggccttatcagggattttccttatggtctgcaataagtacagtaactctgacaggtgcattttctgccagaagacaactatttgagtgaggggacaaagaaaacattaaatttctcaaagcagctcctgtggggaatcccaggaccagcaaggttgcacctgcgtggcagatccctgcagtcaggtacctgcctcgatgagaagatggagagatgtccccatgtcctcatccaggtagtcaccgggagatgttacttagagcccagtgattaaggagtagggaaacttggctgtcaatccttttaacagctgtgtctgtctccatcttccccacctttgtctggcatctctgggaccctgctgggacatgcagacctggtatcccttgccctctcaacccttcctctccccactctgcagtcattctcccacttccctcccctctctccactaccccagccagggcacagtgacaggaaaccatgcagtgactatgtaagaatgtctcctgtctacagcaaattatcccagcttgttggctgggaaatgggctccaaaatgccaactcagtcagataaaatgctgaaaaacttaaagtaggtttatgacatcacattcataagtcaacatgaaacatggttaaattcctttttttttttccccactgaatttatatgaggtattttatttgtccttatatttagtctctgcatcctgaatttagtacatctacctatggctaaaaattatctacagtctgtactttgtaaataacaaggttaaacttcatagagaaatgtcatacgtaggacgtttgagggcctcatggttttcaggtaaacctctctgtccacttctgaagttattctagtgccatctgacaatctgataagacaggtgactccaaacaagtt

SEQ ID NO: 29335 - DNA, 1009 bp, Bovine  19866881265806
  misc_feature (1)..(1): n is a, c, g, or t
nggttagactgtgcccatgcaagcatgctaaagttcataaattaaaaatgaaatctcattacaatattaataagattttaaaatattaggtatttttgctggtagttcacgatagaataaatgtcaaggaaaactctgagtcagtcaatgtagcacgatggcatctgtgatttgagagaatttacctattggagatttttgaagggagcaaggttgacattttatgcaggtcatttatcgtcttcctgcctatggattgcagtagactcttgacattcatgataggtatttcttgagacctctatgactctcctaatatcgctagaataaataatttccctcacaaaacctttttattctgaccaaaactatcacgtttacagtgtttcactttttcttctcactcatcaccagggccattttgtccttgatagctgacaatgaggaggaacattataggctctgaagtggtggccatactctggactagctgaaggattcaccctcagtgactggtttgctaagagatttgaatttatgtttcagaaatatggtgaatgcttgaatttcctgggctgctgggattgtttgtgaagagcccaaactgtgaacgttaatctacaaatatcaagcatcttcttttctttggggtgtcaaatatatcttcccctttcactctgtgctagaagacaggataataccacggcttggggaagaaaggaaatcccagaaactcaaacctgttatcaccgtaacaagcagtctacagcagggtgtctctgaactccaagaccgtgaatatctcagcacctttaggaaacgcttccttgctgtactttggtgaacagtctcagcgagctcttgagataagctaaaatgtgagtccccctgcacttggtcagtagggttgtacatacttgaaactacaacctgactcctcccctcccatagctctatgcttttgaatatttatctaaggctacctttccctatgggttatcaattttat

SEQ ID NO: 29336 - DNA, 1240 bp, Bovine  19866881370052
  misc_feature (1)..(1): n is a, c, g, or t
nctgaccctggcccctgggtatagaccagccagtgacttatagttgtatgaagtacagaatgtcatgtgtgatgggctagacaactcaaagtttagtaaaacgtaagccatcccatcctcattctaaaggccctgcctcaaacaattttcacttatttaaccccctccctcctcctaaatacctttatcgaaggatcagtattaacaatggtaagagatcaaaacagtaacaaagtggagagatttcctactctcctcctaaaaatagagtaaataagattttaaagtcttgaggatttaggaagaggaagaaagaaaaataggttgaaaaatacatctctcctcactggggagcctcttgtgcaagactgagatgctgccgcccagctttggttagtagtgtacatgggtattaattccaggtgcagcagagaagtgtccatttcagagctaataacgcctctgaaagcagaccagtaatctaaaggtggcctggagtaggtggattccatctaattcacaaatagagtctcccactcattgaaatttaaaacttcaaaatttcctgagtccttggagcaggaaatcttggaacaaagcgctttccccctctttaatgatgaaacctcaaaccacataggtagaagagagagagaagctagcaggagcgcccctcttaattgtctattcttatacgctgtttattggatcattaaagtcttacaaggacttcgtggtaactgtaattgttgaatttaaggcttgtctcagctatgtgtctcttatttccacactcgggaaagtacgtttcaagcaatctgctgacaagattcttcgtgagtgatctgtggtcccggcactagtgcaggtggcacgcgccgtcccgcacacctgttgtcaggtgacttgaccagcagcaccctgcgcactcacctcctctttccaccccaccccccagcgagagacttccctcctggccttctccactcgaagagtctacagccttctggagttaccttgggaaaaaaacaaaaacaaacaacacctcccaaccacaaagcaaacaaaaggctgatcacaaaacgagagggcagcgggggttcctgtggcccctctccagccagtccctgggacaaatccctccccgccccgccttggttccactcttgcaactatcccccaaacccccatcccactctcccagcacaccacccagacgcctacaccaccgccacctggg

SEQ ID NO: 29337 - DNA, 694 bp, Bovine  19866881958531
  misc_feature (1)..(1): n is a, c, g, or t
ngagcctaaaactgccttggcttttctttcaggataaatatgctattttaggacaagtaaattaaatcaaagcttccattgagtgtcttcttcagaaacctgcctggcaccttattttggaggaatgcagttaaggcttgtttgtgaaactattggattggctgaaaagttcatttgggtttttccgttaagatgttgtggagaaatacttgaatgaaatttttggccaacctggtacaatgcatgtatttctttgtatttagaaacatgtatttaacaatctatatctatctctattttttttcctgaatatattgagctttttcaaaaatgaaggtttcaagattctgaaaaccatgccgattctaccagaatggggtagaaaatggggaccgcccaactcatgaaaatcttccaccgaccattgctgaactcgcaggaataatgtagtgatgtggaggagaaaagggatccagtgtttcttccggggattaaaagtgagtccaaaattgcaagaacttggagaaaaaggctcttgttgagtttccctttgaataaccgaggcgctttctctctgagcactaagtgttgagaggcagcatccttactgcctagaaacccaacaaagactggcttggtggctgctttgaggtttctgttccatgtagaattttaaccataaaagatacaaaga

SEQ ID NO: 29338 - DNA, 1215 bp, Bovine  19866880446483
  misc_feature (1)..(1): n is a, c, g, or t
ncttctgttgccctcttctccttctatatatgtaattatactgagtctactatccatcacaatacacaattacgattttttttattttgatgagaaattttcagttattcccttaacaactttcaaatacatagttcagtattattgaaaattaaataaaatacaattaacacatgcaacaccagcatgaggttaaagtgttaagatgctttattattccagtgacagagctggttggacctgggtagctttactccataaagcttctcttaaacactgcaccacacttctctcactttcttctgggagaatggtgttgatggtgcagtcattaataaaagcaaagatatgaaaaggaggaaattcatatattcttcatatgaattcatatttctgtatttcatatgacaggatttgacatgatactcatggagttggcttaaagaggtggagaaaactccaattttgatattggaaattagccagcttcatagtgttgtgattggaataaatgagattaccacagaaggggcaaaatgtgagagagaagatgaagagcagagtcttgaggaaagtcttcatttgaaagaaaaataggcctcagagagggagtaggcacaactgctatgatttctgaagagctgagaatgcccccttgggccagacttctgcttaggccagttgctctaatggacagcattcaatttctgacccatccaacaccctctgcaaggctttgtatctggcatataggaaattttcaaaaacatttcaaaaatgttttcaagttaaattgcaaagaactaacattttctgtatgtatttgctatgggtattaggttttcataaccctacctcatcaactacttagtctcttttcatgacttttagaaaggaagaaactcatatgttcaataaaggggaacctgggagtcaactgcaggctcgtctatttctaaactgatttctatcttctaaactgtataccagagatgtgtgtctttttcattgagtcgcttgcagggcagttttattgttgtggtgacaaggattaaagaaataagaagacttaaacaggaaataataagctgtcatttttacagtcatactatcacaaaacaaagttcatatggaagaaaaaaccaatatggtgactggaaattgggttaaaactatcatcactcccatctaaacaaagtaagcaagagtagcaat

SEQ ID NO: 29339 - DNA, 2645 bp, Bovine  19866880452842
  misc_feature (1)..(1): n is a, c, g, or t
nctggaggataattgctttacatattgtgttggtttctgctgtaaaacaacgtgaatcagttataagtatacatataccccctccctcttaagcctctctcccaccaccccccatctctttcacttctaactccttcttggcatctgcttctaactcagatttacaacaaacaatagctcttatttgaggctactgctgctgctgctaagtcgcttcaatcatgtctgactctgtatgtccccatagacagcagcccaccaggctcccccatccctgggattctccaggcaagaacccactggagtgggttgccctttgcttctccaatgcatgaaagtgaaaagtgaaagtgaagtcgctcagtcatgtccgactcttagcaacccagtggactgcagcccaccaggctcctccatccatgggattttccaggcaagagtacttgagtgggttgccattgccttctccattatttgaggttatcaaaatataaaacaccaggacattaattgggataggtttgaaatctataaactattcaattatttgataaatagttgagaactactgtgcacccatatggttgtcttaagaacaaacaggatgtataatttcataattaaattaaagcatttctacttcctgttcacattctagtctttgaattcagagaaaatgtctcctcctgctgtcctagtgtttgggtcatgattataaattaccagaatttcaccttatctcttgtgaaatgaaataatttacattttatattacttgttttcatagactagtcatgtttgccagatagtggtaggtcataaaaaataaataagtagaaccaaatacctaactgcccattaaagagcaaaatactagcaaaatcaaaacagattatatttctgaaatacttagattctataattgaaatccaaacaaaaacacaaatcacataataaactattatcaaggattgggactatagtcatttgtaaaataaagtttaatatttatgcaatagatgtgtcctggaaagttatacacaaattgaatttgtctaatcaaatcatacactaatgctttttattaaaggaaattatgaatctcttactaacaaaattgtccagaggtttatactggatttgcctgaatcaaggtaaattctcaggatggcatcttttaatatattaaaagtggcaaataattggaaaggaaatatctgatgaataaattcaaaagctatatcttggagtctgctgctaagtcacttcagtcgtgtcctactctgtgcaaccccatagatggcagcccactaggctcctctgtccctgggattctccaggcaagaatactggagtatgctgccatttcctcctccaatctagacacctacaaaataaaggagcaatgtcccttgttcaatttgattcagtaaatttgtaaaataatcagttattttaaaaccatactgcactctttaagatatcaaagttatgtttccttccaagtacttcagaaaccaagtaagaacaagttttctttctataatatgcattaataacctcctctttcccaagaatatttttattgaaatacatattcatgcatacaaaattcaagatacttcattacccttatgaagtaattaatatgatacctattaatatgatattttaacatacaatttcaaaattagggtttatctaaaagagatctaaaagaataaaggatgataaaattatctagtttctgtagaaaaaaacctaatctgctaagcaataacatttaaatgtcaaaatctattattaagcaaaactttctcaaatgcttccatcaccaaaagaaactagcatgttaaaccaccaaattccaaatttgctctctatggaattcattctttttttcataacagaaactgaacacattactaccacaatgaaatatattcagtcgataaaatacttctatgctgacttcatgaaaagttatttacttgaatgaagataaagatgagaacaaatttgtccctgattaaaacgtaggaacaccaaatggcagccaacaatgtccagagagtggtttttgaaatttctgtttttcagagggtttcccaaatggctctttttgatattgcaagcagattgcttcaaagggccagccatttctctagagttcacttaaatatctgtgagcgtgatcttactgggttacatattagatgtatactgattattcagttagcttccccaggacactgtagttaaggggttatactggctttccattcaaaggcacatctaatattgaatgcagagcagaactacctttgaattcacagtcactgttagcctttttagcatgaaatgtcatgtgttgtggactttgaagatatagtgcctgaatcacatgcttttagttttcaaacaaaagaaaatgtagaattgtacaatatcacattgttcttatctaggactgaagttgagaaagtattaaaaagaaataataattaacacaaactatttaactaaactcagcagaatttcagctgcacagcagcaatctgatggcagagaccctagtataacttcatacatatttcaaaagttgttccttataatccagtcctgactcctgaaattatattaag

SEQ ID NO: 29340 - DNA, 847 bp, Bovine  19866880560400
  misc_feature (1)..(1): n is a, c, g, or t
ntaaaaattgtccaggtaattgtaaatgtgtagtcagggatgtatgactctattattttatataacttatctcaacctcttgtcctcagctgatagggaacagaggcttgacagttcgtggtatctgactttctcctcctagcttaacatttctttttggatgactgtctattttaagaaaatgtttactctttcagattccacctcttccccctcaccctccttgagatggtgcttggaggggatatgagaagctgatagtgatgggggagcggagcacccatatacagctttgagctgagacacccatttccacttgcgtctgcgttttcactttggtccctaccattaccaagtgtgcaagtgatgtaaggagccctacctggagaagagcacccactgcagctgagggctgaccctactacttctgactgccacctcccacttattcagtcacactgagagcttctcttagacacctatacccagtacgaaaattgccaaaaccagaaattttatacttccacatgtcaaagaaaaagatttgtgaaagcttgtgaaaaattatttatgcataggttcagttttgtagaatagtcaagacattgagcggaatcattttgtattctttatttgaagaatataatagttctatgaagttgggaaagatcaaatatttatgaaaataaggcaaggctttaatatctactgacagatgggctacatagattctaaatctactatctatgctttgttctcaccaatcttctttattccatatgaactttgtgtttacctaagggtatatcacggagaaggcaatggcaagccactccagtactcttgc

SEQ ID NO: 29341 - DNA, 1055 bp, Bovine  19866880583157
  misc_feature (1)..(1): n is a, c, g, or t
nccttttttctagatcttaaaaaatgtttttcctgcacactactaattttctttcggttacagaggtcactgtttagcagaacagaagggaagaaaattgagagcaagtattcatctacctaatgcaaagcaggcacaaaacaagattaataatcagtgttaagttctttctttctagcatatgtctccctggcctggaattccactgcagcttggtgagatactactctaaaagcagcatctattgcggtattaattgcagtgacaattatcagtgtaaaataattccttcagtattttgattatggcctattatctccacaatacttcataaacgaaatggtgttctctttagcacccaattttacatgaaacaatttgtcccaattaccctgcagagggttctttttgcttctctgccccatggagctgatttgtaagggatagctgctttaagaagaaaaaactatgattaaagtattctcacaaaacctaaatgttctgaggctaaggtgatagaataaacagcgacagtaccattctgcctgagcacatggtcatactgacctccttaatttcataattgctttagcttttcatgggtaggaagttttatttttatgggtacttcaattcaattcagttgctcagtcgtgtccgactctttgtgacctcatgaaccgcagtatgccaggcctccctgtccatcaccaactcccggagtccacccaaacccacgtccattgagttggtgatgccatccagccatctcatcctctgttgtccccttcttctcctgttctcaaactttcccagcatcagggtcttttccaatgagtcagctctttgcatcaggtggccaaagtattggagtttcagcttcaacatcagtccttccaatgaacacccaggactgatctcctttaggatggactggttggatcttcttgcagtccaagggactctcgagagtcttctccaacaccacagttcaaaagcatcaaacctttgacactcagctttttttatagtccaactctcatatccatacatga

SEQ ID NO: 29342 - DNA, 1028 bp, Bovine  19866880625885
  misc_feature (1)..(1): n is a, c, g, or t
naaatgactgtatctacctctcttcttaaatttctttgccctatcctttctcatctctctgaatcctcctctaccctttatctcacgctgcccacaatcctcttcttccttctaccaaccaacattgactttaccactactgtaatgttgccagatttagcaaataaaaatactagatgctagttaaatttaaattttacataaatcagggaatgcattttttagtatatgtatgttcaaaatattttataggacatacttatagttaagaaaaaaaatcattatttgtctgaaagttaaatttaactgggtgtcatattttatctgtcaaacatactatttcttctttatgcaatttgacactccctcctccctcatttatccaagcaattaaaagaaacattctctttgtggaatacacattgtacttttttttttttaatagtcctattaagacaatataaaaagtctttaaaaatgataacttatggattaaaacacatgagccaggaacttcttcaatgccaatgaaattaagattcacgctttgatttcctatacaaaagtcaggttagtaggcctccccatggctattttgcaaagacaatagtaattcaactccaattaagataaagataattcttttgatagaaattcaggctagattttaaaagactcaaaatccattatatgcttcatcactcttacttgaggtgaacataaaagtcactccagtgacaacctcaatgcccattccatttcagttctaatgatcatacttaacatcaaactccaagctaaattaattatacaatgttttagttatctatttctgaataacaaaccaccctaaaacttagtggtttaaaaaccaacttgtcataaatttacaatctgggctaggttcacctgaatggttgttttgttgactagcttgctggcagtctattggatggtcagattctggtagtgggttggcctgagactgggcttaggtaagaccctaaacacctggactgctccccctc

SEQ ID NO: 29343 - DNA, 3504 bp, Bovine  19866880635200
  misc_feature (1)..(1): n is a, c, g, or t
nattttcctaatgctttcttcttgacaaaaacataaattgtttgatgtgacagtcccctcctgcctatgtagtctgcatgtcatattctctaaaccattgcttttgtcacccaagctagtgtatatgttcactcactcattccctaacaaatgagagctgaacgagtagattctataccttggaatcgtaattcattcctttgcttcacaactgacacccaaatgatcagaaactcttttgatgctacttttaaaatctatacagaaactaattactacttctaactatcctccttggcataagtcatggactcttgactggaaattttccaataactttctagccaacatccatgcttttatctccatctactttatagtctattctcaacaaaatagattgctagcaatcctcagatcacttctaatttgccttcattgatttcttgcttcaccaagagtcaaattcagacattttcctgtggcctacaagccctgtatcttccagccattttatcctgctgtttttctgactccatctctcatcactcttttcctatatgatttcattctagccacactactgttctaattctttctcagacacaactaacatattcctatctcaatatctttgatttgcttttccctctactggaatacctttctctcaaatattcaaacagcccattccatcaatttatgtatatgttttcacatgtcatttactttttctgtctgagagccttctttgacagttctttacaaaatgctacttcttattctttctttaattccctggtactacatttctatcttcatttaactattctgaaatgatacataattattatttattcattatttaccttccccaaatataatagaagcttattgaaaacagagatatctttcttttttctttttttttactgttgaaacttttagcatcaatagcaactagaattgtgtgtggtatatatttaatgccatatttagtacttaatggtggtcaagagagatactttacagtgttcacaatatgaatattaacacagttttaaataagggcatttatctaaacatgctatacctttcgttataaagtactgtttacaaattaaagtccaaattttgatccaaaaattatctctcaaactaagagagttctagtatatatgttcttgaaagtgagtcacatggtcatgtctgattctttgcgaccccatggaaaatagagttcatggaattctctaggccagaatactaacatgggtagttattcccttcttcaggggatcttcccaactgagggatcgaacccaggtctcccacattgcaggcagattctttaccaattgagccaccagggaagctcttcttgatcacacaccagcacaagcctactttgcttcacaaactacttaggaagtagactctttatatgttaacgtagggtttgtacattgaaaagtattcagaattataggtgtgattaatgcaaataatagtttatttaagataattacctaaataaactttctcagagaaataactcgttagtaacttttaaagaaggacgttgtttgtgtgtgctctggttagctttctgtgtagcccttcttgtagatgtttacttgaccatttcacaagggtaaccactaacacgtaaagaaaaaggaccttctactgccagtgttactatgtccaagttgttatcctctcaattcagtgttgatgaaatccaaatttagtctcgtttttgttttagaaactctctagatatttagaaataagtagaatggagctttctctcaagttttccaaatattaatgaaaacatcctgttactcataaaactataggtgtatcttgaaccaattttatatcagtcttttattttgaatgttcatagctttgactttggcacagactacaagaaatacactttataagtctcttgctcccaagtctctaaattgcacattctgaaaaactggctatttccgcgcagaacatagagattgaatgcaaggctataattcactttcaggttttctgctgatgacataaaccaccagagctcgttggtttatgaacagcaaccggacacagagattgaattatggcatgtgtcggtgatgagagataaagaattggcacccacaacccaaagataatagtttcattccatttaaatttgacatatgaaagaaaaaagatttttgtacatgtaagaaatagttcatctctataaaagttcatattttataaaagataactagcaagaacaatttaagaaaatatcaaatctatgctcaagagaacataaagtatagagatgatgtaagaaagtccataggcagatatggcattttacataactgagatgtttctgaatctgctgagaaaattgccatttctgccttatggaagaagcaccttacaaagcattacattagttcattcatggccctggcttctgaaagtgttttacttcttaacagtgtaagaaggtatttctttttatttcctgatgtatttgagaggaagaggagatgagaagcacaggcagaataagttgttttataagggtagccattaaagtaaattctgatagcattctttatttttcaagatcctgcagaggttcaggtgccaagtttttaacagtcagctctgctactaagcttataaaggctgtcatatgtaaaaagagtgtcttaatttggttttcctagagtcaatgcctgaagtaagggttctaaggcaagtattttatttgggagaaacagggaatgtggacaggggacaaaaaacagttacagtaaagagaaagcagctcctaaaggcatgaggtattaaaccatttacttcagtggctactggagcttagttccgcagggaaactctctgcagcactgcaagacagggcctctgcttaaccctacagggtgaggtggatgagtcagtcatatgtccagggcagaggtaggctgcatcagtgcccccaacaatatcagtcttagaagaacatatgttggcaattagaagtcaaggtcagagggctactgactaggcactactcatgtctgttgtagagggagttgttggggacattgctacaaagttggggagtgggggacaaagtagcttgatttccattctttgttttttcactcatcagaaatgcaattgtgagcaagtcccaatttccctttatttcagctaagaaaatggttgacacagataaattttaaggactgtccctttgcagtattttgcagacttggaatttcccatgatattaggtgattaaatattttagaacctagactataccttgaggctccaaagcctggcttagcatcaggcagtcccaccatatgacactgtctccatatcctacatgcccttctcatacctgcctcctcatatggccaatggcagaagcatccacccatgtttaaaatgattttagtctatgaatatatcacttaatac

SEQ ID NO: 29344 - DNA, 1326 bp, Bovine  19866880666534
  misc_feature (1)..(1): n is a, c, g, or t
naataatgaatgagataccgttagagtagggactctgtaggcaaacagagtagccatcatataaactggaaataattctcaaaaaagataaatatgaaaatgaaagccctttatgccctttcttttgttcttctaagtttttggtaaaacttttaataagttgttgtctggaagtaaatgtcatgtctaaagagagggaaatgggaaaggctatgggaaaggatatgggaaaatgcattaatcagggttgtatttgtaggtcatgataatcatttattagtctaaataagactgctgggtttttttcacttctagaacttatccttctaaaaacaatttttggctgaggtcaaagcccctgccaaacaatccaagatagtttccatatagcttccagagacttatgaaattcaagcatattgtcttttactagaggcaatcacatataaagtaaactatggtgagtctaccccaaacaggttttttaagctaaaaacagaattcaaatataaccaaaatgatgactctgtgaatagcagtttcccactgattacctttagcatttctctctctgatataaaagcaaaatgatttgtggaaatacagccatagattgaacactgtgatgggagatggagccatgggtgaacttgggaaaagtttctttttagcccaaatttcctgactacctctaaatttactcttattagagtgattatccaacttaaaaatatttaatttgatatttcttctttagaaaaataactgcttgaagcctggccattgtttcaaagaagaaaaatgttctctgttgaggaaagattaagcaagatgatgtgtttctacatttgtagagattaaagaagtggcaagagcacacagaagaactatacaaaaaggtcttaatgatctggacaatcacgatagtgtggacactcacctagtgccagacattttggagtgtgaactcaagtggtccttaagaagcattactacaaataaagctagtagaggtggtggaaatccagttaagctatttaaattcctaaaagatgatgctgttaaagtgcttcactcagtatgtcagcaaatttggaaaactcagcaatggcctggaaaaagtcagtttttattccaatctcaaaaaggcaattccaaagcatgttcaaactactgtataattccattcacttcacatgctagcaaagtcatactcaaaaagtccttcaagccagttttcagcagtacatgaactgagaactgccagatatacaagctagatttagtagacagtgaaaccagagatcaaattgccaatatccactg

SEQ ID NO: 29345 - DNA, 1150 bp, Bovine  19866880686753
  misc_feature (1)..(1): n is a, c, g, or t
ntggaataaaggaaaattaaaggcatttagagcagagctcttacaagatgcattcacatcccttttaactgatgttatataaatgaacacaaaagaaatgactctccaaaaggcaggggaggaatacagcaggagagccaagtttggaagaaatgtggaagagggtgagtagtgctgggccatagacagggataccagaggctggcaagagagatcagaacaaagtgagcgtatatggaaggagcagtgggactctggcagagtgcgccatctcagacggtgtgtttggtactaggttatgttcagttagctgtttgtggatttacaaaattaggagaacatgcaaagttccctccaggatgaatatgtgagaggtgagaaacagattttcaggcttctagtccacactttcccttaaaattcactatgcacaaattacaagaaaaagggagtctgaaatatattgtagggtccaaagaaacatgtggcatggtcttgcttgccagggcctcagaattgtgttcctctgcaaattcttccttcagtgatacaataagcttcagacatgtatcattttccaacattgtgtcttatggtgaaataaaggcttgcttctcacattatgataatctacactgaaaataagaattgtataaaaaatcacctgaagcatacattttccctcaaaggacattatgtttctttactcatttttatgcaaattttatacaaaagaaataagatattccaaaaagcaaaaaatgatggagcaggagatctgatctggagctaggtggggtgtcatgtcttataaagaggattgtgttacattcctgttaaaacccaaaagtacatgaataataatattataaaaatacttttgttgagtgttgcctgatgattatatccaaacaagtcctttagtattgtacattagttcagttgctcagtcgtatctgactctgcaaccccaagcactgcagcaaaccaggcctccctgtccatcaacaactgccagaatctactcaaacttatgtccattaagtcagtgatgtcatacaaacatctcatcctctgttgtctccttctcccaccttcaatctttcccagcatcagggtcttttccaatggagtcagttcttcacatcag

SEQ ID NO: 29346 - DNA, 702 bp, Bovine  19866880761819
  misc_feature (1)..(1): n is a, c, g, or t
naataacttcatttattcagtcaggtaccttttaaaactgaatagatctttatcaggtgcttttggcctatcatgaatgaaatatgtatttatttaaataatgtgctcactttatttggaatagattatgtaaagaacacacttctattaatacctgcagaagaatagtacacattactgtaaatcagattcttattttgtacacaatcaggacgtgatcagaaaacatgcaaattgagaaagtattatttaataactgtatctttaacctcatttaaaaattaatccaataggcatatagccaactatctttttagttttctcacccaacttccaaaagtattttgtgttgatattttaggagtagatacacagttagacaaaccaattacttcttccttgtctgctacagataaagcataagttattaggtttattctgtatgtgacttacacagcagtttaaggaaaaaaataacttttaataaagttttgagcccatgcttgttttcccaaggtacaatatagatgttatttatagttttactgaaaaagctggtcgtgaattttcagcagttcatgtaactagctttctgcttgggaaggcaacattactttccaaaactagctaagaatttgtctctgacagcaagattttcaagaaaagatctttttccccagaaatccaaattaaacaataaca

SEQ ID NO: 29347 - DNA, 799 bp, Bovine  19866880787080
  misc_feature (1)..(1): n is a, c, g, or t
ntgttagctactatgcttgtatgtcaacctttagatccactaattccctttactattcctttaacacatttttgggactattatgttttcttagtctagtcttagaatatttgatttgttcagcactggccctgtaaactgtctcatagtagtatgatagtgttactgagttattctgctgttgtgctgttctgagctctccagtaaacactgtggattatttaagcagtttttatatattacacagatttgtaaatttttatgtggctatacatatttataagtttttaaaataataattttgtttgcttgtacagttcaagcttattgggaaatatatatttatgaagttttaaaccatgttatagattatatgaatactcattttgttacatagccctgaactctcgaaaatttctttgccactaatgattgtacatttaatttatcataaatactgctaagttcaactatgtagaaattatcttttcaaataagaataacaaggattgctagatgataatttatattttgtttttagaaacatttgagaactttcagagaagaacataggatagtgataaaataatttctaattagaaatcattcaaagttgctggaaggcaggaacttttaagatgttctgtctactctgagccataagcagaatgatgagcttcattcattcatataaatatttactgtgcgcctactttacctggaagtagctatactgggggaaaaataaaagaaatacaaaagttagaaaaagatatttggcattctccagctgtttaca

SEQ ID NO: 29348 - DNA, 1295 bp, Bovine  19866880829792
  misc_feature (1)..(1): n is a, c, g, or t
nctcaataaaaattaacaaaacaaaatgaagattgatagatacacaaaaaagcatatatatttctgtatgttttttaaattattattatacaattttttaaaaaaagacttgcaacatactttggcataaacttagaacagagaaacatatatatacacacatatatatgtgtttgtgtgtatataaataataagatcatcatatataataagatcaccatataaatgcttctgtgtgtgtgtgctgtcactcagtcatgtctgactctttgcagccctgtggattgtagccacctggctcctctgtccatcgaatttttcagacaagaatgctggagtgggttgccattttcttctccaatggatctttcccacccagggattgaacctgcgtatcttgtgtctctaagcaggtggattctttaccactgtagctcctgggaaacccatatatgcttatatatgatgatgcaattcatttgccattgaatgagaccattctgagaaacatataaatacaataattttgcatagtgacaagagtatttggtacaactttgtttcaaggacgagaatttcaatataatctctagaaagtgaaagtgaagtcgctcagtcgtgtctgactctttgtgaccccacggatagtagcctaccaggctccaccgtccatgggattttccaggcaagaatactggagtgggctgccatttccttctccagggtaccttcccaacccaggaatcaaacccgggtcttctgcattgcagacagatgctttaccatcctagccaccgatcacaggtccatagaataacctcctggaaagcacctatcaggattttcagtgccttggagaaataatatatgttcattgacaagaactggttgagagtaatgattggaattactctgtcatgattctgctcttctgaggctgttcaagcattcatcaatgtaatagtacattcttaataaggatagatttgagtggaaatatatcaagacacctttgctcagttcagcaacatttctgagttatggtttaagttacgtcactccaagacgatcaaatatttattcactgtatttgaacaatctgtactccttggaaacctttctggtaaataaaaagaaagataaacataaattcatttgatgaagaataaaaaatcattgttttgaaactaaatctcaactaaacattttttaaagtcaaaacaaacttctcagcaccacgccagtagtgaaaatccatatcagactctaaatttactcctctctattctttttaa

SEQ ID NO: 29349 - DNA, 774 bp, Bovine  19866880897201
  misc_feature (1)..(1): n is a, c, g, or t
nataatttgaggttctgaattccagtgctatttctatcatttgttagcaatgtgaacttaagcaaatcattgataatatttcctcttctgtaaatgtggtcaagtaacatatctgtgtttgttatgtgtgcgcacactcagttgtgcccaactctttgtgaccccatggactgtagccagccaggctcctctatccatggaattttccaggcaagaatactggagtgggttgccatttcctcctccagaggatcttcctgacccagggatcaaacccctgtctcttatatctcctgcattggcaggcagattcttaaccactgtgccacctgggaagtggtcaaataataccttgtcagataacccttgggggccattgaaggtaacaaatgagaacaatatgtgaaaatatttctaaactataataatacataaaaatatgaatttgctgttatccaaaatatgtgcaaaaatgtgatgtgagattaggaaggaaatcctggatttgtaaaggagaagggaattgtgatacataaccaattttggctcaagtttcaggatcttataaattctattcactggggtgagcaaaataatcaccagggataaattaattattctaaaagctaaagggttcagttctagtagtcagtattgagtaaaactggggcagtatacatgtcagaacagagtgcatggaactgcattgctattgcctgttacccctcagcattccatgtgcactatagaggctttaataagcggagctaaaag

SEQ ID NO: 29350 - DNA, 1375 bp, Bovine  19866880926852
  misc_feature (1)..(1): n is a, c, g, or t
nttttccccctctggaaatggccttggaacacagtggagggctttaaaagcttatgaggccatgcctgtgctattgagtcccacagttttggttatataactgcctgaagctggaccaattggattttaaatcctggaaatgtgaattttggaagaggtacgaatactttgagttttgaaactgggtcacattgatggcaatactatagaagacaggctcttcttaaacagttctatgtatacttaaagcgtaactttcaacaaagtgtgttttcatagctctcgatatacaatgtttttatcttttttctgtgtatattctataattttcatttggacttttaaacttaatccaaggtttgtttccgtcaattcagaatagattagcactaacttcatagtcattagggtcagtcaaggactgtgctccattaatgctcactcagaaccatctgaaatgttgccagtcactgcagcacatgttggagaggaatagagaatagcaccttaaatacttaattggctaattcaagtcacaacatcatgcctacattcaagggtgtagggaaacacaatcctgttgcatcgtgaaatgaaaaaaactagaaataacagaaatattgatgagaagcactaatgtaacataccagttggaggaatttttgctcttggttgtgtcattatgagagaatgttacctgtattctttctaaattttggtatttattgtagtttgcttagtggttgaacacatgatcagtttttatgactatttcatgaacacttaaagaagatatattacatatattcaggtgtagaattgtatgtatatcaatacatattctttttacttaaagcatttagttttttaatgcatggaaaagattttttataattataaaagagaagcatatctacaaaaaattaatagccagtgcctaaatgcccaatttgtttttattattaccaatgaaatatgcatataaactaattttacaggtgggctcattgcacctgtttttcaagtgacagtccttaatgaactgtcttttttattaattagtttttattgcagtgtatttgttttacaatgttgtattagtttctactacatagcaaaatgaatcagtcacacatgtgcatatatcccctccctttggacttgcttcccattcaggtcaccaaagtgcattaagtacaattccctgtgctacgtcatatgttctcattagttatctattttatatagagtatcaatagtgcagcaaatagagtttagaaaaggctaaggattgaacactttcagccgtcatttcttgggttaatttttctttttcctacatgtgagctacatctctgcttgtggaagcattgag

SEQ ID NO: 29351 - DNA, 778 bp, Bovine  19866880979165
  misc_feature (1)..(1): n is a, c, g, or t
ntcgtgttatcaggagagaatttctgaatgctacagacctgagaactctgacagaggaagcagaggcttttagaaaggctatcacatctgcattcccttatatagatgcaggggcggggctcaccagcccagtggtgcaggggaagcaggaggataccctctgagtcctcccagatgctgtgaaatacggagaatctacggcagcacaaagtaagagcagcacctgtcagagcagcacaaacactgagctcactgagcatgtctaggatgtcccctcagaactctcagaaaccactcacaggagactttgtaggggtctgaggaagaaaatgtaaaagtaatgagtcagaaaacaacaacaacagaaatgagatattccagtaatgacccttgcaggaccccagtatatcatttattcatactaaagtacttcatgttcagaatgtgataatgtatttcagtaagtggtttatttaatgcacaggagtgaatcaagcactgaggaggtctcctaattatgaaccaccaaaaactctcgaaggtatcaagttgataagcttatgattttcattatatacacgtggacattgtcttattcaaccattgctctgaattaacaaagctatcaccagcaaatgctaagctgagattttcctttttcactccttgaaataatacatttcatgtgcctacacataactacatgcatctgttgttgcattccacataaattattttgtatccagtaacagataatatataattagtacttaaaagg

SEQ ID NO: 29352 - DNA, 882 bp, Bovine  19866881019590
  misc_feature (1)..(1): n is a, c, g, or t
nctttgctgataggaaattagtgtcactggcagagccatgttcaaggaggaaaaaagaagaagaatatgcatttctcaagcacttcatgaggaaagtacacacattctttgaaagaggcttatccatgtgtcccacaggacatgaggaaacatacctctctgcatatccccttaccagaagctatttctcctgcaaaactgcaccatctgaaaaatacaaaatgacctcacaaccagcatatataaaaatactttttaagtattactaacaagatcacacatagaaataggtgtcagctttgaccaagtaactcaaaccatgttacagagttttcctcttgaggtaactagcttcactatcggtatgaggaaactaaggaataaagtaaattccataggtcaggaacagagccaaactcgaccctgccctttagaacagatcaactccctcacttgaagttggcatattacactgaaggtaacatcatacaagtatctaataaagactttaagctattatactagagaggcttcagacaaaattcgaattgattgaaactttcctctgaaacttgaatcaaagcaagccccatttttttccctgtacttcttctcttgcactgaaggatccaaagatagcacacaaatggatgtttctcctgatacctgtggcttatcagtaagaatagaagtaatggaaatctcatgagaaagcctgctcttaaaagatttccaatccaatttttgaactcaaaaggcttgaattagtttcagattatcatccaagtctttcaaagtacatcttccaggattcagttatcaagaggacatcagatgctgaatgttaggttcaatttttgggcaagaggtagatacaggcaa

SEQ ID NO: 29353 - DNA, 1553 bp, Bovine  19866881088396
  misc_feature (1)..(1): n is a, c, g, or t
nagtctagaatagtgtctgctgccactagatacactttaatatctaacaatattcttctgtttgctttcagtgcatattttcagtaatgaaatatttttggattatatttttaacacatagcatattggattagtgtcatcagggaaatgacacctaaactcttttcctgatctgacgttgtacatatgcattcttactatacttcaggactcatattgtcttacacttgaaagctttcaaatttctctgccatttttctaaccacttatccaggctcacaaaatcttcctagtttatagtcattaacttgatattttgctacccatctagaagtttagtattatcttcaaaattatgaatcttattatatatttcctttatatgtcatttatatagatattaaatgtgactgggtcacaacaaaatgtcatcttgaggcccatatattcctactttttatctgtactttccatactaacccatggaaaaatgggactggaccaccagatctcttaatttcatcttatgtttttctttgtatagaactttggcaaaaactgtgtaatttatttatttctttccctttcacttcccagcccccaatgtgccagcttatttcaatttttaatattaatgatgcctgccaaattattccctccaagtctgtttcaacttagccaacattttgattattcttataccagtaagtatcatgaatccaaccagactgaaattccagttagatcaaaataaagattttcagtgcaaaagtattcctacatttgtatcataaacctttaatccttaatttggttgtagagaaatctgaacatcatgaagaatacaaagaattctaaataattttgttggatttcttctgactctccttttttaatctttttaggggcatttcttgcataccaataattttctctttctttccctcataaaggcagcaatactctaattaggaagctatttgcatttgctggatctaaatacttggtatttgtcttggtaacaaaacaaaacagaacaaaaatcagacagctcaattcagagtctttacataaacctggcaagaagacaaatttcccatttttttgcactgagtgaggaactctgccttacctgcagagatcttgtcgagacatagcaagtagctggcagagcgtatgctttgctgggtgtctttgagtatcctgtggtgcagggagtctgaatcaccctcccagcctcctgtgcatattttacagatgctgctccaggaagatccatacttcctggagtcctcagaagtgtttgaaattcagaggcttggcaaggcatactcatctgatgctttctcatttaatcttgccgaaaggggtgattcttggaaagtgtgaaaataccttaccaagctacatcaacagatgtatagtaactgaaactcattttaaatacctaaggggattcattctcttgacatacgtttaactcccattatgattaatggaagcattacatgatttacagcatgctcctgactttagagggctgatgtctgtag

SEQ ID NO: 29354 - DNA, 1634 bp, Bovine  19866881109390
  misc_feature (1)..(1): n is a, c, g, or t
naaaactaatccaattatgtaaagtttaaaaataaaatttaaaaaagaaaagaaaaaagtgaaataggggtacaggtgtagatgaagccaagtttggatattctttcacattgatcccccccaaaaaaagaaagtatagattcaatgaaggcaaaaatggataggattctaaacacaggaaaagtgaggctaagtaaaggtttagaacagggaattctagtttacctgttcacacaggcacaggtttattatctagagcatctccatacgccatttcaaatccttgagtggtgggggacacaacagggaataaatgtggcttgtctaggaaaatgacaggagtcttgaaatattggaaaagatagaaacaaataaatcatccagataaaataaataagcagtattgtttgccagacctggaacaagatgccagattactgttccaacaatgtcatgttttctgtcttctcccatatataagcatcatgatttctgtcttaatcaattctggtgctgtaacaaataccatagactgagtgacttaaacatcaaacatttatgtcacacagttctggaggctggaaaattcaacatcagtactcagcagaatagatggctgaagagaacactcttcctggtttactggtggccattttctcttggtacacttacaggatagacagagaacactcttgtcccttcatccacttaaaaaggcactaatcccattcatgagagctccaccctcatgaacctaattatctccccaaaaattgggattggagcttcaatatatagattttgggggagatataaatattcaaaccacagcagtatcccttaccaacattgattgaattcgccttggaattttctcagaatagtgtactgataactactagataattagaattgacatagaaattgatcctattctaactaatgatggaaattgctgttttttgggttctgttttcatgctataaattagagtttttcagactgcacatccaatatatgtacatttatttatacattttatttatagccttctacattacaatcaataactactgaaatgcagaaaggaaaaaatataaataaagaatgaaatgttaacacttttcctgtatatcagtggattattttgcacatgctttgggatacatttcccccactgtaatttggaaacagctggtactgatgaggtcctctttgacaaatacaccatgatcacctattttatatatgctgtttaactctgtgaagtcagccatggaaattgttaattattgtgatttctgttagatattgatttagatattgagatttgaagctacttttaactaatgttttaggtaataaaaaattcatctgagattgaaaattttctattaaaagtagcactgacacctccttccaaaatatctcttttaaatgataccatcatgccatgatttatctaattttgctctgtgacccatgcattgagattaaattgtcctcaaagcatcttattgctacagaacacctcctttatggtcaaatacatttttagactttctatccaatctattttgcaaaatacattttttttttttctgttttgataatcttttcaggcactaacttaa

SEQ ID NO: 29355 - DNA, 656 bp, Bovine  19866881117876
  misc_feature (1)..(1): n is a, c, g, or t
naaaaacacagggcaattgacaaagaattttttttttttttttcttttgcaggggtaagctttaatcctgttcttactcagttaaagtaaacctgaattaaactaatctgaagttctcattcacttacaataatggaagaagaggtagagtaagatgagatctcctattataatttcaaagtgaccaatatttcccttgatgataacatgttttaaaagtattcatgagccaagctctccgcccaataatgtgtagagcagccttctctccttacatgatgccactctgtcaatggagagatgattaaactatgtacatctttcttcacattcattaagaagctgtgtagcataatgtacgggacacaaggcaggaagtcaggaccttggtttctgcaagaataagtgactgtcagcaaagcacttaacctctgtgaaccccagttgcctcatctataaaatgagaggcttggccagacggcatctaaggtgtctctttcacttcaatagttctttcattctataaagcaatgtatatacaaagaagtgaactgattcctttctttagataattctggccattcaactctgctcatctcaatgatataaatgtttcaagcaaaatattttgcctcacttttccatttcacttgaaa

SEQ ID NO: 29356 - DNA, 985 bp, Bovine  19866881161138
  misc_feature (1)..(1): n is a, c, g, or t
ntctcctccattttagacatattttgtcattattttaaaaaaatggatcttcttacacaaactttttagtgtcttactctttctcagtgctaacgcaaaacctcccatttcaaaccacaccacataagagggagtggtgggtataaaggcacagtggccctgtagaggaaagctcatctactctttttactgatgtccttggcagcagatgtggggttgtttgaggctattctaattagtaaatttggcttccaggtatctaccactcacagtgctttttctggggactgagctcactgtttcatttatacatcaagaaaccagttaatcttgttttgactacactttccccaaaatgcctgagtcctggtgtttgggcttccccttgtctcttggctgagcccccattctctgttcctgggcttctacactatgctggacattggcagacctcttttataatcaccactttgaaagaagaggtttaattaacataatacagcctggcagtagtgaacagcatatgggaagctgaaaattcccactaagcccagcctgttcaatgtcctcagcctcactctcgatcagtgtaggggcagaaacaagtccttctggctgaagctgcaagggggcctgtctcatgcctgtgttcagtgctataatatccacacttctggcaatctatcctctccctaggttctttgcctctttcccataatgggttttcttctctttggtgcactctcagaagaataaaccaatctctcaattaacctgaaattggaaacaaacatcactactcttctttcctctttctcaaatggaaaaactgccgtaacaacaaaaacctcaagctcttgttggaagacaccagcaaagctcctgcgggtctcagttactaaactttttactcccttctagggataggcccaacaaagtctctgcaattatcacagcttacaacaacatatattatggcaatttc

SEQ ID NO: 29357 - DNA, 835 bp, Bovine  19866881213262
  misc_feature (1)..(1): n is a, c, g, or t
naataaaattatcccaggagatatctagattgattgataatattgataatattatcccaggagatatctagatttttatattatatgtaatttccattttatttccaaatattttttccaaataatttccaaatattaataatatttacacatataaatataggaactttaaatatttttttatttaataactctccccatgaaatttaaaatcaagactaaataaagatttctcttttacaaggagagacagaaaatcttttgagatcttttaggagccctatggaaaagtccaaagttagtttgaggtccaaaaagagttcattcagaatttgatttgaggaagtttgttaaaaatgtcaaaatatttaaaatacttgatcaaacaggagtataagtcactggaaaacaatacttaattatccattcaaccaaagggacaattaaaagatttcaaacagaaaactatatagttgtaaataaaattcagcttttttaatattaaaaagactcacgcttaacattgttatttattagagaaatgcaaatcaaaactaagatatcacctcacatctgtcgaaatagccatcatcaaaaagtctaaaaataaaaaactctggagaagctatggagaaaagggaaccatctacattgttggtgggaatgcatgtagaatagtatggaaattcctttaaaaactaaaaagagagttaccatatgatctggcaatttcacccctaagcgtgtatctgggaaaggcaataactaattcaaaaagatgaatgcacccccaatagtcacagcagcactatctacagtagccaggacatggaag

SEQ ID NO: 29358 - DNA, 690 bp, Bovine  19866881379636
  misc_feature (1)..(1): n is a, c, g, or t
ntctaaataagagttaaaatttgtagacatgtattagttaaccccagtaagcagagagctctttaaatgcaggggccttatctttttaatggttatatgcttcatgctgccttttccataagaagtcccagttacatatttattattaaactttttaaattgttttgcaaattactattgatgttgttcatattgcatcatgaaaataacattttcttagcagcatatctatgttacctttgaagagataatacaaatcaagccttaggagaaaacacccaaaccttctgatatgacatacaatatttttcatcatatctttgcattaggataatccttacacttttaaaaagccaaaggagtatatacatgttgcaaaaatattatgtttcctcaaaaacctaatgagaaaagatagagacagatggagagttaaattagttaattttctgcccagctgcctagatgaaaaataaagatgcactgaccctatgcttctgcatgctaaactgctcaaatgtcatgtctctgttagttaaccattatgcctagattgagtggccagtatctggattagcgagactattcaatttactgtcccttttattctcagtttttaatgcaaaggaagagaaatctaaaaatagtacaaacccttgcaactgacttgcattcctgaatagtcaatat

SEQ ID NO: 29359 - DNA, 1148 bp, Bovine  19866881388006
  misc_feature (1)..(1): n is a, c, g, or t
natgaaagtatttacatttagttaaagttgaccatgactaactaaagatatttaaatatatgtattagaaatacacatgtaagggtagttttgttttcagcatccctctgaagaaattcctgtatatgtataaataagtgttatataatctgccagttttgcaagtggggtattaatgcttatattatgagtcattttaagaagtaaaaacagtgacatatttaataatatctgacaaaaatgtagccaaaaattaaagaacactttttgaagcaaagttttacataatatattatcattgattatgaataatacccaagaatatatttaattgtactctgagtcatatcaataaggaggcggtaaaatattattcactgcaactttatttcatattttcaaaatcttcttttgaatatgttaatatatatgtatatgggagatacaaaaaaggtaatggacatatgggtttaatgataaaattttgaaggcaattgatagactatagacatcagaacctcggagggctttgtgaagagacatcaggaagccttaaaacttcctgaaattgtatgcaactaagtgtatgtgctgacttgtatgtttctaaagagcgtctgcagaactgtcatgacattatcatggaaacagtgacttaattttacttaaaagcagccacatgttatcaattccttatggatttaggctgaagaatatttaaatgtattgaaaacaaatatttggtatgtgttaagatgtctggatacatttttaataaattgggtttattgcaaaaaatatgccttcatagaatgatataggttgcaaaaatacataattatggcaattggctgaaatgcgtcaaataacaggtgtgtgacaactgatagctgaaatgatatttaatagaaattcatgtggtagaatttcattttttcttttccatttagtcatcaaaaatacctgatagtataaaatgaaaacagatgaaatgaattttcacaaatttcatcttctccgtgagttcttaggaagtccagaaactattcctgtgaggataactggaatctgcagaatctgtacattacttcattctgccactgacacactgctcacggtaatggaatatgaggcaacggaaggcagtt

SEQ ID NO: 29360 - DNA, 1322 bp, Bovine  19866881428877
  misc_feature (1)..(1): n is a, c, g, or t
ncatgcttaatacacagtcctgtctgactttttgcaaccccatggactgtagcccaccaagctcctctgtccatgggaatctccaggcaagaatactgcagtgggttcccatttccttctccagggcatcttccgaagccaggtatagaacccaattttcttacgtcttctacattggcaggagagtaccactagtgctacctgcaaagtcccaatctaccactaaaaacaaaattatatatatatatatgtatgtatgtatatgtattttatatatatatatatatatgtatgtatatgtatacagtacagaaactctccctaattgaatacaacttttgttaaagtcagtcagatatgaaaacagagctttacatgcaatcgacagtgaatgaatctattaagaaactcaaataaaatggctgaaacattctaaaataatttctgtttttctctttcaagttgaaatatacgagatggaaagcatgagtccctaaaaggaaaagaagggaagtgaccattttatttaaaatgatttggcaaatcactttgcgaatagtgtttggaaagactctttatgtgaactcagaaagctgtgaaaatattgtatattgtaccactgaaaacgttacagacattctgaaaaataacagaaaatgaaatacaatgctatttcaatcacaaaaagttaaatataaggatttacaataatgtaacttatgtagatagttataaacacataattctaagcacatataggaacaagtataaaatattgtaattaaaacatccattaaatcacatatggacttaagagtctcactgaaattctactattaacttttaaagggtattaaagctgccagttcagctgtttaaataataggaagacttgtaattggaacatattaggtcattgtaacagaaaagcttacattttaaacctctttaatgttagtttttctggggtattccctgcatattttattaatagcaggactcttgtctgggtgttgtttcagctacacaaagtctttctagaatccatgtgaatgtatttggaaagaatccactgcaatgcgggagacctgggttccacccctgattgagaagatgccctagaggagggcatggcaacccactccagtattcttgcctgggaaatccccacggagagaggagcctggggggctacagtccacgggatcacaaagaatctgacacaactgagtgactaagaacagcacagcacaaactgcataaaggaaaatattttaaatatcttaagtcgattaacaggaagtgtgcttatcaggaaattt

SEQ ID NO: 29361 - DNA, 1041 bp, Bovine  19866881472400
  misc_feature (1)..(1): n is a, c, g, or t
ntgttccgtttaaacctgtctaattatttctgtgtaagcacaattattttcacagttggttgactagagatagtacatttatatttgtgattgcagatagagataagaggaaaatacatggtatgatgcctatctttaacaatttttttttaaatgagatcaatcacaaatgattataagctaatgtatcttatttagacttccaggtaggtttttaatttttaagccaatcccttctcacagaaggatattaataaaatagattacaataagaaaattaaatattgtctgagattaaagatttgtgacaaagtaggaagtaaagagcaagaataaaaagataattcttaaagtggtaggactttaataatgatgtcccctggagatttgaatcagtagcttgtatcctcaatatacatgttaaaaataatagatgacagtgaataacaagaagttgaaatatgctgatagtatgtaattacaatacttattttggtaaaacattgagggaaatggagaattgtaagaaagtataataaactggtgattaaagaacacaaaggtaaatgaaatataataaaaagcacaaagtattacataccttaagaaataatttaaattacttgcatatcctgatggactatgcaacctttcaggatattattttggacaattcaatgaaaaagagcaatcaactacaaataaatcaatgctacaacatgttaaaagcatagctaaaaagtataacaacattaaatagatgatgattgtagcatggtttctattttagaagtattgccatttttaaaaggtgagggtcagtttcatattcttgtaacatggaaaaggttcaaacaaaggaaaatacattaataagataatggtagaagtcagttacaatacaaccagcataatgcacatctatttttctggctaatgcctggcttaaaaatatcagttcctaaagtggggggtgctaatctataaatctttataaaccatagaacagaaaaacacatataaagcagagacatttgcaaa

SEQ ID NO: 29362 - DNA, 759 bp, Bovine  19866882215355
  misc_feature (1)..(1): n is a, c, g, or t
nattcctataataaataatctctctttccctctctccccctctgtctcactgtatactactgattctgttttgctgggaaccctaatataagagttctgcacaggaattttttctttacttgacccatgagctgtcagtactccatggttttacctccctgtgtggtgtcttcattgcctgccctaaccagtaaagccatttgaaattctcttcctattcagcccctgaggaagagacttgacagaaggaacaaagtttgtcagaataaacaggattgctgacctgtttccttcattaagataatctctcttcagcccttctctctcttggtcagcacagcacatgcatgtacatccacatagctgatgtgttttactttttaggtctgtacatcttattggttttgcattttttttcctcttaacataatgtaaacctacaatatgtgtaggtctgactacttctagagattaaaaaggagatattttataaatactgaaatctatactgtactaacgtgcttgatgtttttggaaaacagctcactaagctctaaaaatggcatgatgttgttttctaaaatgtattacttaaatgactattaataataacatgacaagataattaacacctgcatagcatttttcattttaagaatactttagaaatattaattgtataacctcttcaaaaccccactttgcaactagaaaaaccaaagcagaggtttaggatgacttaaaagtaaaaatatccaa

SEQ ID NO: 29363 - DNA, 3065 bp, Bovine  19866880372703
  misc_feature (1)..(1): n is a, c, g, or t
ngaagatcccctggagtggtaaatgacaccctctcccgtgttcttgctggcaaaatcccatgggcagaggaggctggtgggcgatagttcgtgaggtcacagagagtcggacatgaccgagtgactgagcgcacacacacacacaaatcaaagtagaaatgttatttttggttcccctacgggcatttttaacttttagaactgattgatagtcgctggtgacactgcgtaggtgtcaaatattagagattcacgctgtgagagaggttgtcaagcgctcggtttgtactcaaggccctttgagaatgagagtgctgtctacagagtacactagggtgtacttgcaggacattggtccaggtggatggtggactcagcgtaacgcagagaaaaaacttagtaataatggaatggacctttctgaggggaattgcacttcaaataggtatggaaacctgtctcctttccctcacactcctgcctccagagacaaaattccaacactcttccattttaggatgcggagaagactaagtcacacggatgaggagaaagctaaacagagtccacgtggggaggcatataggctcagagatgtggggaatctcaccttgttaggacagtggaatgaggtctttatgatgcacttctgtgaaacttaaagtttataaggggcctttgaaagctaactgaacctttgttactgttatgatttctgttctaaatgtgtccagaagttatttttctgtttcaccatttttccttaaaaacaacatgtagcccattttcttacagaaaaatcttaagctatgtagtatttctctttttaatttgcgtaaggcaaaaatatctctatttccattacattttatagtgagtcaaaataaggttggctgtttggatgaatgcatgttaaaattttgaagggttctgattcttacttgaataatttagggtggttctgctcagaagtggaaatgaacgttaatactgttattaataaaggtttttttttagagatgaaacaatttaggtatatgtagtggaattatttgtacagatcacctgactaaaaagcatgtgtaacattttcccaaaagattccagaggaaatggaggaatttaccattaccctacttaatgccactggaggagctaaaataggaaatataactactgctactctgaggattagaagaaatgatgaccccatttattttgcaggtggtattgctttcttatttgagtgagtttatctttcttgaacagtgtaaggatgcttttttcaataattgttttaagtgaacattttcaataaagcataattgatacatgtttaaataggatttcataatttgaccattattcaatctctttgacattttaacagatatttttaaggattctgaaggaaaaattaagtactattttgttagctttgttttcctcttttaaatttcaaggtattttctttcctttggcaaaaatgaacactcttccatgttacctcttccagtacacagggaagtagtgaagacagttcagggtttgtgtattgtacttaatgaatggttacttactataattactgttaatttcatggacatataaattaacatgtaaattaaggtttccccattttttccacttgaatgctttctttacaactgtctttgccactggagacatcttttagttttatttggtatctaatttattggtatcttattcttccttaaatcattttttgcaggctgttcaatttgcaactgtagaactcgtaaacctcttgaattttatccatttatgttttaaccttcagttaacatgtacttaatgaattagtcctgtgttcagtcttctattaaccctgtagaagatgtggaaggtatctgggcctattttcaaaaaaaaatttatggtccaagtttagaaatgaattctatgaaacagtaagcagaggattccagatagtatacagtttactgacaaattgggagttgcagacaatggattttgtaggaatcaaggcaagaggaaagccactgactcagagtaattagaggagacctcatgcaggcattggaatcacagctgtctttcagcaaagactcagtggagggcatttcttggtggtgggcagggagaaatgtgcaatctgataatatgtagatggaatcagaaaagctcacacgttccttcttttctttgtgaatattttagagcctcgtgtagtgagggttcgggaaggtgagactgctgactttaaagttctcagaaatggatctgttgatgttccctgcaccgtccaatatgctaccatggatggggaggctactgccagagagggagactttgttcccattgaaaaaggagaaatgctcgtttttgcagttggaagtagagagcagaacatatctgtattcattacggaagatgatatcccagaaacagatgagcccttttatataatcctctttaactcaacaggtaaataaattatatttatggcagagtgttgtttcaattcttttacaagatggcattaagtacttcactgtcacctgtgaatgttcaagagcaaaattgtttcactgatttcttgagggaaggggtaaaagaatacatgtgttgaaactttgtgtacgtggtatacgctatgtcattatttttaatcttttttcacaaatagcacacacagaaaattatgttattatatgaggaattgaaatcttctagctgaaactacccgaagtctttcctagtcactcaaggacttagggcgttattatcctgtagacttttccctcctaccagggcaccgggcatagtggttgggaagctgtattctgcaggtgactgagcccaactgactgataattctctgtagccataatcacagtgtgtgacagtttgcaagggggaaagatagacttttccctcttctctatactgtaactgaagcagaatgttttgcccctatctttagtaaactagaggggctatagcttcttttggtaattgttttattcttttaagagtacacagagctattttttccttaa

SEQ ID NO: 29364 - DNA, 1286 bp, Bovine  19866880385178
  misc_feature (1)..(1): n is a, c, g, or t
ngccagttttcattccaatcccaaagaaaggcaatgccaaagaatgttcaaactacccacacaactgcagtcatcttatttgctaggaagggtacctacatgccgcatatttggaaataggaaccctagaaaagtgaagtcgctcagtcgtgcccgactctttacgaccccatggactgtagcctatcaggctcctctgtccatgggattctacaggcaagaatactggagtgggttgccatttccttctccaggggatcttccctgacccagggatcaaacccagatctcccgcattgcgggcagatgctttaacctctgagccaccagggatctagtcctaattatgcctttaactaagccactcaatcagctagtattttaattttttttgaccctaaaatctgcggtgaggtggtattagacaggtgattgctaatttcaatctccctcttggtttcaaatttctataattctaataatccttcatgtgctttataaatctctgatgcagatggtgagttgcacgttgctgatgagatggtttgaccttgcaggctgaacgaataattgccaacatttgttgagggtttaccaagtgccaggtgtaaagagttgcacctcacacaaactcattcatttaatccttcccacagccttcttaggtaagaattaataatcctattttataaacaaggaggcagataacttactcagatgttgacctcagtttgtgcttagaagtgttatgtgggagtagattcctcatttctaacatttctccaattcacacgcaaattcttaagaggttaacatctcatggagcgcttcaacgttaaaagccatgcccttttaggaacgaaataagactcagtacatgagttttctctgcggaaagaaaaccagcaattgcgcacagttttgtacgcagggcacagtgccccgctgcctaggtgtgcgtgattcttgtgcccaaggggacaaactagcaagctgagtccaagcggactaccataaaacacggttcgctcccgaggtctgagatgcgctgcagctgcaggatgtgcgcgttgctgcgcgccggcaggtcagctagggcgcctagctgctggaagagtccattagggacggccacggcagggtgtttccggtcgccggagggccggacctggcggcccgctgcgcagacgagggcgcttcgtcttgggcggccacccccgctccgctggtcaggtgagcgcagcccggggagccgcgtgtccgattggagcagctggaggaggccg

SEQ ID NO: 29365 - DNA, 1247 bp, Bovine  19866880450417
  misc_feature (1)..(1): n is a, c, g, or t
ntgattgccttgaagcttttcttatttagattgcctcaattttggtactgcttccattttgacttataatttgttgccaaaattaatacactacccataagtattgaagagtatgcttttgggatggaaagtataacagcaagggctggcaatgtttcagtgtcaaaagagattattttattaaaggcttccctactgaacacttctaataaagatttttgtgagttactctggataatattactctgcttcctcaaccagagcctctgtttaattctccactttttttcactcaacagatacttattgagtacctattatatgcaagccactgttctatgcataacatatgggcatgtgacagcagacaaatcatataaaatctccatcttcttgaagcttacatttcagcttattgttaataatagctttggtttggcagcattttcattaatcagtaaactctaaggaaattggttattatgtacaatattggttagagaaaagcaattggtgcttcaaggttcacttttattatctttctacctgggagttatgtccagaggaactcaattgataattcttgtcacatgcctgaaacagggacacaagaaatcctacccctgtctgcctgtgcttgtctctctatatatattttctattataaatctatggtggcagaacactatcagttattctattgctgttgttatggacttaaatgaaggaaatccaggaaaagataatatactttgtctaaatattaaaagtttgtctaaaaattaaatgtgccacttgtagaaaaccacattgaaaccttccagcttgagaagcaaagttaaaccaaggtgatgaaaaaaaacttgttgtcagtttaagccatgatattatgttttaaaacatagtcaaagaagggtcccctttttaatgaggtacaagatatggattagagtttctctcattaattagttagctgtatgaggaatgacacttaaaagcaactctagggtatcagttttcattgacttactcgttttgttcagatttgctgctgtgattaatgaatttttgagcaatgatgattaggttaattttgagttcattattcaaaaccagggcttaacagatggaacactaaactgaaggtcaggaaatgtgaattccattctaggctcactgcttactttccatgcaatttgaatttcctcctgccttggtagaagtattgtggattaacattattgtga

SEQ ID NO: 29366 - DNA, 3053 bp, Bovine  19866880458262
  misc_feature (1)..(1): n is a, c, g, or t
ncttatataatgagtagaagatacattctgaatagaaaaaaaaaggatgattccaactttttgagtattttaggccatttttaaaattgtggtaacataaacataagacagattttaccatttaaactatttttctgtacttcctggtagttcagatggtaaagaatctgtctacaatgcaggcagacctgggttcagttcctgggcgggagagatcccctggagaaggaatggcaactcattctagttttcctgtgtagagaatcccatggacagaggagcctggcaggctaaaatccatagggttacagagaattggacacgactgagcggctaacactttcacactatttttaggtgtacaattcagtgacacttagtatattcacagtcgttgggtaaccagccccagtatgcatatccagaactatcatcttctcaaattaaaaatctctacccattaataactttccattcctccttccgcctgtcctggtaacctctattctacttttcagtctctattcaatttgcttatcctagccatctcataagtggaatcatgtaatatttgtcctttgtgtttggtgtactttgcttagcataatgtttcttcaggttttatccatgctctagcatgtgtcagaaattcactttttttttttaattgtttttattgctgttatagttgatttataatgttgtgtttctgctgtacagcaaagtgattcagttatacatatgtatatattcttttcatgttcctttctcttgtggcttattacggatgttgaatatagtccccgtgctatacagtaggagcttgttgtttacacattctgtgcgagaatggttgcacctgctgaccccaaaccccgtcccatccctcccctgaccttcggcaaccactggtctgttctgtcttgagtctgttctgtggacgggttcgtttgtgtcatttcgattccacatgtaagtgatattatgtagtattcgtctttctagttctgatttgcttcacttaagtttgatgatgtctgagtccgtccatgttgctgcaaatgacgtaatttcactctgttttatggccgtgtagtattccatggtatgtatgcacttcatcttctctatccgttcgtttattgatggtcatttaagttgtttccatgtcttggctattgtgaataatgctgtcatgaacgtaaaggttcatgtatctttttaaattatagttttttctagacatatgctccggagtgggattgttggatcatatggcaactgtgtttttagccttttgaggaacctccttaatattttccatagcggttgcaccaacttacatttccaccagccgtggttcgctggtctcagtccgtttgcacctggccgtgggttgagaggtcagtagtggcagctttaagctccaagtcaccagtgaagatgtggatgcagaggtgaagagacgagttttataagctgttgtgggtggcctgtgtggattgagatgttttaatatgcatcctggatgcagaggtctgcagtctgaatgaatggctggactaaagctaaatattcaaaagcaccaattcaaatatggtaaagaatttttaaaaatctttaaaaaaatttttttaatgtaatgtatagctagaggaaaaagttagcctttcccttttccttttttttctcgaatcttctatttaaaattctcaactccatttcccaatttagccttgatgaggtatttgtatccatgatgcaattatatatactcagcatcacttatgggccatctcacttacttttatcctactcttctccatattttttcagacaggtttcacttaagatttatctttgtatcttttcattatttgcagacatgatgcatccacagaaaaacatctatcagattttttggaagactggttacaaaatacagactcacagaacttctagcctcccctaggcaaggatttttatttagtaaggatgggatgtaatgtagaaatttgtttgtttttttttttttttttggctaggccactcagcttacaggatcttagtttcctgactaggaattgaacccatttgccctgcattgggagctcagagtcttaaccgctggaccaccagggaagtccctagaaatctgtattttttaaagcaagcttcaaggtgatttcaacacacattgaggtttaaaaagcagtttcactgatcacagggtctagtgccttggggttgttgtaaacagaattattaaatggataaagatcctgttcaggggcatttcttttatcagacacatggttaaattagaaatgctctgatggctcagaaaagggtgaggtgaacttgatgagaatttggctgtagatatataaggtttgtgatactcttgattataaagcagagagcttcagttgaatggtgcatcctttctcaccctgttgcacccatgctgatgtgactaacacagcaatagacattttatagcacagattctgatacctgtgaaacaactttcagaaacccatgttttaggttagaggggggttcaggcaaggggatacagaaagttctgtgcgaaaaatcctagcaattcaccgtaaaagaactgaaagcacgttctctttactgcttctgggtaggcagtgtcatggttgtacctaacgaacagagatccagtgtaatggatttttaacaaatgtgagtggatatacatatgcaaatacatgccattttagcagaaccttcgcttttctgtcatagaggtaaaaccatccttgacagctgcccgtatttgtccatactggctcttcactggtaccctcagcagatcaatgggcacaagtttgaaggaaaagaaggtgattatattcgagttccagagaggttattggatgttctggatgcagaaataatggccgggagaagcacatgtgaattagtccagtttacagaatatagcagccagcagtggtttatgactggaaacaatttccatgccttaaaaataaggtaatctatcatttaaagaattacga

SEQ ID NO: 29367 - DNA, 973 bp, Bovine  19866880468265
  misc_feature (1)..(1): n is a, c, g, or t
ntctttgcagatgcagaatgtgtgttaaaatatctcttgaaatgtgtcttgtttacttaaggaatacatttagcagatcatgttaattagaagtaatatctgggtaaagtctttcataatgtatctctttttaaacataaaaatcaaggggctaatttcccaagttgtgagaatggatgttccctctcattacctgtattttggattttgaggttttcttgtaagtaaaagtttacagcatccttgagtttttacagcattgcttgagttttcagcatcccttttttttttttttttaactatataataatctaggtttgcaggtgttatgtatcaagaaatggagaagttggggaaattttttgaaaaaagacattgcctactcttgaaattccttgtaaagtattattgtcatataagttgtagaaagtgtgtcctctatgtgaatacctctgaagcacaattttagatattgagaacctttctaaccactctccattttgagttttgtttttttgtgtgtatgtgtgacagatttcatataaataaaacttttttggtgcatgggtaaaaacttccaattacatctctaaaaccattttctatggtatttcagtgttaccaaaatatgtaatgttaagtttaccttaaacctcattgacctaaataaactccatgaataatagatacaattatgtagtatagcttctagatggaaaattgtcatcattttcaagagaatgaatggctctggggaaatgtacagcttaggaatgacaaaactgtcattcactcagaaaacaaaattgtggaaatgacagagttgagccctgggaatcctcaaatttgcctttaaacaataccttcttcaaactagtgattaccagtggggagaagaaagggggaaaggcaatatagggataggggactaaagtgggaactattaggtataaagtaagctacagggaatatt

SEQ ID NO: 29368 - DNA, 1328 bp, Bovine  19866880479045
  misc_feature (1)..(1): n is a, c, g, or t
nggacttccctggtggcacagtggctaagactccgtgctcccaatgcagggggcctgggttcgatccctggtcagagaactgagagttcacaggccacagggaagggctggcacagccaaatagattttaaaagtaaataaataaaaataaatattaaataaagggtgacacttaagatcaagagggactgctactaacagtcacagcaggacaccacatataaacctggaatgtcctgggctttaaaataggacatgtggtcaacccaaccatcagtgaatatttaaaacggcttttctctgtttctcataatgtttttattacattagagcgtggcaaggatcttcactttcttatttatactgagaagtggatttgttctactttcctgaaaactaatcttataggctaagtctcagctaatctgttctgaacttcattgtataatctacttctctgaaaccgagctgtaggtttcccacatatctaagtttctgtgaacccttcagaagattattttaaaatacctacagtctttcccatgatttcaacatttcttcaaagacttttagttttattttgaacaacttcaaagtttattttggaaggaaagtgtcagtttttccctaaaattctccaggttttagtagagcaatggactcacctttgggaagaactttgagtatctgactatatcagcaatttactggccaatatcaaatgatatggactaattgtccagcctctaccccatcagtcacttgcctgcctaatttatatattgacatagatatagaaatacagagacaaaaatgaaggttaattggtagacagatagatacatgtgttcttttaggcctaggtcggacaaacacacagggaatatcagttcgaatattctagattttaagagggctcctttggctacattttcaaattttaattttatttaacagggtgctatgtatttttctcctgctgtacacatttgtgtaagctttctcaaattctttggaatcaaaaaaagcaccaaagaacaatcacaaggttgtggtgaaggatgtgaaagctagggtgggctggggggttaaccaacggctagttagggacaaaaatcaaatggcatctgcaaggaatgaagaggattcctgcgcttggatcctccagtttggattatgagggggtttttttaatctatttatttaacatgactgctccagatcttagttgcagcattgagagtcctttgttgtagcatgtgggatctagttctctgaccagggatcaaaccaggccccccttcactggcagcagagagtcatagcca

SEQ ID NO: 29369 - DNA, 1580 bp, Bovine  19866880587445
  misc_feature (1)..(1): n is a, c, g, or t
ntatgagtgattcaagtaattccccttcttaaattaaatttaagctagaaataatcttattacaaattctgtaccacaaaggcacatgtttaaccccatcactccaaatatatacctgtaataatgatcatggcaaaatctgcaaagccagcgtcatcctctcccttcacgatctgtgctcccccttgtgggtctgtgagaaacacgtagaagaattcctgtccctcgggatcaccatcatccagaattgcaatcgacactttacgttctctttctccatctacaaacgcaaggatgagagtctgcgctctaaaatcttcttcttcggttgcccatgtcaggttggaaatcccacggctgtcaggaaagggcagtgcgtttggttccttctgagcagatctttcaccaaaagttctgactgttacgctgacattgccagcagacccgccagttctccggacaagaacctctgcagcgttcaacgtgccattctccatttcctcttcgacgtaaacaacagggggcccaagactaaatgtcccatgaacggaggtatctgtacttacagtggctgcgttaggcttctcagacgtggcagaggtcccagcaagggtgacaaggttctcagggatgggaggtacgccagccacctccgtaaccacagcgaccacgtcggtgtctgtggaatggcagtaatctcggttgtgtcagggtgtgtggtggcagagtcggtttccagaggaagggctgtgtccactgctgtggtcacagctgtcttggcgaaagaagtatccgttcctgccaagtcatcattatccaatattgtgatcactgccacgctgaaatcttgattcaggcgtggtctccaattagcatcaaattttggcaatccttgaatttccactgaagttaaattaatgtaaaaaatttcttctatctcaggaagctcatcatcaataataattatttcaaaatcaacttcaacttggaatttttggaaaagcagctccccattctgaacaggctcaaagtcttcctggggctttgccctccctgcagctgtctgataggaaactttaataagctccccgtggaatccaaacagtctttgtacatgtaatctgatcatctgtgtatcctccgacacgatgatatttcttgaactgggcgaaaactgaaagactcccattggttcaatttcagcaacagtgaaacctgacctgggggtaaaaaaaattaaaccatgagagaactgataaaaaaacagggctaccacttgcagagagtcatctttcacacgtggaagatgctgctcatgagggcatcttaaaaatgacatgccctttcaaattccgtaaaaccctactaacttattgatgaatagaccagagcacaagaaatgaaccgacaggagctgcagtggcaggtgacaggacctaacaagtgttagcaagctgaggcgctcagaggcctctggcctgtttctccaatcaccccacagcagctctttggaaggatctgaaatggcaggttctctctcacgatcagcacaccggggaccaaaatcaaagtctcacagt

SEQ ID NO: 29370 - DNA, 835 bp, Bovine  19866880591249
  misc_feature (1)..(1): n is a, c, g, or t
ntctttgttctttttaataacattcttcctgtatccatttgaaagtcattacccccaaatatttccacaaaattataattttgtgcacgatttcaggtggagataaactccttatgtttgttttataatatactgcaaagtttaaaaaaaaatactgagtaatgtttatctctttcaaatggaacaattgtattagctttctacaagttagataatagcagtattttcttttacttgagtagctttcactatcattttggaagagtgatattttgtttggaacatgctatggactggatcattcatcatatatgctttataaagaaattagagtataccctaaactgagaggcaaataggtcaggatttttttgtgtatctttttggtttctattttttaatataaaacgggcagaatggtagacatgaataactcaagtagtaatttgtattactctgtatatatgaatgtataaataaattatatatatttttatatgtatataaattactctctatatatctccatctgtagagatgctcatacagacctcccagacctctcagcaggtgacctgtgctgtcattcatgattcctagatgatagttcaggtaggatttaagtttttgaagttaagatgcatctagaaaatgcgactaggaaatagtctgttaattgttaattagcaaattattaggcatgtcattattaatacacaaagcggtgtcattgtggacatttctctttcagtctaatggtggggtgtgttttaaattattctcaaagatagtttgggaagtcatctggctttaaaaaaaaattagctaactcaga

SEQ ID NO: 29371 - DNA, 1429 bp, Bovine  19866880614043
  misc_feature (1)..(1): n is a, c, g, or t
ncgagacatcgcagacccagtgagcgggtccttttctttggagatggggaaggtggaatgagaagcatcattctcgttatctacccacatgatgacactgaaattgaaaagactttcattattaaacttgaacttgtgagaggagaagctcaattagactccacagctaacgatgttacattaacagtaagtctgactttatttttcccacagaatttaggctttaaaggatctttcagaaaacgtgcttacatttgttgaaactctatgggcttatgatgaattaaaagttataaaacccaatgaagtcgtagtaattcctgtgggtcagatgttctggttgttatattagtttattacataacctgattattggtaattttttaagatactgagaaatagttattttacactttttgagaaaatttgatgctttggggagatttggcacttttcaagaggaggcatttgttgtgtcataaacattggatatctttgccattaaagggtgtcagagttcacaggtaatcacaagtcagactgttgaaaggaagaatggtactttttcagtcagtgcagtgatggtgtgagtcggatctagatacagtttatttggtatgaatcacccagtccattggggcagaaaatcctggagaccaaggttaccaaaaaaaaggtagagagatgcaccttgttctaagtttggaaaagcctgttttatatggggtctgtatcaatcagatacagagaactggagaactgaaactgttaatgttgggagacagatatgaagaaagaaagacattctgtaaggaattatatcccataactgtggggctggcaagtcagaatccataaaacaggtagaaggaatccataaagcagaatccataaagccggcaggaagctcaggaacgaactgaagttgccttcttgagtctgaattttgtggcgcaggccagcaggctggaaatgcacgcaggattcctaaattgtggtcttgaggcagaattcctttttctttgggaagcctcagtgtttaaagcttccatctcattggatgaggtccatccacattactgagaatagttttattgactttgttagctggttgtcagttttaaccacatctaaaatatcattacagcaacatctggatatcatttgagcaaacagttggacactttagcctagtcaggctgacacataaaattaaccatcacggggccattacctctctccatattatcactataaatgcatcataaccagtagaaagaggttggctaaacttaactggttaaatgaggtgaacatgaggtgagtaaagctaattcaagcttttgaagttctatccttttgaggttctacaaattgtcactttctgaacacttattcccgttatccttgaggagtaagaaccttcttg

SEQ ID NO: 29372 - DNA, 2156 bp, Bovine  19866880618812
  misc_feature (1)..(1): n is a, c, g, or t
nactggtgaatgaatgcttggtatgcaaatttaagaagaaataaatgctctccacttggaatttacttttcctgcttttccactaaccccctgcagtttgttttctttaaaatattactcaaaatttagccttcatttcttaaagctttctaaatgggaaatcatttgcctctaatccctttgctgttgttcagcagccctttgtacacctaagtgtaatctcaagatatttctgcttagagcctatatcgatgttgggcttactgtcctttaggaaatactgctgtcccaaaggactgggcagcaactttcagtctttcctttttcagaagttcgtgctaggccatattttgtggttcactgggcaaacataacttgggcactgactgtatctctgcatgtgtttgcaggctcgcttcttgccttttgacttttaaagcactagttgggggaacaggtttctttctgctaactgaatcttgacagatgaactcctccttgtttggaagtattttaatccttgccaaattaatttacctagttgattgactggagttaaaattcaactgcaaaatgagagcagattgttctcttccttgcgacagattcatgtccgttggagtacatcatcttcaacaaatatgaccaacacaggaggtgactctgaggattaacaaggtttggccatgtttatataactttttaagctcttattggaaaagtgctttggggaccataaaatgttgatcttaatctgtgtacgcttagaatcagaattggcttccataagttcaactttttctccaaaggcagtggggattagtaaatcgtgtttccagaaagttcaacctatatttgagaccagtttaaatgatagctgatgtgaattcagttgctccttagaacagagatcctccaactttaggatgtctcgaatcgcctggagggctggcccggggccccagaactttggaggcagcaggtctgggatgaagaccaagaccggatatttctgtgaagttctgaggcgaagtgggttctcctggcactttgagaaccactgccctgggaattgtacactctgaccagtgggactgagagcgaaaacatccgagggaagttgtgtaaacttctccagagaggttcagatgtggtcattttaaattagatctggtttttatttgttttcttatcttttgtatattgttttggaagggagttattaagggggaaaaagatggcttctaatactcatgtctagatctagtattatttgactgagtgtctatcaatgcctgcttctaaatccaacagctcccctcacaccttctccgtccatccagaacaacaacaacaaaaaaaaacaaagcaaaaatccaaactgaatgttgtctcctatcagcacttaaaaagttaacaacagcaccaagcagaatcgctcagggtcagtggagggtaaaaccagcatttggaaatgctgtgagaacacaaatagtttaaactgtagaagaggcccaaggaaattacagagggaaaactttccgtccaaggttccagttgccaaggagtttgtgtaggttgctggagacctcacccctccgtggctccctctgtgactcactgtgtccctgggaagcctcagattcagcaaccggagagaattcaaactgggcctttgatctcactgggatgaaatgcaccagggaacttggcttctaaaacatggatgtttccgatcaaatagctgatactctggttcctagaaatcagtctggttctggcccaggtgcagaggttgagatcagagaaagctgtgtcatgggcccccttgcagctgcaggagagagcagggcaggttagacacacttgggcccagtgggagatgtctgggtcggtttgatacatcagagttactcctgttatgttcttggaatccagctcccagttcccctgttttgaagttggatggctgcctacaggtagaaactcccagccatgaagtaacttttctttctggataccatcttactctttgcccgttgtacattttgcccttgctcatccaaatccagtactagccggaaacgggatatgttcattttcctttccataacaatgagggagaatacaacctaatgctgcagcacttaatcaga

SEQ ID NO: 29373 - DNA, 2338 bp, Bovine  19866880635132
  misc_feature (1)..(1): n is a, c, g, or t
ncaggtggcaacgagaaccctcaacccgatagtaattttggaaatctttttcgctccaagtttccatgatttattcccttccataatgatcctctgacttgatagcaggtccctcccaaacgacctatacaagggtatgcatgtagtaacgaaggaggttcaagagacagtacagggcaagagaataggtatttcaccatttcctgccacatggtgtgtctttagctatttagacgtatgaaaaacatattcccatttggtaactctttctttaattaagaggatgcctgggataccacttgcatctgcttctgttgctagattgtaactaagattataactaaatacacagcatttccctccactggagtaggaacaggattcaagagaccagagaggaccccctcagagatccatcctaagggaggacctagtatgcctaggatacatttcttggggtttgctggctcaacatataattgcctgcttcatatgaagactgcacctgagggtaaagatagaggcatcagcttccttcttccgtgtttctatatgcagagcttttacaaagtcatttctctttgactggctacagacctctctcctctgggtggagctgagctcactgaaagcagagttattttgaaaacaccacacctataattgaaaaggatttgttaaggccttttatgatctatcttttttctgtggcctcttacaccatccaaaatcaaaccagctgaatccagaacccaggtggcagctgttcaggcttggcaccccaaagcccttgggactcagggcgtgactcttcagtgagatcagatgtaacccatgaggcatctctggctactttctaattatttccattgcaaaaggccctgagttattcgatgaatcatgtcatttttattgaaacgtaaaccaagggtggtaaaagacctatggccacacacacaagaaccataggttcataactgggatccagaggaagaaaatctgtacatactcactttatattttgggttctgggcaccaggaattgtggccagaaggcacatcttctctaccacacatttcagcaagagtagggattatgatttgcttttttttagggagctatttttagctaaagatagattggtacataggcgatttttaaaaattattccttatgttccaattcccttcttataaccatttaatataataattattgattgctaggaatgttctgggcactacttcatggtcttcctatacttaatcttgctgaatcctcccaacttttctaaaagcccattgcttgattattcctgtgttacagaagaggaaacaaacccagaataattgaaatctttaatcaagaatgatttccacctcagccttctccttcccagcctcttctagctttctttctgttccaccttaatttttcggctttttcttttttttttttgtgggggtgcggagtagtgggcatgggtgtgtttgtttgttttttttttcttctttcttttctctgtcacttgcttctctgggcttcaggagcaagagttcaattttagaagcataaatgttgaactcacataagagaagacaaatacaagccaagttgaggtgaagccaggtcaacagagcaaggatttactcatgccctcccccatccctgtcctcagaagtggtctgctcactcacctaactgatgaaacaagcttgccgaggaggtcaaagtgaagacaagagcctgcaacaaaatctgccccacctcccacccacttactcagagagcaggaggctaaacatcacctctactgtgtagctgcagtttagctctcaacgctgggggccaagcatcccaaggtattggggagactcagacctgtgatatttgagccataatgtcttccacttgtataacctctttacaaggaatattctcacatgtcatctcatataatcacttacacattttattcattgaagtgtatgaagtttgagattaaagcaaggatgctattccctcaaaatagcttgagactttgattttaaacaaatcctacctttatggtccacgttaatagttttctgatgcaggttcatgaaacacagacaggacttggtggcacaaactagaactctctctgaagacatttgtgtaaagagctatgggtagttcctgcatatatgcaagtcagcagtattccactgaaatattggactccactggctgggtgtgaggcctctccctgtagccttgcagaagtctctactgattttctagatagctcatgaatgggagaggtcctcgggtgacaaggactcggaaagacttttt

SEQ ID NO: 29374 - DNA, 3490 bp, Bovine  19866880636274
  misc_feature (1)..(1): n is a, c, g, or t
naatcgagaaggacatttgttacttaagtgacccgataggaaaatgatttggacagtcttgggtgggccatactctctttcctggaaaacggcaaagaaaaggcaatgctcaaaaaatttctcagctctgtttcctgttgcttcaggaatcatctggctcttaaaaaggaagtatggtctgagattttcaggaagataacagaattatgattaatctttgttcctctggggctataaagctttcaaggccaaggatgtgtgtatataccctgattctgggtatatgacttcaggcaaggaccataatcaataaccacgtagaattaaaatccaggtttgattggtccaaagacacacagattatgtattttgctaattttagaaagaaggcccagagtaaaacagagacctgtcattttaaaacccctctaatatagtctgcacgatggataattttggaggaagtttcaagagagctgccatataagaattttaaaagaataatcagacaatccagttaccacggatgccctcagaaaggaaagttactaaaccaatgctctcatctcaggaccattcaacccaatgaacacgaccagatgtgatctataagatcaaaaccaagtgaaaggcacttggtgagtggattaaaagtataatttttaattatacttttaaataccactccttgaaaaattctttctttagttagctaaagtagcaaactgaagaacactgaagaagcaagatttctggaagaagaagagcctttgaggctgttttccgctcatatcttttcaatgtaaatttgtcctttcttgatacataaaaattcttcctaaactataactggaatctgacatagacatttttaacaagacacatgatatttacaacactaggtctaaaagctagattctcctgtaatccaagagctgggtcgccgtcagcatgtagctatcttgtaaagaaacacagcagagcttctcctatttcaatgctttccacaaaaacagagcacaaaacactgcaatccatctaaaaagtgctattacagcgccattttggaaagttagattctaagatgcatcttcctgaggagaatggatcaagaaaataaagaggctatcaggctatcaaacacgctaatatcagatatcttgttctttgtaactccctttctttaatctttgcaaaatctcactgcagacttcctgatgttcatatttgtatttgcttagagttccaagtggagcactttgatactaacttaaaaagaaggaaaagcaaagtcagaaagttccttttatagtttaggtataatctttatcaaatgatcagtgccaagatactaaatagttctcagtctatggtttggtaaaatgtttaggctatcattacatcttttatacaagaagctttataagccaaacaaatagccaattgctaatggaaattacaatgatttctcaacattcattcattataaaaataaggatgctgaatataattttcagaagtcaaatttatttaaaacatgcatttagtcagtacctcccagttaaagggttgatactcttatatctaagttaggcttggcatttatgggttccatatgggtcctttcagggcttttagattccatctcctgttctaggtgttgtattcggtacttttgcagacaatttttagtttaatcctcaagacaaatccgtaagacattgttttctccattccttcacttaaagaatatttaccaaacacctgttaaacgcaagagactgttcaaggctccagggctggagcagtgaaaaactaccatcacagaaaggtcctgccctcctggggcttactttctagtgaatactgctttttcttaattctttgtaatctaaacttgtcccatactaaattattaggaagaaattaaaaagtaaaaacttcctcttagaccacaattggaatctgatatggaggcctgagagaaaagaaaatattttaaaaacccacattcaaataaatagatattacatctgatggtgataattgccatgatggaaaataaaacaggataaagtcactatgaagttctgggaattgctaatgttatatcaaggagtcagagagatatatcttaactgagatatgagatcttttgataaacaaataagtgaaccagactagtgatcagtgaactagaactagtctctttcaaacaacaggaaaagatggtaactgactgacggtgttcttaccaacaccttgttgtccctaacaaattaatgctaagtcttgaaatggcagaatatcacccaatgaataccttactctactggaaaaaaaaaatcctatcacattatttctaaaacataaaggtcctcattgtcaccaaatgcacacaaataggtatggtgaattatttttctaattctttatcagcaggatctggaggaggactcctagaattctccctggaagggcagaacgtgacccacattagtaaaataattgcaatgagtagctgataagtcaatggatttatatgaagtatttctagacctcagacactgtattgtttctctcacagttttttccttttccctaaagcattctctcttcaaaaatgatcaaaggacactggtgattcaaaccttaaatttgtctgagggtgacatttttttctgtcctgtaagaattcaattcatttgattatggtcatccttaaatccgagtatttgcctgaacacaagctatccagtaaatacactaagtaatatttattaccagtgtgcattaatatgtagggtaacaagtgtccatgtgtggccatttgatgtagtatgcatgtatttaattaatttacttcattttagagtacttgtgattattttgtgcttttgggagttttgatagagacatccatatatctacagaaatgaactctaatataaatttcctttcattacaatgtcttcatttactcagttaccaaatagttgctgagtaagtaaagaggaactaaaaagcctcttgatgaaagtgaaagtggagagtgaaaaagtgggcttaaagctcaacattcagaaaacaaagatcatggcatccggtcccatcacttcatggcaaatagatggggaaacagtgtcagactttatttttgggggctccaaaatcactgcagatggtgactgcagccatgaaattaaaagacgcttactccttggaaggaaagttatgaccaacctagacagcatattccaaagcagagacattactttgccaacaaaggtccgtctagtcaaggctatggcttttcctgtggtcatgtatggatgtgagagttggaccgtgaagaaggctgagcgccgaagaattgatacttttgaattgtggtgttggagaagactcttgagagtcccttggattgcaaggagatccaaccagtccattctgaaggggatcagccctgggatttcttggaaggaatgat

SEQ ID NO: 29375 - DNA, 951 bp, Bovine  19866880645011
  misc_feature (1)..(1): n is a, c, g, or t
nttcccccacccatccacccctcagtgttcaattttcttttggcaattaaaagtgaagtatggctagaggctgagcagagattgctgacaaaggacatttttatgagataggagaaggctagtactaaagagctattctacaatttttcctcctggccaaagcaccctagagaaacacgtgaaaaccagcttaatcagtcttcaagtcttagtgattatttgtagctcctagttgaagaagaggcagaaaaggtttcctggaggctgtagctctgtgtgattcaaaatcacctagaggcaaccactgtgaaaccttcttgaaatattcatcaggtctctggcttgatgaaaaaagctgaaaggctcatctttatcctacacaaactgtagctgtagtatcataggctaaaatcagctttcgggtaggtttttgcttgatctgcttagtgcttttaaaaaatccaaatatttcacacaatagtttagatactcaatttttcttaaaaagtcaaaagtccttgacatagggaatgattagtcagagttgggtaatggcttccacttagaaagggcatacatttaccagttaccatagtccccagggccacacttaaatagcttttctggtctcctgtaggcatttggggtctgtgagtcttgttctataaaaattaactttacaatctccaacctgaccctgcattatctgtccatttaaatctctcactagtctcaaacgcagaacctactattaaccctgagaaactcctcattcttctgtaaatatctcatattcatttctttctcagctttcttttagtcaaatctacccctcctccagggaacaccatacgttaagccatatatttgacatttaagccaaatatatctggcccattacttttctagaactaactccttattatgtctgctaaagttttcttaattgaa

SEQ ID NO: 29376 - DNA, 1436 bp, Bovine  19866880669162
  misc_feature (1)..(1): n is a, c, g, or t
ntagtaaagagccgggaaatttttttattttgatctaagttgtttcttcacttttaattatagctactattatctcattcagtcaagaaaagcctgactttgtgtaaagatttagaataatttagattaaaaaaaagtttcaacagcaacaatttgttgttgtttagttgctaaattgtgtctctgtgaatccagggactgcagcttaccaggcttccttgcccttcactatctcctggagtttgctcaaactcatgttcattgagtaggtgatgccatccaaccatcttatcctctttcaccctcttctcctactgccctcaatctttcccagcatcagggtcttttccaatgagtcagctgttcacatcaggcggccaaattattggagcttcagcttcagcatcagtcctaccaatgactattccaggttgatttcctttaggattgactgggttgatgcccttgctgtccaagggactctcaagagtcttctccagcaccaacagaaagtcaatttaaatcagaagaattgttatactcccgtaagtcactgaagacatacagatgaagaaattaataagataaacctaaacaaagtttgaaaaactgtaacatgctctagaaagaaaatgtaacattattataattaagtcaaataggaacttttaaattttactgtatatgattaatttgacggctacaggcaaaaggctaagaaatctcacagtattgccctctatttattttcctggcagtgtttggatggttttgaattccagaattgctgtgaggtcttttcattattatttttttttcttttgtttccggtgaagaaaaatatctggttttgtagtgacgtctgctgtaagagattgtttttcagaatatttcgactcatctttgggtcactgacctcaggtctgaaaactgcaagatatttcctcatgcagcttgttctttggagcacttgtctttcataactctagtttctacccccaggcattctattctggcactaaggatttaccttttcatctcaggggattttgaaagagtgtaaacttgtatcacagtatcaagcattattgtgtgcgtcttttatgaaaacttccaagttcttatttcagctcctttcttttctagaattttcatcatagccatttttattgcttcttactcttattaatagtttcctatggtggctggtgattctattgacttatttctcctttattttttcattgcttgcaaacattgaagggatcaacacaactgaggcaaggatatcagctttgaaaatgtttgcttcttccctggaacttgaaatacagtgggaagggttggcagggagtaacttactggaactgtgcaaagaaaagctctgggtgagtcaaaattatactgccagagagtgaagacagagagggcaacat

SEQ ID NO: 29377 - DNA, 920 bp, Bovine  19866880751772
  misc_feature (1)..(1): n is a, c, g, or t
ntctatgttttctgtgaaatgtcttttttgtccttccaatcaattcctctttttcccttaagctaatttaaatgtactcctgatgacaggacaatgaagcatttgagagaagagaagctacgatgagatgtatctttttctctctgctgcctcctctgtcccatcttcttttctcctttcctctttctccaactccttgatgcttctgaggctctttcttttctactattaatatccttctcttctcccgtttaaagaggaagagggccttctttcctttgaccacttctgttctccaagtcttgaccgtttctgccctgagtagaaacagccgggatgcaaaggaaaagaacagagggccattcctaggaccacttgggcacagaaaagaatgtaactacttatactaaaatagaatatgtggagtatatttatttaaaataacccctttgttaagtacactgaacttaagaagcagcttcaggctggctttacagtatttacatgcagcaagtaaaaatgcttattactgtctttgaaatttaaacctttgtgatgttttacttgatgaaatacttctatggctcagtcagcttcagccacgctaagtggcctttaaaaattagacaatcttcattgaactgagagaaaaagaattgcagatgagaaataaaggtctagatttgttattaacttgaaatataataggtcatacataagatttatgattttacatcctaaaaaatcctcactatgctgcgagggagggctgagttaaaaatgctccaattttggcttgggttatttttatgaacctttaggctgagttgtaaactcacctgatcaaggcagacaacatatttgccttaaaagggcctttggcgggtctccctccctgcttttgtggagaaggggagaaa

SEQ ID NO: 29378 - DNA, 799 bp, Bovine  19866880757331
  misc_feature (1)..(1): n is a, c, g, or t
ngaaggaagggatagttagggagtttgggatggacatgtacagactgctttattcaaagcgaataaccaacaagatcccactgtatagcacaggaactctgctcaatgttatgtggcagcctgggtgggaggggagtttggggagaatgaatacaagtgtatgcatggctgagtcccttctctgttcacctcaaactatcacaacattatttgttaattggttatactccaaaacaaaattttaaagtttttaaaaaaggacaacaacaacaaaaagaaactcttagactgcccactcaggctaaggaaatctcgaattctggtgtggaaaagaagggggaaaagaaaaggaaagccccgagctgcaggaaaggtctgtgacagaacaaaggagtgcttttatcacaatcagtgggtgccacaatgtcagcatactttaaaggtaatgacgtatatttggtagttaatcaccaaagagtgaacatttggggtgttatttcagatgtttggatttcttctctgtttcagaaaaaaaaaaaaaaaaacctgctatatttcaaaggaaatgttagttctaattttttacacttcagacgtttggaaacttcaaataactgttccaaatctgatcactaaatatttcttttgttgcatagaaactgacttttaagtcactgtatttactaaaaagcaaaaggaaaagctggtcctctccagccacattctctgggctcccaggctcagcatgcttcatatttaattgcacacaatccaaacattctctacatacagttctcat

SEQ ID NO: 29379 - DNA, 902 bp, Bovine  19866880774726
  misc_feature (1)..(1): n is a, c, g, or t
naattcttcaggcaagaataatggagtgggtagccattccctttctccagaggatcttccccaacccagggactgaacccaggtctcctgcactgcagacagattctttaccatctgagccaccatcatcataatactgcataagaaataaaaattacaatcttaaatatgatttttaaaacactaatttctacaccatgtgtaatttaaagcagctggacaactaaaaataactatctactaaagaaataaatttaaaaacaccaaattttttcttcagtaaagagtaatggaatataaggagtagaatacattaccactataggtattgtctcctttactttcatttatcgtaacaattagatcatcagaaacaaattctataatcccatgaggatcatcatttttcagaattgttatgttgacaactgtagcacttcccaacttgctttcccgttcaccgtggctggtgaggaccacccaataatgttcatccaactaaagtgagcatgtcaaattaggaaaaataaaaagttgaaattttcagagcaaataaaaatatatattcaaaaatattaataccatcaatttttcacaacgatgcactcactgaaaaaaacaaagctgattttttttaatttttaacatttttccatcaattaagagagatatcaggtataaatatacattattcaaaaacggaaaagacaaatcacggttactacattaaaatagtaaggagactggatcttataatgatgttccagtcatttaaactaataaaattaaattaatttaaaagttacatatgcaatgatgtacatacataacggaacaatatctggttctcttaatatatttaaaacttaaatttattttctttaaaagagtaattttacaga

SEQ ID NO: 29380 - DNA, 3139 bp, Bovine  19866880776179
  misc_feature (1)..(1): n is a, c, g, or t
nacacacgtgtgtatatatacacacacacacacacctaatgttcggaagagtgaaatgggaggagacctgagtattgatgatttcatcatcttttatagtatgtagtcaagttgatactatgaaattgaaatacctaggttataaaaaacagtgattccaatcctttactgtatttataatttcttaagagacaccttttatatttcttatgattattagaatatattttgtggaatagaagcattttttgatatttaacagttatttctcttccattttagcttttctcaagacaaattcaaataaattgaaattaaattttgtatattacagaaactataatatggtcacatatttaaaacatttataagtaggcatcccatcatatttagtatgtctagaaagatatctgaaatgatgttcacatatgaacatcacttttttattttaaatgtgatttttactttaaaatagtcaacagtctgtgacaaaatgacatataatacataaagtaggaatgatttgttaaataaacctttatatgtaatgacttacttgctctttccagtgttctccattaattttcatagaattagatttctctcccatcatttccctttcccttcagtctgtataacttctttttagcatttcccaatgctcagattttttggaaataaattctttcagcttttgcctgaaagtgtttttattgtaccttgctattagagggatattgtcactgcatatagatttgcaggttaacaggttttgtttgtttgttacaggactttaaaggggtcattccattgtcttctggtttccagtttctgatgagaatagtattaacttctattatgattttcttgaatacaatgtttcctgcacttccccaagctgccctcctgatctgctattcagattttcaagaatttgactatgatatgcctaaggatacttttctttgcttggggttctctaagcaatttggatttgggtttgtgctaataaacttggaaaattcctggacatcataatagtcacttaatatttatgaagattacttatggatgaagtttgaagtgactttaaaagtttttaatctttatatttttattatttgtttcaattcctataataaatctttataatttttctaaaaataatgattaaaaaatagtctaagcaaatttgtcaatatattagtagtgatcaagtttttttaacaatatcttttatttttatctttatgtaaagagtatatagacacaaggaccatttattaatactgctttttttttttctgtttttaaaactctgaagcacaacaatattaaaataataggaataatggttttggagacctaaggaaaatgtacaatttcaaaatctccaggtatatgttaattctgttatgaaaaatagttaagaaataggtagtacagtcctacaagcggtctaatcaaaaccacctatcttttggatagcctaagaaagaacacagaacaatgcagcataaagaacttagaagaatgaaatcttcaataaaattaggctatattttttcaactcaaaaattacaaatttgggattacaaaaaaagagtatctttgattcaatggtaacctcctagaaagcaagacattatgtccagttagttcactgatgcaatttttagttcataggttctcggcacccagaaaggagcttaagaaatatttgttaaataagagattctggcttttaattttcattagtgacagagagtaggatggggtggggacaggcaggtgttggttcgagtcctctcattttctcactatagttaggtaatttgggagttgctcaataaaaattcactttggctcagtctttgtgtttctcacattacatgtgccaagactctcttgcaggagaatgaacacccactgatggctggtctctgctcttctgggtctgtgcccctctggtggtgggcttgtttggccgtgaacctccaggtgacttcctggctgtgtctggcttctctgcggggcctgagtttgcatattgctgctgccttttcctgtgactgcttctccttagagggcttcacagcttctgcttttgctctccacttggcagacacccctgtgaagtctccgtggtttcttgcttctggcgtcacacagagctgctgacctactgctgttttgtatcaccaagtgacttagcagcagagacaacggatttcgtaccaacgacagaattgaaaagaccaatactgtatttatgcatctgtacattttcttcaggtgtgagaaaactaggaatttcatctttcattgatttacatttttttcaacagctctttttcgcaatttaacttgcttttgttaattttcttatttacaattagattcttcaatctgacgtgtgtattaaatatacagagaaaaggaaaataagtgagttatcttgatggccaccggctctcagtgcaattgaaacatttagatgctttgggaacaactatcacccaaatgctcctaaaaatatttggatgggatcagtaattacctagtgttcaccatgggttatatcaagttcttctaaaattccttactaatttaagggctgctattcagaacaaggagaaggcaatggcaccccactccagtactcttgcctggaaaatcccatggacggaagagcctggaaggctgcagtccatggggttgctgagggtcggacaccactgagcgacttcactttcacttttcacttacatgcattggagaaggaaatggtaacccactccagtgttctcgcctggagaatcccagggacgggggagcctggtgggctgccgtctatggggacgcacagagtcggacatgactgaagcaacttaccagcagcagcagcattcagaacaaagagagtcaatggaagttcagttagcttagtctgctggcttcagagatgtttgtcactaaattatctgggtagcatggcttcactttcaaggttgaggcttagaccgatgtctattctaaattttgtaaattctaggagcaataactgtttttttttttaaccagaaatatacagattatacataagataccttttgttttatacaactaaagtttctat

SEQ ID NO: 29381 - DNA, 795 bp, Bovine  19866880796529
  misc_feature (1)..(1): n is a, c, g, or t
nctgtgcaagcctcagggtccctgtacaatctgtggttcagcaatgctctgtcagattagacttctcacaaccttgatgagtggtacagctaataagaatagatgtgatttggaaaaataaagacacacaatattatattttgcatgcagagtgttgccatacttgtattggtatggaaccatattctagcagtaccttaacgccacataaaagaatggctaagagattagtggtttgtctttgcctgagatcaaagcatgcagcagcatgctagtgtcagcaagaactgattgttaaatttcagcaatcttgcaaatcagttgttaaacatggccactgttaataattatataaacttgcagctaaataaattatattaaccacaaaggtaatacacacaaaaactcatcacttcctaattagcttactattacctatagtcttgaggttactgtcagcctatccagcccatacagaacagtgtgcctctctctgcacatcttttttcaactgttttcaatgatgtcaccttagtggtttgaaatcagctagggtgggagttttcacatcatggaaatcaacaaatgctacaaatcagggcttgatttgttgttttttcaactgtccagacttaagacatagaaggtaataatgtggtatattccacattattaaaagtgtgtcgtgtctatagctgtgacattatgaataacatgaacaattaagaaaatagttttccaatattcaaaaagtagtatcaattagcaagggaagtcactcacatcactggctaa

SEQ ID NO: 29382 - DNA, 1560 bp, Bovine  19866880848446
  misc_feature (1)..(1): n is a, c, g, or t
ntgaattatactgacctacatttctgtctgatctgcttttattattggataattaaaacactgaccttagtatgtctgatctgcttttattatctcataattaaagcactgatcttagtataacccttgttttattcatccttatacacctgaggggcagacagtttctctttagattccctacataacttgcagtaagcaacagaatccaaaatataaataaggataaaataatgactaattaactctctcactcaggtaaggatacttgttgctgaaccaaagttgagattattttaatcattaaagtacctgtactaaaaagtgggccccattttgaaggaatgcatcatttcttattggcaattttatagtgacttgggttttctgttctggaaaaatgagactgcttctcttggatatatttaagatgccatctttcgctcgcaaagggtccacagctccagcaggaatataaagtgcagaataaaatatcttcacatctcctttagttcctcccagtcttgtaagactcaaggataaacatcgttcacctgggctactttcaatcttctggttttccacaggaaaaaatgttattaggccataaacatcatcactatcctgaatgtagaacaaaagctgcagataaaggaataaaacattaaagagcaaaattctcacatctgagatcaccaaactgtttattttctaggctattttgaattttaatgtgtaattctgtatcatatctaaaaatgattactcatataagtaacagagtaaaagaggaattgggcttcccaggtggctcagtcgtaaagaatctgcctgccgatgcaggagatgcacgttcgatccctgagctggaaagatcccaactgagttgagagcaggaaattgcaagccactccagtattcttgcctgggaaatcccacagacggaggagactggcaggctacggtctatggggtcgcaaaagagtcggacacaacttagcaactgaacaactacaaaaagaagatgaattaaaaatacatttgaaaactttgtggaattttttttaagaacaaactttttatttacagatgggacaaacctttcgcaagggaattaaccaccacttccaaaacccatgctcttcctttcgtatcaaactaaacatgtataagatgtgtatgatcaaattctttgtctgttcgagagcacagaagtatttctacaagcaaagcgtagcaagagatctacctccgctggttcgctcacttctgcacctcctcgtatcgtatgaggtagaatctgaagtaggtaagcttctgcctcttctggaagatcatcattaacgacaatgagaggaattgatgccaacatctgcccttgtgcaaaatgcagaactccagatcttggcctgatatctgtcgttactggtgagggatcactgctattgcgtgtcagcacccagttcacggaaacatttccatgagtgccaccatttctaaccactgtaatttcttcaaatcggaagaaatatgatatggtcacatatacactctttttcc

SEQ ID NO: 29383 - DNA, 770 bp, Bovine  19866880880446
  misc_feature (1)..(1): n is a, c, g, or t
nttagtaacacaacttgaaacgattcggcaatctctggtatggcatcatccactatttgaaatttcaggtgtgattcataaataaaaggtggaaaaacaatagttgtgtttggctggagatcaatgaagtctaaattttgctgggcatgtgctgttgaattcccagttatgataacataactgatagaaacttcacagtcatcagatccaatcagatttccactgtcatcttttccacgaaccactggaattgtgagtatgtggtcttcctcaggtaccaaataaacattctgaatgaatctcacaggactatcatttttcttaacgatgatctccactgagctcctggaggtattgatctcagctcctccttccacacttttcagttgaatcaaaaatatttcatcattttctggtacctgtcagagaaatacaagcaatggcaaaacatcaatagctaacacacctgcaaaacacaagtgtaaaaagtacttatatttcaatgcaattacacagcaattttaaaaaaatctttaactgaaaggagcagataaggagggttgttcactgtctatttactaaactattttccaaaggtaaataacatattttagataaagcaatgatacgaataagaaattaagtatcagcataatgactttcaaccttgatcaatctctagagaactaaagatctgacagaaaaacaagttcttattagtttcatcaggtgtgcaggatcagaagcaacattcgaggtctcatactatt

SEQ ID NO: 29384 - DNA, 1755 bp, Bovine  19866880954428
  misc_feature (1)..(1): n is a, c, g, or t
naatcgatgcttttgaactgtggtgttggagaagactcttgagagtcccttggactgcaaggagatccaaccagtccattctgaaggagatcagccctgggatctctttggaaggagtgatgctaaagctgaaactccaatactttggccacctcatgcgaagagttgactcattggaaaagactctgatgctgggagggattgggggcaggaggagaaggggacggcagaggatgagatggctggatggcatcaccgactcgatggacgtgagtctgagtgaactccgggagttggtgatggacagggaggcctggcatgctgtgattcacggggtcgcaaagagtcagacacaactgagcgactgaactgaactgaactattataatatatataattgtgttctgaaattttgactatggaatcaacatgtgaaatttaatcttctttcctttgattttcatcagaagagataatatatgcccatatgtgaaacacaccaactattgcagagttgaaaatttctgttgtgaaagattttgggagtgtggacctgcatcttaggaggtactttaagccacaggacttaatttttatttagatgcctcatatttttcactctaggggtaagatcttcgaaatagataccccagctttatcttattttatgacccacagaattttccatgtactagatactcaaaaacttttcaaagaatagtatacaaccttattttgttgaagaaaggtaaaaatatttggaagactatcccaatttaggtaaagccaatcactggacccatctttcacttcacttatttccccttcaagcaacgttctgagatttaggaagcagaggaactcctggtggagctccaagcattgaaccacaagactgggcctgaaacgctggaggaagcactcaagcctgtctgtccactgcctgcgtggaacctaagtgcacttcttggtgggcattcagctatgacatatgaacttaatgaatgaatcaaaggtggttaggagagaatttaaactgcagaaaaccatccttacagaaagagggctggttagaatctggatttttattaagatttaagatatgctcaatagctctgctgattcagtcaggatttatttctcagtgccgggtctcttgtgtgtgttagtcactcagttgtgtccgactctttgcgactccatggactgtatgtagcccaccaggctcctctgtccatgggattctccaagcaagaatactggagtgggttgccgttcccttctccaggggatcttcctgacccagggatcaaactgggatctctcacactagaggcagattctttgtcattgagccaccagggaagcccggatccttcttgagccctaacgtaaggggggtgatgttgataaaaatgctgagacaacaggcaaaaccaggaatttttaacaaaccagggctgtcccaggcaaaccaagatctaaagtttcttcaactattgcccaactgtaaatccaaccttcagctctttttcccaacaaaatgcttacatatggaaacatgtccttacataattaacgggttggggaaaaataaaccctctctagaaattgtagttttaagaaagtttatatccaagatagagtggtgatttctgagtgttaagatttggggatgaggagtggcttctctgtgttttatttccttttcccccttctgcaataaatattaacaatgaatgggctgctttaaat

SEQ ID NO: 29385 - DNA, 1327 bp, Bovine  19866880961776
  misc_feature (1)..(1): n is a, c, g, or t
natgtttccgtggcttggcagctctttcagaatgattctgctttgcaacctggacaagagttctatgaaacttcagggactgttaactttttggatggagaaggagccaaaccaataattctccatgcttttccagacaaaattcctgaattcaacgagttttatattttaaagcttgtaaacatttcaggtgcagtgttttcccatctattttattttaccactgaagtttaatattttatgctgaaatagctagagctaggtagaaaatgcacctaatgaagttttatggatggaaacttatttccattctcaaacttgtaaataaaattttttcctcacaccaaatagagtatctcaaacaaaacagtaataggtgataggaagtacagattcatggtagcttaaaaagcttggcctttgtaccttaatttaaataataatgtccccatcaattttggttttaagcatgagaattaagtctttctatttaatatcctcttttcagctggttgttaatgaaattatagtgaataccttgaacatgtggtgaaagctgtatggtgacaccatgttcattgatcaacaagtaaagtacttaatgagaagtttggtaaacaaattccttttgccttcactttatactggaaagtgttttcaattctgagttttcattctgatttcattacaggtgggtccccaggtcctgggggccagctggcagcaaccaacctccaggtgacagtaatgattccattcaatgatgatccctttggagttttcatcttggatccggagtgcctagagagagaagtggcagaagatgtcctctcggaagatgctatgtcttatatcaccaactttaccattctgagacagcagggtgcctttggtgatgtacgagtaggctgggaaatattgtctagtgaattcactgctggtttgcctccggtgacagattttttgctggctggaatttttcccagctccgtgcatttgcagccacacatgaggcgtcaccacagtgggacagatgcattgtacttcagtggactagagggtgcatttggaactgttaatccaaaataccatccctcgaggaacaactcaattgccaacttcacattttcagcttgggtaatgcccaatcccaatacgaaatgggatttgttatagcaaaggatgatggtaatggaggcatctactatggggtaaaaattcacacaaatgaatcccacttgacactttccctccattacaaaactctgggttccaatgctacgtatgttgccaagaccactgtcatgaagtatttggaaaaaaatgt

SEQ ID NO: 29386 - DNA, 982 bp, Bovine  19866880992967
  misc_feature (1)..(1): n is a, c, g, or t
nggaagaccatatagtatatactatatcaaccacagtggtttttttgtgtaaaaacattacatcagggaagagaggtaaacatgtgtatatccaaagagaacatacttggatcaatttggaaaattctatgcaagagttttcctctgaaaacagtagcaaatgattccttatacttttaaaacttcattaagcagttataaaaggtaaagacccttttgacccaggtataagacagctactcccagaaatcagggacaaaattatgttcctggtctaaatgactcaaataaatgtcttcgcagtatgatgtacttttaaattagatatgtactttactaacagttacatttggttaagtatgtatgttccatagtctagagactaatttttaaaagggtgaagtataccctacactatcattttttttcaataaaagtggatacttattagttcacttaatcttacttagttaaatctttaaaatgagctttaatttcatttttaaactcaaacagataaaagcatgtgatataatcatgaaagtgaaaaaaattcagtacttctgaggtaaaatgtcaaatcatttattatataacttcaagcagctttcttttgaaaaattaaataaacccgtctaaaatgcctcttacaattataggcacatgtggtattactatataagacttcctttttgattcttatccaattctaagtcttttagaaagaggaaaagggtatgcatttttaatactaatggaatgagatgacactataggaatttctcatgttttaatgatgttgttttgagaactcaaggatgatatcgatctctctaatttcaacattcaagggcagaaactgaaaatcaatatagttctactgtgctaaataactactcaggaatgtattctcttcctatgaaaccacttctcactttcagtctgagattgccaagctttttccaactacaatttctcctct

SEQ ID NO: 29387 - DNA, 1601 bp, Bovine  19866881040529
  misc_feature (1)..(1): n is a, c, g, or t
ncactttttctaacaatcccctgagatgattccagagctgaagatggagctgggtgtgcagtagtgtttctcaactttgcctgcacactgggaattatctagggttttaaaaatactgatatctgggttctgttaccagaagttgatcatttaattggtctgaggtgtggcctttgtctcaggatttctaaaaagccttccaaatgattctaatgtttagccaagctggaaactactggctacaagcaaaagtcaagagccctcagctgtttgtagaggagagatatgcaggccaagcttgtacatttcaacgagctaggaaaaatactagaagactcataggcttttttttttttttttttggacaagtcaaccatttgcttttacagtttaacctcttagaaaatatgccagaagtaaacaggtgtacgattaaccttgcaaatcaaaaggttccgtgattttagattctaagcgctagctgtgtgtgaccaaaggcaaggttttagaactggatctcccaaattgctcattactattccatgcttggttaaaacttacatcatcctgcaatggaatgtgacccaagtcaaagacaaaataaaaacagttgcattgctttcatgattagtaatgatattagagagaggttaaggtgtctcaaaacagcttgtacttttcccaacctattcaagacctgattcatctacagtttagtaaccttgatacttccagatgatattgcaaatgtgtaatttctggatgtgtaactctagatgtgtaatgtgcttggactaaatccaaatctggaaactcattttttatttaacgtatattcttaataaaaagcaaatacaggcccctactcccaacttccattatccgaattcttgtccacagctccctaatagaaagcaatgaactatgaaacaagtacacatttgtctgtggtgacaatacatcctggtttaccctgacagtctgggtttatgcctattgtttaagcataattattaatagcaccctctcttcgaaatgtttccatctgggtgataaattatctgggcaccttacatatagctcactcaatcagcattccctctacaagtattgtagggaaacctcatgattggagtgtggtcactttatatttagaatgctcccacagctacacatgaaagtcagtgtattgaaatatcaaccagctgatcaacatcccttccttaaaaacaaaataatagagatttcgtaaagtatttctgtttaactccatcaacacagaggccccactaaacaaaagtaaaaaccctgtacttttccagcttaaaacctgcattctttatctgtttctgctagaaactaacaatgtggccttgaacaagacatttggttttttgtgatcaggtttttctcctttgcaaaagagtagattagagtaagtggtctctctcatctttttgaataacaattctgaaagtctatattgctactttctctaggcattttacttaaccagtgctttgccagttctatccttctgcactgtctgtttgaaactaagctcatagatatctaagaccaaatctaccgaattcactttt

SEQ ID NO: 29388 - DNA, 793 bp, Bovine  19866881064992
  misc_feature (1)..(1): n is a, c, g, or t
ntatttgttttatgctgtacagtttagctttgctttttaattgtttggtgggaggttggagaacaccataaaccttccataattaggacttctcaaagagttataaaacaataattctatgaggtaggaattactgtccccataaggcagatttggaaacaaaacttggcgagagtcaataacttgattaaggttacaaaggtaatgacggagccagaattcaaacccagatgcaggtctctaattgttccaactagttctattaaccaaacagttctgttttcttctccttcaaaagtgaagtgaagtcgctcagtcatgtccgactctttgtgaccccacggcaggctcctccatccatgggattttcgaggcaagaaaactggagtgggttgccatttccttctccattctccttcagaactaactatagtatcatacctgggaaaaggtccctgccttgagtctgtacagtgttctctcttaatagtatctcctcactttcctccaaaatttccagatggtagaaatcctacattctccttattgaacaagaaaaaagaatatgcaagggcctgaacgcatctgtttacataaaaaagttcacaagcatactcagaaacacataggagactatttctcatgaaagactgaacgttatgaccatgtagaaatcattttcaaaggaagcatattttagttgacctattgaactagtgacattaatagtgcttaagtggatccagttctcacattagcctctttatcaagcaaatcagcactgggcagtaga

SEQ ID NO: 29389 - DNA, 2548 bp, Bovine  19866881180537
  misc_feature (1)..(1): n is a, c, g, or t
natttgagaattgggtatttaaaaacttaactatccattaggaggtagttttaaggatagagaaaagaggaagttatttaactgcatttaatcttgaggttggagaaagcaatggcacctcactccagtactcttgcctggcaaatcccatggatggaggagcctggtgggctgcagtccatggggtcgctaagagttggacacaactgagcgacttcagtttcacttttcactttcatgcattggagaaggaaatggcaacccactccagtgttcttgcctggagaatcccagggacgggggagcctgatgggctgccatctatggggttgcacagagtcgaacacgactgaagtgacttagcagcagcagcaatattgaggttcttcgtcagttttactggtttccttcaatctgattactccagtccaaacaccactggcccaggaagacttgctcatttagttggaagatctccttaaactcttatcttatcttttctaaaatcaattgagtagttgatgcatcatgaaaagatcatgcttttgctgtagacaatcacttttattttgaataatatgcaattcagtaatcatggtgttgggagttaccataagtgataatggattctaataagcattacagtccagttggtatgtcaaaaaattaacagctttcttacagccacgaagtaaactgttttatttcatccacagttgggccagagctgtgcctttggacatcgtaagacatgtctaccaccttggacattaaaacaaatgttacactacttcagcatgatacattttgggtttttgccagtcacactgtcgagaactatctgttaaatcaggataatttaatatgaataaaatgtcagtgttggaaaagcagacttttaaaaataagaccctacacattagcgaacaatctctgtcctatttccatttctaaagttatgtatgtcaggcattaaatttctgcttctagacccataaatgcgaagcaccctagaagaccacgtgtgtttctttccttttacatggcattcctagtactgaaagcattcactgttttgctccaactctttattgagatccttaaaacttgatttctgggtttttttcccttcccaagagaacaaacaagctatagtttgaaccaatggtaacccccaagcatttttattaatctgtagtcagcaaaggtctggggccttctatggttactttatccagagtccagtgtttatctgtaatttcctgttcgccatctgggaaaaccagatgtaactcttttgagaagaagcactaaagtcccatctctgcttcattatttcagatgtaatcaaagaagcaaacctgtggagtgttgtcgattcttaatacagtagagttgtctatagcctggacaaaattccatctgtgttattcttcttctagaggcatttctgttccagatatagttacattaagtattatgttggttcaagctgacaaatcttaattttataaattaaaaccaatatcttacatcttgatggcagtactctttgaagctctggaaattcttgctacaactgtttaaggaggcttcactcaatacccatcccccacagccccattgtttggagagggagtgttgtgcggtggttagacaagggccactggagccaaagcaaacagtttgggttgaaacactgaatctgcctcctcctggtgtttaacctggaacaagttatttaacttttctgtgccttgattcctctatcttgtaaatggagatgataatactagcacttactcttaagactgttgtgagaattaaatgttattccactcattctacccttctcttactgagatgagtacctagcatttagtaaataacactttatgtgttacatatttttatggctgttcctgtctcaaaacctttgcttgatgttccttctggctgaatgttcttctttcagatgttcatatggcatgctcttttacttcaaatatcgcacttcagagaagcctttcctgaccatctttttcactctttatttactgctttatttattagagccctgatcaccacccagtattatattttacatttatttcatctttctgactctttgtttctttaaaaaatgacataatctcaggaaggattttgtgtaattctatattgcttgagtctagaatggatgtggtatataatatatagtagggttcagttcagtttagtcactcagtcgtgtcagactctttgcgaccccacgaatcgcagcacgccaggcctccctgtccatccccaactctcggagttcactcagactcaccgtccgttgagtcggtgatgccatccagccatctcatcctctgtcatccccttctcctcctgcccccaatccctcccagcatcagagtcttttccaatgagtcaacccttctcatgaggtggcccaaagtacctggagtttcagcttcagcatcattccttccaaagaaatcccaggggctgatccccttcagaatggactgggttggatctc

SEQ ID NO: 29390 - DNA, 924 bp, Bovine  19866881230193
  misc_feature (1)..(1): n is a, c, g, or t
ngcttgagttgaaaaatgcttggagaagcagctcccaaaggttctgagtctttacttgaatactaatatcttagggacaaaactggcaccagcaatgaaacctgcagagccctaaagagagagagattgcaaggaaggcccaaggagcaggagaaatcacagaactgtaacttttggcttcagagatgaaagctgagtctaacctccttcctgttcttgataaagagaccattcagtgaccttttcccaccgttaaaagtgcccagctccaaagtgcgaatatggtttcctacaaacctgcagcatttgtccttcctctgaagacatcgtcgtatgctttccactgtggtttcacctggtaggcgtggatgaacaccacgaacaccaccacgaggcacattaatgggacgagagctgcagtgaacagagctgcgtagatgtttgggatgaaacacctggaagagaccagagaagagataactcggcttcaacacccacatttctaaatgcacggtgcactacaacgctttatactcgctctttgtatctcagggctggcaacagcagctttttggtttgccaaattggggttctgtttgagtagcggctacatgactaaatctagcccactgcttcacaaagtgggttccatggaacatgcataacctgaggtgctcagaaaacctcaaaaaaggttacggccaagtaagtttgagaaattgggggagtggaagggagattcaagagggcggggatatatggatacatacagctgattcatgtcattgtacagcagaaactaaaacattgtaaagcaatatactccaataataaaataaaaaactatcaaaaaagattctactccatttatagttgttataaaatattggcaatattccctgtagcttactttatacctaatag

SEQ ID NO: 29391 - DNA, 1087 bp, Bovine  19866881353802
  misc_feature (1)..(1): n is a, c, g, or t
ntcgttgcactctgccacttccataggagaatatgtttatctttacccagcctctggcaagcatatcactccaccctgtgtagccaaagggaaagaatagtcctgaataaaaaataaggttcaatcattcaacagacatacactccttctgtttcagtcatctatttgtcatgatgagaaaccacaaaactatacttgcataggaagtacaaaaacaaaataaagaatgggggaagaaaaacctgagcaatcatcacatatttttcctttgtgggaacattcctcagtctgtgtttcaagaaggtttttttgttaaggatttttttgtagatttcccaatatgtaaccttataatgatgtaacctgcatctctataaattatatagcatgtgtcagaatcaaatgctcttaaaatattataaaaggttgctaaatatattttgcacattccttcctaactctatgttatacagtaattgatacacagcccacaaaacatctaaaaatacttttacagcaaaataaatgcctgcaatttctttctactctatggtaaatgtggaccacaaaaaccaatgtagaaattcaaaagtacaattcaggaagtgaaggaaaggaaagacaaaatagcagtctccacaactcagcatttacttcatctctgcctaagtaccaatccaagcatagttcaaagagttagagtccattagaatcatgcccttttttccccagtgatatagaaatgtttttctctccagtcaggaaaatgaacttaaattaagccaatatgaagaagcagcgcacaatttgtgatcacactgtcgcgtgtctgtcccacatgtagtctccctttgatcttcctaacagaaggatggttttccttaggtatctatgtctcccttccatgactcaggaaaggatcccctgacttctcaccctctctaagtgtacttctccacttctccagtaaacagaaaattgtgtacctctcaaggctgtttttggtctaagataggaggaatcctaatgtacacagattagactggcggcaacagctgattccatacttgaggccaggggtctcact

SEQ ID NO: 29392 - DNA, 1451 bp, Bovine  19866881429387
  misc_feature (1)..(1): n is a, c, g, or t
ncagacatataatcaatccaaattcaatgcttcaaagttcattccagcaatattccagttcgaaaataaatataaaaaatgaattcacttgttatttttatctttacattataaaatattcattattatcaaatattagaggtttccctggtggctcagtggtaaagaatccacctgcaaagcaggagatgctggagacatagctttaatccctaggttgggaagatcccctggagaaggaaatgacaactaactccagtattcttgcctggaaaattccacagacagaagagcctggtggactacagtgttgcaaagacccagacctaactgagtgactgagcacacatattaaatattagggtgagtgggagtattagagtacttacatcttaatattctaaaagtatattttttaaagattttacctttaagagcatcacatttttatcttttatcttcattttcctttattatcatatcatactcattgaagcctagactcaccggcaaaatggcaactttgacataagtttcttttatgttttctttcattattatcattgtttcttgtagcacatagtctttattctcagtggcttgattattgatgtgcagtaagaaattgggtttagctaccaactgaatggctatgtctccaagtaatcctttatcgcgaacgatttgtaactgaagagcggtgacgttctctacgagacagacgtgccttaagtaagtaaacttttctaacagctgttgatgctattctaagcacttagggtggagtgttctgactatctcttctagacaggtaaagaaagacagataaacaaaggcaatgtatactcccaaggaatacttcgtgcttttcccaaccagtcaccagagctgtgctgaattcaccatacactgcccgcattagttcccagttttaaaccctcacttctgggtctccctcactctcctacgctgcacatggcatgcccattaacagaactgctgaaaatactaagaaagtgcgtacctggaggatgagcagaggggctaatgacaaatgctaagaagattcttcaaaaacgaaaaattaaacacacacagtcatttaatgactcattattaaaagagcaagtttgttctttggctatcacagagctcaaagtatctcacaacacctatttcacttcttagatttttaaaatttaatttgctaaaaatgaaaaaaaaaaaaaaaaaaaaagcatgtcaatcttccctaccagtctgttagtttctaatgaccgaataccatgtctgcttccaaaacatgtagcgtgatttttggtacttactaggtgctatggttgctgaatggataacagatcgttttactttaaggctactattttctgttcccatatatacagacatataaagacctacgtgaataattacatgtcatttttctccatcag

SEQ ID NO: 29393 - DNA, 964 bp, Bovine  19866881524803
  misc_feature (1)..(1): n is a, c, g, or t
nttaacgaacttttcctcaaaattaatactccaaagaatctcttcttaaataaccctgcttcctccataggcaatacagagagaatacaaagactttaaaaaatcttcccagtaaggtttttcctgtttctttactaaatctgaaaaaaaaaactccattcatttctcaaatgaaattaaaaaatttcatttaagcttatgaaagcttctagttagaatgctaatttgagaagatatccaaccctatggcaatattttacacagcatctcaacacactgttacacagtaataaaatcctgctcaaggcgatcaaacattcctacagaaagcgctttgattttaaaatatgcgtataatttcttcacaaaagacaatgctttttaaaaaaaataaagaaaatgccatttcaaaaaagaagcctctctctggtttcacaccgtctattaacaaggattggtaaaatgaggatttaatatagccagaaaatattcaagaaattgtcagcatcttcttcagtcccgtcttggaatgaggttgcccagacacaagaggcctgtactgagggacttgactgagtggactgaagaaacccaggattctgtctattggcaaggatcacaccacagtgatgtgatagctttgaagcaattatgaaacaagtttcacaaacagaggtctatgcttaggcagttgaggaacacaatagactccccaactgcagcatgacctggggggagaaggatgaggctgagcggcgagcatgtgggttcctgccccaggagctacggttccatcctctaaacttgtataagacccagagaagcccatgggagtcttctgtttcctctcccgcataatgacaggttcacaggaagcaccgactgtgtggcgggaacttttctggttccgggaaagctgcaaagaaagtggtgtgcgcgctctatgctcttgcaggtatgcatg

SEQ ID NO: 29394 - DNA, 1214 bp, Bovine  19866881613160
  misc_feature (1)..(1): n is a, c, g, or t
ntggagagatgagtgccagcaaaataggcttgtaatgctagtttaaatagttgtaaatagtttgtatccctattaataagtaagtaagtaagtgttaattgctcagtcttgtctgattctttgtgaccctatggactataacctgccaggctcctctgtccatggaatttcccaggcaagaatactggagtgggatgctatttcctactccaggggaacttatcgactcggggactgaacctgagtctcctgccttgcaggtggattctttactatctgagccaccagggaagtcctgtgtcctattactagagaataaattctgaggtggggaacaaagggaaatgacattcaagaaacagacagaagcctatcagaaaggactccaggtgccttttagcaaattcagttttgaatcttcagataatggagacacaggagagagctgctctgatttgtatctctgtctttctactcctgttttgactgaatcattgttaaataatacattcagaatttaagcaagggaaagtagcattcctagcaaaaattttgtagaggaagatatttaatgtttatagattttatatatggtacctaggacttaacttttcagagagagagagagagagagtgagtgtgtaatcagtgtttcattaagaatgtaggttccaggacgggacagtttggttacatgatttattagcttaagttttagtagtggtttactttttctttttcctaaaaatcttctctttctcatgtgaaaggcatttgattgatttgtcgggtcatatgttgttgcttatttaagatatggtcagtattaaaaggtaatctaacctttgatattcttactgcacagtgataactaaaatataaataaaatcctctttctttaaaattttagatttcattttctgaaggccaggcactgtctacaattactctgactgttcttgctgatgatctaccagaattgtcagagattgtcattgtaacactcatccgtattatcacagaaggggttgaggacccatcaaaaggtgctactattgatcagaaaagaaacaagtctgtgataaccactctgcccaatgactcaccttatggcttggttggctggcatgctgagtctctcttcattaaagtagcggagcctaaaggtaaatcttgttagatattttcaggttctcataagttttatgaatatt

SEQ ID NO: 29395 - DNA, 664 bp, Bovine  19866881884155
  misc_feature (1)..(1): n is a, c, g, or t
ntgggatacactgaacatgttataaagccagttttatgaacgtaaaaattatccatgtaattaaatgttcttaattttgatgcaagtaaggctttttctgccacattttttgaatatctgcagacttttctgttaaatttaaccagtcccctgctgttgggtcatttaggaagctttcatattttactttatgaacactactaaagtaaacatctttatttaaaaaaaaaaaaaatcatacagctaaggagtatgaaaaccctggcatgcaaccctaccaatgctgcgcattataattttagctttaaaaagtccttagctgtcatacaagtaggaaataacatcctcatgttttaacagacattttatgaattataaaagcaaacagtaaccttcattgtaactactgattatttggtcacatttttccaaaaaaatactttttaatttccaaaaacgtcgggctctctcaccttttactggagatatttctacctcatcaactgagagcagctgaatggtgaaacgcctgtcctcctccaacgtggcgtcctgaagtgtgtgcagcacaatggtcttctgggactcagtctacaccaaatgagaggagaacacgtgttttcagagtggccaaacttaaattttgaatgttctcatcagcaga

SEQ ID NO: 29396 - DNA, 843 bp, Bovine  19866882053369
  misc_feature (1)..(1): n is a, c, g, or t
nattgactgtgctctacaacagaagatgatttaaaacaactacagaaatacaaatagtacgaaacacatactgtcaataagaacagttaagatagaaagttgaatgcttctaatatagcagtttgataaatattttttacggaatcacatctcttgttcaaatatttgcctacaaaagatatatgctgtctctaagaaaaggaaatattttaaatctattgaacatgacataatgattctgatgctgcagagctgtgtgaagtgaaccatctaacacagatttataaagagtgcatttatacacagcatgcgataaaaacctactctcccatatttctcaattctgcccattacatttgaaagaaagtaatatttaccactgggcatctatccaattgccttaggacaaaaatgtagaagtaggactttacagaattcaatatattgttaaacaccagggcaattcctccccatgaactgaaaatgtatcctaaagccagaagttcagcacagtccacattttaaaactaatcacataaatgaaactccaacactaggtcaaaagcaatgttaacactgcccaaagcacacatggtatttttataatttcatttccttagcagttatctttgaagaatcaccctgaagttttcatttttgtaaacttctgtgtgatatatatttctctatgcaattttgcagtaacataaagaatacacacacaaaatgctgaattcttgaggctgaacataatgctttgaaaaaaaagaaaattaacttagactctaagaaaaggttcaggaggaaagggaaagaaaagtaactaaaaaaaaatagaaattt

SEQ ID NO: 29397 - DNA, 728 bp, Bovine  19866882136263
  misc_feature (1)..(1): n is a, c, g, or t
ncgagaattcctatcagtgagggtggaaaagagaagatgaagagtaacagtgaagtagcactaacttagtacccaagagctgcttttacatagctatctttcaccaatcatcttctttccaaatatcagaaagaatacctaaatgcaagctcaaaaacactgtgtgaacaagagataaaaagacatttgtttctagggctatattagctgtttcatagcagtgaaacatttaagttccaagggcaattaacgttccaagagagtgaggagtaagcaaagagggacgagagtgctcatcatctgcagaatgacacagctgccaccaacactgggcgggcaggaggccgagagggcttgccccagatacgaagccagcgttttctgtttgcttaaaggagatctagtcatgcaagcacatgtacaaaaacaaaccccctcctgaagtcttagaaatcctttgagttcctaaggaagtagctccctcatcaatctctgttaatccttctattatatcatcagaattttcccattttcctcacaaaacacagtttcctccaagaagtttagtgcagtttttcttggtgctattacctcaggaaagaagagttgaccagtagagttagcaaaattgaattctaggttttgcccaataattttccagttaacagtaacatttcctcgaccagggggtgttcttatcacatggaactgtaagatttctcctgcaa

SEQ ID NO: 29398 - DNA, 2625 bp, Bovine  19866880142362
  misc_feature (1)..(1): n is a, c, g, or t
nctgtgggcggaatcccgtagaagaaatggagtagccatcatggtcaacaaaagagtttgaagtgcagtacttggatgcaatctcaaaaatgacagaatggtctctgttcatttccaaggcaaaccattcaatatcacggtgatccaagcctatgccccaaccagtaactctgaagaagctgaagttgaacagttctatgaagacctacaagaccttctagaactaacacccaaaaaagatgtccttttcattataggggactggaaggcaaaagtaggaagtcaagaaacacctggagtaagaggcaaatttggccttggagtatggaatgaagcagggcaaaggctaatagaattttgccaagagaattcactggtcatagcaaacaccctcttccaataacacaagagaagactctacacatggacatcaccagatggtcaacaccgaaatcagattgattatttgcaaccaaagatggagaagctctatacagtcagcaaaaacaagaccgggagctgactgtggctcagatcatgaactccttattgccaaattcagacttaaattgaagaaagtagggaaaaccactagaccattcaggtatgacctaaatcaaatcccttatgactatacagtggaagtgagaaatagatttaagggactagatctgatagacagagtgcctaaagaactatggatggagggtcatgacattgtacagtagacagggattaagatcatcccctagagaaggaaatggtaatccgctccagtattcttgcctggaaaatcccatggctagaaaagcctggcaggctacagagcgtggggtcacaaagagtcagacacgactgagctactatacaaagatggctctggagcctaaagtgtcatttaatttagtccctgtctttcaatttccaaagttcctagaagaatttgagtggccttgcctgagtcaattgcccactcttggtttagttaccaaggggatggatcatatgtttttagggcggcttagcaaatatgttcttcaaaaatgtggtgtgagcgagagagaatgatggatatatcaagaatgtgaagtttctaaaaatctggttttgaagggagagacttctgtttcaattaactgtcatgagaacatataaaataaaaatgataaaaattcattctcatcctttgtacgtaatactactttcgtttttttattgctaaaatacgtctttatctctgaatgtgctatttctccaccacaaattatctttagaggataattttgtgaaccctgaccttgtaggtcctaagttggaagccaaataacaaagataaattcttcaaacactttctcattgcttctggtagtttcactttgtaatgatcatttggcctaaattaaaatgaagttaaagatagtggaaattaaactccagggaaaagattgaaaaagctaaggatactttttgaagcttaagaagatgaaagagatcataagcagtcttgaacctttctttgataatttactcatttaaaaatctgcttttttcaaaaataacacatgattttattgaagaattaactttgggaagttgtggataatcttacgtcttaaagattaaaataaagactgtctaaaaatgactataaatttgaacaactaaaaaaaatccttaaatggtgttattttaatttaattgtaaaaaatgtataatgttaatagcctcttaccaagagcttggcttcagttcagccccagatagcccatctatggccttccccggtagctcagctggtaaaaaatctacctgcaatgcaggagacccctggttcaattcctgggtcaggaagatctgctgggtgaagagataagctacccactccagtattcttgtgtttcccttgtggctcagctggtaaagaatctgcctgcaatgcgggagacctgggttgggaaaatctcctggagaacagaaaggctacccaatccagtattctggcctggagaattccaaggactgtgtagtccatggggtcacaaagagtcagacacgactgagcgactttcattttcactttaaatgcaccttagtgcagttagtttagtttaacttactaccatttactgttctttctttgtcaacatctattccaagccagttttgcccccaaatttgagggaaggtgattcaaggagatccaaccagtccatcctaaaggagatcagtcctgggtattcattggaaggactgatgctaaagctgaaactccaatactttgaccacctcctgcgaagagttgactcattggaaaagaccctgatgctgggaggaattgggggcaggaggagaaggggacgacagaggatgagatggctggatggcatcaccgactcgatggacatgagtttgagtgaactccgggagttggtgatggacagggaggcttggcgtgctgtgattcatggggtcgcaaagagttggacacgactgagcgactgaactgaactgaactgattataaaacttgatttaaatggcagatcattatttgtaagcataggacccaggtgaactctaaaaccagtttctgtgacttacagtaacagtatcgcaagtaaattaa

SEQ ID NO: 29399 - DNA, 3156 bp, Bovine  19866880166521
  misc_feature (1)..(1): n is a, c, g, or t
nctatggtttttccagtagtcatgtatggatgtgagaattggactataaagaaagctgggcgccaaagaattgatgcttttgaactgtggtgttggagaagactcttgagagtcccttggactgcaaggagatccaagcagtccatcctaaaggagatcagtcctgggggttcattgggaggactgatgttgaagctgaaactccaatactttggccacctgatgcaaaaagctgactcatttgaaaagatcttgatgctgggaaagattgagggcaggaagagaaggagacgacagaggatgagatggtttgatggcatcaccaactcaatggacatgggtttgggtggactccgggagttggtgatggacagggagggttggcatgctgcagttcatgggattgcaaagagtcggacacgactgagcgactgaactgaactaaatggaaagacaccttcagttgtaataatataggaaagagggtgctattggcatcgagtagatagaagctaaggatgatgctaacctatacagcacacaattgctcctgcaacagagaattatctggctacaagtatttgaaagtgatgaggttgaaagattatgcacaaaatacgtggggtctgggtgtggggaatctgtttagtttgacatcctccaaaactcccaacaaagtgatttgatagatagtagctcctaattctttaggaataaaaagtggtacccttaggatctagaaaagggataagttttaattaggaaaagcaataagaaatattagctaatttcagtggggaaatcataacctaaacttctttggtacaagtatggtaaattaagttagtattttatgttccattgttgtgttttcttcattataatatttatcatataagtctaccaacttacataactcattgggaaagcaagggattaattagacaatttcaagatgcataaatacattaatattaaaatatatacggtgatggggaatacattgagacataaatcaaagataatatagcagaacaaacttacttgtggaaaataggcttacaatgcttagaaattgttttcatatctaataatgtgacagagtcctggcacaatcctcctattcattatagggctattaatttcatcctatgtaacttgtgtgaacttgctttagtgcgtttgtgagaataatgtgaagggtcagtagaggtcactgccaaggcaatgacttggcacatccacagcttttgaaatggctcctgtgcatacagcaaagaccaacatctggcaaaggaaggggctcaggatgtactaacaggggtctgcacacagacatgcatttcaggatcaggttaattgggagccccagccaagtccagactctccgcccgccttagacagtgcattttcctccccagctatccaatggagattttactcaaaagcataaatccttaaaattccagccttagaagtatactgagagttgatctaactgaccctttcattttacagagagtgaaactgaggcagaattgttgatgtgagttaccaaaggcagagagctgactagcagatgccctggtttggatgccttctgactccactaaagtaagtaagcattagtcactcagttgtgtctgactgtttgcaatcccatgaactgtacccatcaggctcctctgtccatggaattcttcaggcaagaatatgggagtgagttgccatttccttcttcaggggctcgaacctgggtcttccgcattacaggcagattctttaccatctgagtcatcaatataattattataacgctatacatagtgtacagttgtatataagctatgtgtgtacataatttattccataatatggattcaattatctcaagtaatctttcccttgtctttcaaaccctatgtaaaatatatctacaagtattattaaagagagttatctgaacctgaaagcaccaccctgtgcccagagtatgtgtaccaagaaagcaatcctcttagaatggagcccagtgtgaaaaacaatcgagtagaagatgtactgttaagtgcaaaatgaacagcttgaaaacagaagaatcaagatcatgagacggcaagcaacagatatttccttgaaaatatttggatgtatagttggatgaaaatactggcaaaacactgttaacttaaaaaaaattcacaatgtgagagttgtgaattaagttttatttgggggcaaaatgaggactatagccctgaaggtagcatctcagatagctctgaaaaactgctccaaagaggtagtgggggaaggtcagtataaatgtgattttggtaagggccaatacatgcaaaatgtcaatccactccagtactattgcctggaaaatcccatggacagaggagcttggcaggctacagtccatgcggccgcaaagagtcggacacaactgagtgacttcacttcacgtaacttcaatacatgcaatcaagatcatattttttgcagaagatttctgttagtcacgaggagcagttgtcactatgaagacttttggtacttttctagatatgaggagatacaactattgggctcataaaatcggctcctgaaaatatctatttgaagacctattctgccagtttttcccagagtacagaatgcctcatttctgctctccaccccaaactcctttcaggggatgttgaaaatcagcagctgcagcaacacatgacctaatccttgtagcggtaagtggctagcagccatggcaagtgccagtttgacaagagactattagccaaaatatacaatgagctcttaacatataagaaagctaagagcttgattaaatgatggtccaaagacctaaacagacatgtcaccaaagaagatacacacatggcaagtaactatctgaaaaaatgctccacatcatgtcgtcaaagaaatgacattaaaagattaaatgacatttaaaagattaaaacaacaatgagataccactactgtgtaggaaaaactcagttcttctgtaaatctctttcatcttttactctcatgctaccaccacactcacaacacttctatcaccagatatgtgagggttttcccccaccaaaaatcctctgcaacaccagctgagcactgaca

SEQ ID NO: 29400 - DNA, 2168 bp, Bovine  19866880216573
  misc_feature (1)..(1): n is a, c, g, or t
nagcataggggagaaggcaatggcaacccactccagtactcttgcctggaaaatcccatggatggaggggcctggtgggctgcagtccatggggtcgtgaagagttggacatgactgagcgacctcactttcacttttcactttcatgcattggagaaggaaatggcaacccactccagtgttcttgcctggagaatcccagggatggggggagcctggtgggctgccgtctatggggtcgcacagagtcggacacgactgaggtgacttaacagcagcagcagcagttgagcaatagaaagtattataaacacccatgaactcaaaagcactttctcacaaaagcatcatatctaatatagaaaaagaataaggcatgatagctttcagccattgtggtgctttgtgaaaacatagctggctcaatgttaattaaaatctgaatttactgccaatgttgcaaaagtataaaaatttgtaacaaataaataaaactatggccacaaatataaatgaggaatttatagaatatagttgttgccaaaaatatccatagcaggtataatgtttatgtttggagtaaagaaaagaagggaaaataaaatatcttgtctctcaggtctctgggtcaaaatttaaaacatgacttgagaaatgtttcataattatactgtcaactatactgtcaatatgaaaaggattgatatctatatcaagacaaaaaacttttaaaactcataaataagaaaacaactcgattttaaagacagcaagacatttgaacagacccttcaccaaagaaggtaaacagcaaacaatcacaaagaaagatgtcatgtgtcattcagttcagttcagtcgctcagtcgtgtccgactctttgcaaccccatgaattgcagcacgccaggcctccctgtcccttgccaactcccagagttcactcaaactcatgtccatcgagttggtgatgccttccagccatctcatcctctgtcatccccttctcctcctgcccccaatccctcccagcatcagagtcttttccagtgagtcaactcttcacatcccaaggatggaggagcctggtaggctgccatctacggggtcacacacagtcggacacgactgaagcgacttagcagcagcagcagcagcagcagcagcaagtctttgcatgaggtggccaaagtattggagtttcggctttagcatcattccttccaaagaacacccaggactgatctcctttagaatggactggttggatctccttgcagtccaatggactctcaggagtcttctccagggcagtagaggttaaaagggctctgaggataattgaatgtagaaagtagcgtactttttgttttcttgaagttttcatgggtccctgtgggagagtgatattgttgtcctaacttttattaaatatttgtcttgctaatatatttgctgatgacattcttaaatatgatgtttgtgctctatggatatggataagtagattaatgacattaaatattgtagtcataattgaagtgttgtgctatacctcaaaataagaattttaggaacctactaaaatttagcaataaagatatcctgtctttgaaaagcctgtcacctgaaggaagattattggaaagctcatcatagctaagtgggtcagatatatacatagcagcagctatattgatccaccagcacaaataaggagtttctgaaatctctaatctgtaaatcctgtatattggcaggtagaatggctgtgactgatagtatctgtgcatattatcaggctgagcacatctgcctatgttattaaaatgtgggagactagtgactagttgttggaagaagcagttttatggcacaacagtaaagatagaagatgctttttttctgtaaattgaaatcctgtgtttgtgctgacttatcctttccccaggttcaacttcaagaagctgagaggaggtgggaagaagtccagagctatatcaggaagaggacagcagagcatgaagcagctcagcaaggtaaggggaagaaatattcatataaagttactatgtaattctgggtaaaatttctgcccttctccgtatgtgaagaaagtataaattggcatttggttatagctcaataaaaatagcttttacactttaa

SEQ ID NO: 29401 - DNA, 3148 bp, Bovine  19866880475127
  misc_feature (1)..(1): n is a, c, g, or t
naaaatggaaaataactacattgacctttcccgccttctggttataaatacaaaccttctgtgataggatggactgctatagaaacaacattttaattgacatggaaaaacttaataatggaatctgttatggggtaggactgaactgggccaatgaatgtaaccttctttgttcaaaaacaccttctgatatttagagcagaaaagtgcacatttatgagcagatgaatgagtctgctgtgaactctgtagcatattggaaataactgatgaatggctttactacccagagcaccgtgtccactgtgggatgctggggccgtataggtggggggtgggtactagagggtaccagcacatatgggcacagtgtagctgccctataggtctctggcattgctttgcctcattgcaacatccactggtaatccagcacatgcctgaacacggggcaaaagggaatatttacgccagatggctgtctcaatatgactacttggtttatcctgctgagcttccaagtttacatgtactttgaaaagtgaaagcgttagtctctcagtcatgtccaactctttgcaacacaaccccatggactgtagcccatcaggctcctctgtccatgggattttctaggtaagaacagtggagcgggtggccatttccttctctagggaatctttaggaaaggagaataagaccacgtgtggacactgcagagatcagtggccagtggattctgatgttgaggaaaaagccgcactctcggccccagacctagatcctcgttttgtcactcacccactgtaaccatttcacagaagttattacctttataatttatcaacagaatgggtcaatgtcagtagcattcacaacactgtattcaaagcagagggaatggtgtacaacatgacactgtctctcctcaaatacaaacctgtgcttggagccagcactttcctgtagtccataacaaaagctttagagattactgttccgtttagctttaaatatgtgttggacattgattgtattaattagagataatcctggtttgaaaaacatgtttttccagaactaatgacttttatgtcaagctgacaagtataattaggcaataaatcgtcaatcagtctggttcagattgctacagggaagatgagatctctgccatccttgtcaatttatgtataaaatatgcatgagtactatttctaaagagaggaggtggctaaagggaattcataatttatttttgcattaatatactctttaaaatattctatcttttcaaggagccatatttcaaatgagtgcccaaaccacggctacaattagaaagtcacaaaatgcctacttggatttcatcagaatcaacagtgtttcataaaataaataaatcaaaatgataagcctatttgttagaggcgatggcgttgaacttggcagtgggccacacccacgcccgtctgggattggctcactgagctattccacaaaccttggcagagaacccagtgcgtgcacagggctggagcagacgcggtcaatcaatccagcaaacacagatgccagagaggatgtctgagcagaaacgtgtttctaacttggagtcactcctaattacactgaagctggatttggtcacggtaccaatcacaggagatcacttgatacagttcagagtatgacacactgagggctgtggttggagagctgggcaggaacacgctgatgtgccttggagcgatctgttcccaggaactcgtacaccgcttacactgatggaaagaaaacctccttgagggcaggaactcctgtctttttgaatcagtcttcgattcaggcagaatactgcgtggctaaaagtacagatcaggtgggtttcctacttcactgatgaccagctgtgggactctacgcaggttacttaaatgctccgtgcctcagttttgtcatcttacaagtgctggtcctcggtccaggaaggttagagctatctcagggcaaagatgctttagcgacttttatatcctcccagtttaccaccaagtgctgaacgacggacaggttcagatccgagtctgtataaacctcttaggctatcctaatgtgcaatccccggtttccattacttttgtctcctgtcttttggaaaataagggatgatgtgcaattttcccacagaggacacacatctagacgcatgaaccggttacattaccaaccacatgtgtacgctagtcaccattagtgacggtcaatttctaatggtgactttgaaaaggcagacttttcaaagacatcaccccacattggctgcatggcagcgcccacgaaacaggagaggacaagggaggggtaaagtcctgatagcacaaggcagaactctggagcttcccccctctcaaggcccacacagcagatgtcagagccgctgactacctaggtagtgacgaccaccgtggtccctggagaaggatggagggggtgggggtcacactcatctggtaggaaacagacttctaacaaatacattcaccagaacagccatttgttttctctggaacgtgagatgtgagaaagaagggatataggaagaaaagatgaagatgcaatgtattttaaatgccatgtatttcagtgaaaatgaaaacaacgatgagatacctctttgttgtacaccttaagactagaagagagaaacctaaccgtggtctcttataacaggaggtggtaaactttatggagacatatttagtcagtcaatggacaatgcgttaaaagatgggtgtgaatttgtctattgcaacatctaatttacttatctgaacattaaagtatctgcatacataagagctacctgtcacaggagacaaagctaattcaaagaatgaaccctaataaatatgaattataaataacagtatcttgcaaaatgactaggctgaaaaagtgaaattcattgttcaataattccatttatatacttttcataaataatgcatttactgggtaaaacaaagtatatcttgtttccaaagatacacaggtatctaccataaactatgtgttacagggagccaccagtaaatgcaaggtctaatttgttgccataagcaggcaaacttcccagtgctataaa

SEQ ID NO: 29402 - DNA, 3378 bp, Bovine  19866880491668
  misc_feature (1)..(1): n is a, c, g, or t
naagggacagaagggatggtctccactactgatgctccctaacgaaagtggaaggcaaacaccaaagtgtacttatcttaagtatttgcaaagaccagctgtttcatccaggatggaccttgatgagtaacttctataactgaaatggaacttaatagaaaagcttttcctaataaaatggatgaatcaggcattgcaatccttcaacatattatattcagtgtccactctatctgctaagtactgtgaacagtcctggagccctcaagattaggtgagctataaataaagtttccagtgggaccatgagtaagtcacagttattatagaatatgccttagtccactgaaagctgaggatggtttcgaatggacagcactggcctggagacttgaggggtttgaactgcacataaaaaaaaaaaaaaaaaaaaattcagccctttcttgcttgggtttttctgacaagggattacaaatttaaacaaagtcctgtgagcaagtttctgagacaatccagaacaagtgagtagacctctatttaaaatgtactatgtgctgggcactaaacttacactaagatgaaaagagcttagcttcttgtactataaagtgatctaagctaaacacatccaaacgacttttatatcctgataagaaatatcgtccatacactagattcctctttgtactgatgcctggatgttgtgttggtgggttgtgtaaccataagacctttgtgagttcttcttctcctatcattagtttaaattctatcccattaaaaacagatatgattccaaataatgtcaatacaacttgataagagcattaatagctgaaagccctcaactcaccttgtgaattaagtctagcatagtccactaagcatggtgtcagtattcaagcaatgatatatttgggaccatttttgttgttgaaggaaaaggctgacaacgtaaccctctgaatccacacatcacaagtgagctaaaacaccagttgttggcaccggaaacaagtcaaaagagcaatctggcacaagggctgaagccgtcggtcacattgatggaatacagaggagtgtatacatatctctggatcctaaaatcaaataacccctttctcccatgacagctcatggaacgcacttagaatcaactgagggcctgagcagagttggaattggagactaaaaggaagaagcacaagatgagaaaatatttagaaagcatcttacagatagcatcatcccttagtgcttcataatcacaatgttacgggtgagtgcctatcaaattatagccgaggaccaaggaaagcacagaccttttcagagcagttactgctcacttaatggtctgatgggacaaaggataaattcttgagaatgtcaggtattcaataagtcattttcttagagaggaaagaccttctagaatttaggcttattacccagataaaagtcatggggtcatgtccagaaggaatttgcaaagtcaagctcaaatgttgcaatattagttcccaaagctccttagtcaaaccaaagcactttagctgctctggatcgctcatttatgttccccaaatgccatactactgagaagcaaaagactccacagtgaattattctgaatggatccttacacaaaaaccctaagaataggtagactgtagctatggaaaaatgaaaagaccaggtaaagttgaacaaataaattgattaatctggttttgaatcccagggccactatttggcagctctatgactttgggaaagttattgaacacctctgaacctcaattctctcttttgagaaatggcagtaataacacttacctcatagggtcattgtaagaattaagagaggtaacatgcagagcattatagctagcatgtagtggataatcaataaagatcagtccctattctctagtacagcctagaaatgaatgtccatttgcagtttacttttcattgtgctttacctatttttcccattggaatggactggcagtccagaatagtggttaaagcacacagcaagtgcagctaaattgccagggctcaaagtctgattttattgatcgctaactctataactttgggctcattacttaacctgtttgtaacccagtttccacggaggatgaactgaattaatacagaaccttggaacagtgtctggcacatagtgaacactataagatttcattactatcattatcactactgttgttatctgtaacctgaataaaatatttatccctccttgaaataaggagcttatttcaactaagtttttcctgccagttgtcaactcatgttatgaataatgcacattttgaatcactttggcatttttctcttcttgtggaagattctatctttccaaagacaactacaacaatagctgccatctcacacgctcctgtacaaagtgacctgtccttctccatcaacaggtggtatccactgcccctcgaatctgggtgggctttggattgctttagccagtggagtgtggtggggagtgacactatgggttagaacaagtgatttagtgtctgccttgtctagcagaatgcttgcatatagagccctggagctgccaagctgtgaggaagccaagcacgtgtaggtgctctggtcagcagtcctgctcttcaagtcatcctagtccaggtgccagatatgggagtgaagcagcctccagaattcggaatcatccccaacttttaaaacttcctggctgagacctccaacattgtagaccagaattaacacattccttttgtgccctatacaaactcctgaccaacaaaacccataagcatattaaaaatggctgttattttaagctgctatattttgatgcaatttattatgcagcagcagtagtaaatggaacactgtctttcaaggagaaatttccattattttaaacttttctggagttaacatgtgaaaaaaattgtttggttaacagaaaatatggccctctttataataagccatgggagtaacctagaatgtacatttaaaattctatttttcttttgtgagttgatgggcaggccatgggactcatctttatgtattacatgccaaaaaagttcacatggtcctcctcctccaatacatatacaattatttttctagaactggagtttccaagaagaaattcttttttttttttttgttaattggagcagcaaagtctctctggtgtttcctaactctgaaataaaagtcatttagaaatgttcaaacagctgtatttaattatcactgtgcattttaaatagcaagcggtctcagattcaaaattattcagtgactgtaaaagggtagaagggtctcgatcaactcaca

SEQ ID NO: 29403 - DNA, 2382 bp, Bovine  19866880503566
  misc_feature (1)..(1): n is a, c, g, or t
naatctatacagaaaagtagcaaatggaaattttagaaattaaaaagtcctacatctgaaattaagaactgagtagatgggtttaacagcaaataagatacaggtaaagggaggtttggtgagctatacagtggctgaatagaaatatccatcctggggactggaggaaaaagaagatggaaaatatgtaaaagagtataagagacttgtgaatagatctaacatttgaattctataagcagagaagaatatttgaagagataacagttaagaatttcccaagctgatgcatcaaaccttaaatacaaagattctctgtgaacccaagcagggtaaatagaatgaagaccatgtctaatcatataataaatctgaatcaacacaaagagaaacatcttaaaagtagagaagaaagatatatttacctctaaaggaacaacaataagacatttgacttctcaagagaaaaaaaaatgggatccagaaaacaatggaataagatcttaaagtgctgaaagaaaataattgccaagttagaattttatattaaaaattttcccccaaaagtttagatctgaaaaagatgtgataggtaaataaataactatatttcaatatcagaaaaatgggtaacaaaatttagaatgagcaaaaggcatgaataagtattttgcaggagaagaaatacaaatggtaagttaatgcacaaagagaaaaggaaagtaaagggccaaaataaaactattttaggctccaaagcatattttaatttacttgttggccatgcagcatgtaggatcttagttccttgactagggattgaacccatgacccctgcattggaagcgtggagtcttaacctctgaactgccaggaaagtcctccaaataaattcattataaaaagattttataacccattaacttttttggatggatcaaataatgttaatagatgttaagtcagaccttgaataacgaagctagaaagatgaagcctcatcttttcattttgtaaaatacatttttatctcatctgcgttacaggaagaaaatacagagacaaagatgttcatttgcccaaatttaagaaggagaaagtagtaaaagaacttatattttaatggatccatggtcttaaactgtttattcctttgacacttcaactgtcactgggaaaaggcagagtttgacactgatccccatccacatgggaattaaattctaatagtaggagacagagaatgcaatggcatcccactccagtactcttgcctggaaaatcccgtggatggaggagcctgataggctgcagtccatggggtcgctaggagtccgacatgactgagcgacttcagtttcacttttcactttcatgcattggagaaggaaatgtcaacccactccagtgttcttgcctggagaatcccagggatgcgggagcctagggggctgccgtcaatggggtcgcacagagtcggacacaactgaagcaacttagtggaggaggaggaggaggaggaggagacaggtaggaaacaaacaaatggtaaacactttaaaggaaagtgaagcagataagaggatagaaaggaaagaacctttttagaaaagggctttgtgcattttttaaaaaagtaatatttatttatttatttaatttattgttggcagtgttggatcttcattgttgcgtgtgggttttctctagttgcagtgagcagcggctgctgttcgttgaggtgtgtgggcttctcattgcggaggcttctcttgcgaagcacaggctctagggcacgcaggcttccgtagttgtgctgcctgggcttagttactccaaggcatgtgggatctccccagaccagggttcgaacctgtgtcccctgaattggcaggcgaattcttatccactgtgccaccaagaaagtctaagaaatgaacttttaagataaactgatcaaggggctcttcacagaggacatagtgtttgaacagagatctagatgaagccagggagcaagccacgtcattgtttgggagaagggcattctaggcttcaacaagaccagcacaagtggacagaaagagtgaagggaaaatgaggtcagaacaatagtcttagggagctatggggaggatttcaaattttctttcattgttaagcactttgggagactttgagcagaaaagtaacaggatctgacctaagtgttgaatgagttaccccgagtactatgtggagaatgagggggtttgtgtggattcagggacactatttaatgggatattttattagttcaggcacgatactggcttggtctgagatggctgtagtgagttacagagaaatggctagtgatatttggaacatatgcttaaaata

SEQ ID NO: 29404 - DNA, 1937 bp, Bovine  19866880516945
  misc_feature (1)..(1): n is a, c, g, or t
naactagtgatgaatgtatgagccatacaaagccagtattggctccgttttctctgatttcctttggaaatcaggctcttttggttctgtcacagaaggttacggagtttccaatcagggtttatgtggagtggcgggtgccaaaccaattagggcatggtcatctccagacccagggagatagcgcaatccttcagccacccaaacccaggcccttcaaatgccttttagaacactcaccccagagctcagtcctgtatccacccttcattccctgtccacttcaagaagcccagccacatgtgagctcagtttccttctggcttgggtcgagaccataaacactctcaggactactgatgtcttcctcctccctcttttaccacatccagtatgcctggtccatattcctgggtttcagttctattcctatcatacttcagttctatgcctgcatttcccatccaggttgggaccagaaaatctgcctaaattttgctagccttctctctccagacctggcaaccatcttctcattccatcttccatcaggaatcctgcgcagtctggatagactggatatgttagggtctaaggataaggacctccatggccagaaccttctgatgctaggcttcatctgtcagatcacacccataggaaagcagtatccttccaggacagcacagcagtgaaagcatggactttacagttatccagcctttcctgtattgagtgtattttagggcttctaactagttgacaaggccaagtttttctttatagaattccagctaataattacataaggaatagtggaattagaaattatgctttggaacaccctgtgaaacaatgggtttcttctaggcaatgatcaatgttcactgaaagcattaagtaaaattttgatgaagagttttataacggatggatcaagttgacaatacctgatttgactgatcaatcttaaaggcaataatggaaagacagccagacattatcagccttctgatgctatttagtggggaagttcatagccccacctatgtggtgtcctttaagaaaattgaacctgaatctaatcaaaccttttgttgtaaacaccagtttacaaaattacggggaggagaggaaaatgttaaatgatatcatgtggactcatcagatctagattgtggggttataccacagggtgaatgacccagttccttaaatagacaataaagacaaacaaacaaaaacccaagggttaaccgttatagatttaaaatggattaagaccatgtcaaccaaatggaacatatgggtgaaaatgctttgtaaatggccaagttgttaaacattaggtattaatattacgactgttgccctatctctcagctccagatccttaagtctggtaaatccattatcaaaataaacttcaaaaactgtatactttatttgccaaagcttgtgtctggaatatttgaaggacttcagacaaacgaggaaaacacaatttcctaaatgggcaaagagaagccatgacagacaggtgatgtaatacctagcttgaatcattaagcaatggcaaaactgaatgtctaatcagattctaagatctaaaccttcccatatttttaaaaactttcttgtcacagaaagatttagcttgagcgtgtatacatacccatatgtactcactttaaacagtatgacaatgttatatgcttatatatgtacacacatatgttgacaaaatttactaacatatgttcatatatacacataccttgaagcaatgaatagataacaaaacttctcgtttttctctctccgaactaaaagctctcatagtaaaacactggctatgggacactcacaggataaattcatctggatacatggaagagttcaaaacaaatcaagattttatctcttcagttgccagt

SEQ ID NO: 29405 - DNA, 1807 bp, Bovine  19866880538177
  misc_feature (1)..(1): n is a, c, g, or t
ncaagtatgttcccaaatgctttacttttaataaaatgacagtattttcattgaatggtagagtgttttcttcagtcaccaaaatgtgtttgatagtaattggttagacttttgctttttacacgtgtttttaaaatgaataaattttcaaaacctatcctcctgcttttgaagaagctcttcaggtaaactgcatggtaaatactagtgccaccagtgccataacttacaaatttaagaggctgaattagcaagttttagacctatttcctgtaacagcagttctcaaccttcattattctgaagagtatctggcatgttagctacaaatcatattcttgagtcttatccttgtaagtgtatgatttagtggctctgaggtagagtcctggaatctgcatgttaagacacattccttgtgatagtgatttagttggtctgagccatacttgagcatgcaagcatgcacagtgccatactttgagaaacagtcctagagaagactagcagcatgcttacatagaataactattctgattggttgattcagagcactgatttgagagtgattcatgctcatggtgtgtggttacccatttttcttgattattttatggtaacttaagtgtttatattattgtcatcagaatgattcagagattatattcaaccaaattctttattagtatacacttggagcatttgttgtcatttacctgtaagtggaatcactaactcagcaaaactcatatgttttctttagtaatttacatgtgtttgtaataatggaaggttcctaatccagttaactgttttcaggcagtctgctgaactaaacaaactgcgccaggattatgctaggttggtaagtgagctgactgagaaaacaggaaagctacagcaagaggaagtccaaaagaagaatgctgagcaagcagttactcagttgaaggtgaaacattacctttatttatcatttcataaataatgtggcttttcaatccaatgacctgaaagtgtatatagcttttgagaaatgtagtttgaggcttaatgggcctgtatagaaacatttacactaatgaaagaattgaatacaggcttgagtttgaagttaaagactatttgaagatatgaaaattgatattagctgagtgacaggcataaacagaattttaccttatgtgtggaggtgagggtctgcatgtataagacaaaaatcaaatttttgatagggtagttaaaatcacccttcagcatcacttatcaataacttggatctctaagtaaggttagtagagcctatttttatttcagcattggaatagatgattttctgttgtgtgagcatgaggccaagtaatactccagttgctttcacttgagccacagtagaaaaaaaaatcacacagtttctttagacaccagagtggcacttggtgccattagatgcttatactgagaagacatgcatggggttgcttaggctgactgagagagaggagtggacttatttttcttgcacattttagcctgtgcatattgagtagagtgatgagtagaattgtctgttcctccttgtacagaggagaggatttgttgaacagttcagtttctgtaagttaaatgtattggatagattcctacataagtcatcaatatagatggtatactttaataccaattccagagttcagttcagttcagtcgctcagtcgtgtccgactctttgcgaccccatgaatcgcagcatgccaggcctccctgttcatcaccaactccggagttcactcaaactcacgtccat

SEQ ID NO: 29406 - DNA, 1237 bp, Bovine  19866880578973
  misc_feature (1)..(1): n is a, c, g, or t
nctgatttaaggaaattatttttatgcatcctattaaactttttcttttagtgtgggggtggtgtttataaacaggttcatattagcttcttctaaggaaaaaaatgttaattttcctcaatttagatacttgactagcacaagatgactagaaatgcaattaaaagacatatctacatttaaacgaaattcctaaaaatgaattagcttgattactatttaagaagaaccgtaccttgttatacattggatatttctaacttgtaattcatgaaaagccgtacctgttcagaaacaagagtctgtagcttctgaacttctaattgtaatgctttgttttggtcacttagaatctaaaagaaagaatctcaatttactgctttattaggaaaaattaacaaagcaaccatttgagtaagtttttaaaaaatcaaagccgtataattactataagcacttataaagtgagagatgaattatatactgacctaagaatgcaaatctcatggtggcttcatttttcggtttcaatgaatctatttccagggtataggaatacagtaatggtataaagtacatgtatgatgatatctaaaaagtagtctaattcagtcatgtggtttctcccaaatgttttaacactgggcttagaaccctttcatgtgtatttcaaaaagtttaacaatttgtcccaatgaattctgggaaaccctgctttcataagagagtacttacaggattactattaagcaaaaaaaaaaaaaaaaacacaaactaaaaaaaaaaaaagcaaatcttactgcatgcagagatgtacccatgcaatcagaatactttacaataatactcaagatatctggccatgaacagaaactaatactacatcagcaacagaggcaaataaaaacatgtcaaactatcaactaaaaatgtagagaaaaggttggggcaaaacaaatatcaagtctattataaaaacaaattagtcaaaataatagattaagtccccaagtaaactatagaaatactttttcagagtgattatatataaaaagtagttatttctacattcacttcaactaaaaattatacaaggttgttcaaagaaagctgagttgacaagtttaattacacaccttaaattcttccattttgtttgaaatttcacactgtagctgctcttcaagcaatcgtattttatcatccttaacatgaatactgtaagaaaaaaaaaata

SEQ ID NO: 29407 - DNA, 940 bp, Bovine  19866880580873
  misc_feature (1)..(1): n is a, c, g, or t
ntgtcctctcccgccttggcatgtagtacagccctgtgatatagccctgtggtcttcctattccttttttgtgtgtcctctcaaaaacttctgggaagcaatgacctcctttttaggttggtatcggatgtttttcatctaaatgaaagagttgcaaaaggatataatttctggcatattgtaaatattgacattttagaataaagctgttacagcactttttaaaatttacccagtggaatcaaaataccatagtgatttaatatccatggttctaaaaacacatgaacaagctattttttttaagttggaaattttacagtgtttcttttcttccttggaaattgtatttccatttcacttctcttgcataactttatcctaatgtgatatatgtttatgctttgaaagttttttttattaatcaccttatcattctactcttcaacaaaaatatgtatatacattgaaaaattttaattgcttattttgggaggggttaccacaggactctataagaaaatttattatcgggttaagttctcaatggaattattattagtacacaattgatcaagactatacacacacacacacacatacatatacatattacatagtttagtgttcatctctcagtcatgtctgattctttgctgtcccatgaactgtagcccgtcaggctcctctgcccatggaattctccaggcaagaatactggagtgggtttccagttccttctccattacatagtttaatggttaattattaaacataagaataagtgtgctagaaatgtatctcttaatgcaatggatgggagagttatttaggcaattcaagtgggctttgcagatactaacgcttctgtgtccttttatttgttgctagaggttcttcactgtagaaaaatgcatctcagtaagcctgaggccgtttc

SEQ ID NO: 29408 - DNA, 4776 bp, Bovine  19866880582929
  misc_feature (1)..(1): n is a, c, g, or t
naacatgtaactcagtgattttcccaaaatggtaagatgggcaggttcaggttcttgtaaccaccaccaagctccaaacacagaatgttagaacactgccagcacccaggagcccctcatgcctaaacccaggttaactctgcccctggttttcggcctttatatgactgaaggcgtgcagcctgtgtactggctgtgagattcgttcacgtgtgtagtaatttttcatgcattttccttgctgtgtgtcatttcactgtatcatcgtaccccagtctctccattttactgtaggtggatatttggggttcttccagacttaggctgacaacagatcttgctgcagtaagtgtcctcgtatgtgccctttcatgcacatatgtacatgtttcaggatcatgatcgaggttgggatgtgtatgttcagcttcttaggggatggtgccagttgaacacctgccctcacttcttctgtctttaacaactctgtgtcctttcagtggtagatattttgatggtgagtaggggcttgcttggtggttcagacaatgaagaagctgcctgcaatacaggagacacgggtttgacccctaggtccggaagatcccctagagaagggcatgctacccacttcagtatcttgcctggaaaattccatggagagaggagcctggtgggctacagtccacggtgtcacaatgacttggacacaactgagcaactaacacttttcactttgagcagtatatcatggattattggtttgaatatgaaaagcaaaataataagctttccagaaaatagacggaggatattcacatgtccttgggcagagatttttaaacaggacacataaagaagccatcagttatactatattaaaatcaggaacttctgttcattaaaaaaaaaaaattacaactgtgaaaagatcacagcaccagagaagatatttatcatatacccgacaaagacttcgatatatctatccaaatatattttaaaaattaggcgaaaacaaaacaaaaatttaggccaatttttgaaaaatgacaacccaactgatcaggtgcttccccaaataagatatccaagtggccagtaaatgttgaaaacatgctcaattaacgtcatcaaaggagaagcgaattgaaaacaggagagtgttctcaagggaggaaaacgtgaagaagcagaaccccttcccagcctcgcctagctcactgtccccgcccttccagaatggtctcacgtgacttgacggcatccggcacccgaagcagcagctgggctggggtattcttgcgactcagctttcatacttggcctccgcgggcagggagcagcggtgcttgacctgaggagctcagctgtgcctctctccccgcccgcttaggatgtgaccctcggcgagacttctaaggaagatgaccgtctatcgactgtcctgtcacctgcagcctctaaggctctggcttcccacttcatccagccccacagctcagagctggtccttccagaaccgcattgttctgttaatcacccctaatgcctggaatttactcagcaggcctccgagctgctcaaagccatttgcagatcctgctggtaaaatggctgtccctgggcagccaagctctctgctaaattacttctaagcaaagaagccgttctcaaaactctaggagactcggagtgccttgacaagcaggccctgtccccgcctgcgccccaggaggaaagcacagctcctctgggcattacgagatcatccaggagggacagtggtctccgtaattatgggagtggttacccaggtgggctggcagacctgcagacagccccacgccagggagcactcagacgtgaggagagggaaactgaggcaggccaggacctggtgaggggggcaggctggcagcagagaagaggggaatgtgttttggttggggaactggaggagcaaagcagatgggtagaaacctgggacgcagaggaactgaagtctttctccattttcagcaggggccccctggtattcttcccaatatgtctcccaagcatcccgcctttgagaccagccctgtgtgggcacggcctcagacaccctgtggaccccgctgcttccctgggcctacaggatgatgggggctgggtgctcagagctgcctctgcacctggcagcctctaacccagctgaccgctggtccttcccttacgtagccctctggacgccgtgcggggagcagaaggcagtggcctgcaggccctggccacaggcccttcagtgcaggtgcacagacacaggaggagcttagttcctagggagggcagcccctctgggaaaacacgggaggtgggagacagagcagggcggggtagagccgggacatggtggcaggaagggaccagccccccagagtgtgagcaggttgggacagctgtccccagccaataccaccccgtggctcggctattccctacaattccactcccccgtccttctgggtccagagattgggttgtgatcagagtctggcagtaggtgcgggaaccctcagcctgggggcctgggtgacagctgatttatctcatcctttcccattcatgcctctcatgtacctcagtatccagaccgggctgtgagccccctgtccagtatcgagaaggtatgggtgctgtctgtacaggctccacagggagcagtgttcagaaagaggaggaatagggcctccctggtggtcccggtggtgaagaatctgcctgccagtgggggagtatggttggatccctgggctaggaagatcccacatgttgcagagcagcaaagcctcggcaccacaaccactgagcctatgctctagagcctgggacccacaactacagagcccacgcgctgcaactgctgaagcccacacgccccagagcctgtgctcggcaacaggagaagccacggcagtgagaagcccgggcaccgcaaccagagaaagacccacacagcagcgaagaccccgcacagccaaaactaaataaagtttttaaaaaaagaaagaggaagaatattgcagtgaatcgtggaaagggaggtgttcctctgtgcacacaggtctgtctcctctgtgccaagtgagcaagggacccctgtgatcagagagaacggggatgtgagtgcccacgcccacccactgcccaccctgcctagttctgtgaaaggcctctgatggcgctagcttcctgaaccacctgggagcacctgtcagacccccagaaacagactctgccgggagagacctggagccacgcatctctgacctgctcctctagcagagcctgtctgtctcagtgtgcttgagctggagactgacgttcactggctaagcctgtgtgtgtgcatgctcagtcgctcagtcgtgtacagttctttgcagccccgtggactgtagcccgccaggctcctctgtccatgggattctccaagcaagaatactggagtggaatgggttgccattcccttctgcaggggatcttcacaacccaaggatcgaacccgcgtctcctgcctggcaggcagattctttaccactgagccacctggaaagcccatacttttagtactaagaataatttcagtaatgactctattaggaaatctattatttctaggaaatgtgtaagatgagttcacttcttttttaaaaagttatgattttagtattttacctatcactttactacagttaagaactttaacctcacgtcaagtttcagcaaagtgatttgcatactacatgggacttacacaaaatgaattgttcatactccccttcttccagggtattgcctttagggtttctcttcttactaattactctccttctttagtctttatgattcgtcctcctcttgaagtgctcttggttcactttactttctatattcctctgatgatctcatccaatgtcatggctttaaatacctatatgctgatggcttccatttttctatctccagcccagacttacctcctgtgttctgtaaaacctgttctgaatttccttttggatgtgaagtagtaaactcaaactaaaattccatgttcctctttaaacctgcctaaggtgcagtgtaatctgtcgtactagatgacagctctgtccaacattcaagtgaaaagaaaatggaatcatccctgacttattcatacttggtattcttggctcagtcttattttgaaaatatatccagaatcaagtcacttcttaccacctccattgctcactaggctagtctaaaccagtcttctctcttgtctagatttctgcagttaagttcctgatgggtttctctgcttctgtcctggctctctgcagtctttttcagcagagcaacaagatcataactctctcttcaaaaatcctgcagtgacttcccatatgcatcgtaaaatctgaagtccttatgacctacaaggtcttacagaatcatcctactctccgcatctccccttgcctctcccaggatagcgactgctctgcctcctgcttatttggctccagtcccactgtcttagggactttatgctggttgtttcccctccttgaatcactttttctgtgaggtatctctatgagccattcacttgtctccttcatacctgctctttaattgtttttcagaagtctgctttcctgcttaaagctgcacttccctgcttgtgatccctgttctgttttccatagcgattgttaccttccaacaagctctaaaatttgcttg

SEQ ID NO: 29409 - DNA, 2046 bp, Bovine  19866880593003
  misc_feature (1)..(1): n is a, c, g, or t
natttccttggtctggagtttggatcggatgctggcacatgacccaagctggatcaatcactgctcttctctgggattcttgaaacacacccttttcttcttgaatggcaaaatggcaaaatgggagatgtgaactcagggactgcagacaccatgggtctggccccgaggagaaaactgatttgtggcaggggaaaatgcagctgtcactcagagaagcagggacaaaatgaggaaagagtacagatgacattcacatcctcatctgagttgtttggagctgtactgtgtctctttctagtaacaggagccagtacactttctatgtggcctaagcgtctctcagttgaagttctggtaatgtacagcccaaacaccctggctaacgccttactatgactccactttttcctcccttacttatttcttccctctctagctctcaaaagttgtttaaaggtatttgctccaccacctctgagaaaagaagctaatttcttaaaaatgagtgacttgccagagtcaattcatatttaacataaagagatatgtaaagtgcttagaatagtgctgggcatacaataagtataatctgtttgctattattattaccggtagtagtaatagtagtagtagtagtcagaaaagatacaatggtatatggtggtgtaacatgagagtatcaaaagcccttccagattaataggacttggtgatgcattacccaagaaaaacatataaaatggtaggtatgagtcaatccactttttttccccactgcctcatttttgatctcgtgccttagaaattcctgcagccaatgacctgcttttgcagcctggcatgtttcgtttctttgctctccgtgcctggaaagccagttgattcatcatgtccctggtatcacttcgtgtaacaactgcttcaactgcccaatctgctttccaggaataccagtactttgggaaggttgtgaaaatgaaaagactagtctacattgcatttcttggccacccctgccatcttcattccatagtatatgttctcctatctgctgatacaacagtccagtcagaactgacggaagtctgtattttcagtccattaattatggactctgtcgaggatgaacaaagtttaaacaggaaaaaaagttgataccaggcaatgcaatttaaaagtacatggcattgtgggtaaagttcagtataatcaatctgccagcatgtaatggtccacacgcctttgggctctgtccttcaaacaaaagttgatttgtcttttgctactggctgcttgagtaatcctgggaaataaagaggttttagatggagtcaaaaggatgtgtcatgattgaatacaatattttatatctcatggtctcccagtgttcactcatcttgtggaccccggtgaccacctttaaaatgcttgatgtttcaaccaatcacaactttctcatccatatatgtaacaaatagtcattcatatttgagatgaaaaaaaaatgtagctcttctgtgtatcttgtccttaaattaagatctttttgatacttgccagagaaaacaagttctagcctaagagtttatagaagctctttgttactggctaagagtttatataaaaatacagagtagtatgacagtttcttgtgttgagaggtgtgagaatcaaccaaaacactttcaacttagcccactgaatggacatatactcgtcttccaccagagtctttcttgtgagcaaatgactagtcagagcctttcttgagccctctgagttacctggacagtgctcagtgaactaaacttggccagttatgttcttttgaattcatatactatatactcacaaatccttattgccagaaggaaatcttatggtgaggacagtttttgctccaaggctatcactgccattatggatcctatgggccactatcaattcactcccttttgtgtatttcttactatgctatttcttatctaatcagtaaccctcttcaagcttccccattaatatctgaatatctttcaaatgtca

SEQ ID NO: 29410 - DNA, 1305 bp, Bovine  19866880614304
  misc_feature (1)..(1): n is a, c, g, or t
natgcctttagatctgatatctttgttccattgaactaaggacagtctctacttacctccagactttttaatacatgggagaaataactttctgcgtggcaactgcacgtgcaagcctccttagccaggtctctgttcctagcaggtaccacctaatagcaaatgtgcaacatctatctcccagggcctaggttatacacagagaaatcggcaatgcgcttcaacgtacttacaagtgtgcctgacaaactggaatcctaaacaacatcaaagaacaaatgaacactcgactgcgggatcttctacatttcagtcctctcgggcgaagcagttagttgtcttggcaaaggtcatgcaggtctatggtcacgtttgagaccaaacccacagatttaggtccacctatgctctgtatttctactgctgtgtgtcatcactgagccagcccaggagactctttggcctccctagttagtcaaggattagagaggcagtcttgacatttataaattctgttatatcactggtcatgtcaaaaagagattgtttgttgccaaatttgtgggatttgggaaaagattctgctgtcatggaagactggctagaaggacaggctcctctttcactcttacagaaaatctactcctgccccgaagcttgagattccatttcctttgctttgataaactacaagtggttttaaattgagtcataaatttctccaggccttttggagaccaagcccctgcctttgattccctcacctcctgcggcagtgaaacctgctggagacctactcacatcctttgtgcacatttaggctgggagtttgaaatttacaggccaagctttgcagcacgacctccactttttaatagcttgaaaaggaaccagagagactgcaagcaggattcatcagggctgcaggtctccgggacagacccagctgcatctagagaagaccctcacaccagatgctacaaatgagcaatattttggtggctctgataaacttctcgaggtgactatgtggactcctggttatggagtcctggtcatttgaagtcatcttaaatgagtttttctttttaaaataatgatttgtaacatatatgctttgccttgatttgtaacatatagactaagcttcagaaactgagtaacttgatgtgtaaagctggtacgttcagggagaaatggttagcaaaatccctgtctcaccaccaaatccttctatgtacccttggcaagtcacgtgcagaagaccctgggctgctttgcaggtgcccccattatccttgattt

SEQ ID NO: 29411 - DNA, 2111 bp, Bovine  19866880625616
  misc_feature (1)..(1): n is a, c, g, or t
nttggtgatagacagggaggcctggtgtgctgcgattcatggggtcgcaaagagtcagacacgactgagtgactgatctgatctgaggtacttaatcagctagatcatagattcatttaaagtcagtgaatctatttgtccagtaccgataaacatcttgtgttctccattccaggttttaaatttaagtggagaataaagtgagcaaaatttataaataaaatattagccatataataattaaaatgtattttataggaccgacaagtgcccccttttttacccttactctgaactaataactttcccatttcattaagaaaatagtagcatcaggaggataatttacacagacttatacactgtatctacctccttgcctgtgcctatatattccctagatgtcagtgcttccgtctaaggccagtctctttagttgcacaccaaattctttccctcttgccatttgaaaacgttgtccctcacccctctctctcctgcctcatcagactttccccttctactggatcatctttatcagtgtattaacatgctgtaatttcttctgcctatacaaaccaaattcccaacctcatattcccctccagcttccattgcacttttctttattacttcataggaaatctccagagtcgtctcatctgctggagttctcacttttcacttcttttcagtcaggttttgatgatcaccactctattgttttggtccaagttaccactaatgtctgttgctaaaatccagtagtcagtttctagttttcattgtaccttatttactaacaccatttaacaaagttgattcatctctccttcttgatatattttattcatttagcaaccagagtgacattctcctaattttctttttattttattctcaattgttcaggggctctgtcttgagacctgggctctgtttatcctcattcccttggtgatttttttctctaagccatggtccttccaattctttgtcctctgcccctttcaaatgatctcttcaacctcatcttttactacatttcctcttgtacattgtacttgtctttattgttcttgctcaaatgtgtcaggtgtgttcctgtctcatgtactgtatataagttgtatgtaaattgtgtaacagtgttacacttaatggatgataaaataactatacaaagtgaattaatagactgttgtggaagatggtagttgaaaagatactttcattgtaatgatttgagctgtgttttgagggataagcgaagatttgataaaaggaacaaggcaaaactttgtgggtttgatactagaaaggaggggcaattggactttgtagaaagtcattccttttggtttcccgatttagagtctgctgtggctttttactgctagttttgtctacttagttgactgctaaccttccgtatctggttatagtttatatttctcaaaatcatatctagaactcccagacaaaaacttactcctgtattcttgaacttgacatgtgatttcatagtttacagatttcttccaagctggaagcattggtgttgtcttagattccttcctaactttcaccatcccctaatctccattgacttaattcaccctatcagatctatttagcctattgaaatagtcattttaattggtttccttgcacctgtgttaacctatccattggattttaaattttgattgtaacttatttgttagaagtcctaattgattcatatctacctaattacttttgatagtttctattttttactcattccccagtttcctcttagttacttgatgtgtggtaggttataatctatatctactaattcaggtatcttaaatctttaggggatgtgattccttagtttatttctgttgcctcttgctcatggtggcttatcctcgtgttctgtcattttgtgttatgggctcttatctgaatgacagtatttgggaatcttgagcttcctggcttgagggagcaacccagcaaagaaagatgtgcattcatttttgtcacatgcactatgggtaccaccaacttgggaccgcttaaatattttgtcttggcatttccaagatcatgtaagtagt

SEQ ID NO: 29412 - DNA, 1379 bp, Bovine  19866880699646
  misc_feature (1)..(1): n is a, c, g, or t
nttactattccccacagcctggcgggctgcagtccacggagtcacaaagagtcggacatgactgaatgactaacacatacacattactttgataagctgtgtttagaatgttattttccccaaaatatttttaggaaaagagaaaactctagtgaagagcaaatttgactatgctaatacataaagtacttagataactgtcccttgagtgtttttaaaggaaagtaattcttaaagctatattagttatgattattttgcctcttgataagggtgaaagaggagagggaaaaaaactggcttaaaattcaacattcagaaaactaagatcatagcatccagtttccatcacttcatggcaaatagaaggggaaaaaatagaagcagtgacagattttattttcttggcctccaaaatcacagcagatagtgacctgtagtcatgaaattaaaagacacttgctccttggaaggaaagttatgataaatctagacagcatattaaaaagcaaagacatcactttgccaacaaacatccatatagtcaaaggtatggttgttccagtagtcatgtacagatatgagagttggaccatatggaaggctgagagccaaagaattgatgctttcaaattgtggtgctggagaagttcttgagagtcccttggacagcaaggagatcaaaccagtcaatcctaaagaaaattaatcctgaatattcattggaagggctgatgctgatgctgaagctctgatacttggccacctcatgcaaagagctgactcactggaaaagactctgatgctggaaaagattgcaggcaaaagaagaggggggtagtagaggatgagatggttagatagcttcactgactcaatggatatgaatttgagcaaactctgggagatagtgaaggacagaaaagcctagtatactgcagtccttggggctgcaaagagtcagacacaacttagcgactgatcaacaaaaatttttattatgtatgatagatgacataactcaaatcagcccatgtgaaaatgtgaatgaaaagtaaagtctgaaagggcatgtacttcaggtgtggcttgatcaggcttacatgatggcattatatactgattactgatatcagctttctccataccaggtctaatctcaagccttaagtattacagttataaagtctcttccagcagtccccaaggctatatccttccaagtttgaattaaacagaaaatagcaaagcttttatatatccagtgattcacacctaaacatcctaaaccaatttctgtgatcaggagaaatacagtatattgattgatttaggcctagatatatgctctatcctgggcttcccaggtaaagaaccca

SEQ ID NO: 29413 - DNA, 2329 bp, Bovine  19866880730089
  misc_feature (1)..(1): n is a, c, g, or t
ntgggctacagtccatggggtcgcaaagagtcggacacgattgaagcaacctagcacacactcaggcaaggctaatgataaccataaaatggaacttcattctctcatttctctggtctctaacactatttcatgaacttatcaactctactggttactattataactagttactgtttggttataattcaggcatgggtggaggtgggaaagcactagaaaccataataacagtatctacttcattaaggcagtaaatgctacagtcaaccacacttttttctatttataataaaatcttaaatttaatgaaaaaagaacatcatataaattcattaaacgtgggtaactaaaagctatgggaaaaatattacacgttacagaaaaaactcttcatgttactgaataatcacaggtaaaacaaatataccaaatatgctttacattcagctcttcctctttcgtggccacctgaataagtccagtttcgagtaattcttctacagtcttcaacttctcatctttctcttgaatgctgaaataataaatttaaaacacatgtatgaactctatttcaaggaaaatgacatgatttctaaataaatatttgacatggattaactcttatgcccatcgttctttataaaactttcaattctacaaaggtttctgatgatcttcaatcctggtccaagggttcttcctctttaccaataagtaaaatgtattcaagtaatgcatgcttacacgctagcctaaacaagtaaatcatggtcatacatgactctcacaaacctaatggaatgccaaagcaatcaacagtacatcactctcttccctttatgaagtacaaagaaaattttaagaatttacagtaatatagttaatcattctgttatctcaggcttggtagaaatgagtcattaaaatattaaaaataattttaatctcttaccatctttccatttgttccaaaacatctttattaggctaaaacaaaatcaccaaaaaaaaaaaaagatacttttaccaagtttgcatgaaataaaactactttataaatagaactctatgaaaattgtttagtattaaatagatccaaaatttaggaagatgatccgtaaagactgctaatagttaaagaattttttcattcagaaaacacaagagacaaggctacacaaaagacaaagatgaagtataaaatgggctggaaatgcccaaacttacccttgtgagtaagtttttaattaccataaaagaaaatcttaagggtaagaagagaatttgcttctcctttacattaattcttcaaatctaaaattccaaggctctaaggccttgtaggccaagaaagaggctttgctctttttcatttttgtttctcacctaaggtataaggcaagtgtacaaaacctatgttcaattcaatgaatttttaacatgcagatttcacataaccaccatctaagtcaatatacagaatgttttaaaactatcaagtgcagaagaaacacaagcacatagtctccttgttacgttaaaacatgacatgtgagctggtccccatctttgacccatcttctagtattccccctatacacacaaattcttcaatgttataatttactatgtgtccagaagtggggcacccccttcgaagtcctaggccttcaggcagctaagtaacctgacaaatcaggttcagggtctttttcccttcaacattctcttctaccccttctgttccctacctgctttctcctaatactactaggtttgtaattttttcccattttactaaaaccattattacaaccatttttcacaaatactattaattttttccattaccaaatcctagtcctaagatttcatttattaaatatttctaaaaattaactatgttttattcaataccttaggttaagtttccagctttacacatctcaaatatcataataccctgcctctagttcacaaggattatattgtgaggggtacaggagaacttctcaatgggaaaaaaaactttcctaccactagaaaggaaagaggtgtcaaaaatatattaaatcatgattataaactgaaaaataaatcatgcaataagtttataaacctttcatcaagatgacttttgtccatctttatttttcatgaatcccatctcacataaaaacaatataaaatttgcgaccatgcatgatggcagatgttaactagacttattgtgatcatttaacagtaatacaaatatcaaattattatgttatacacctgaaattaatgtcaattgtaactcaattttaaaaagatactattaagt

SEQ ID NO: 29414 - DNA, 1007 bp, Bovine  19866880750942
  misc_feature (1)..(1): n is a, c, g, or t
ntctcccccttttaagtaaaagaacagcttgcagccaggaaaaaacacttaagagttcttcctaaacaagaactaagcagtaactactagacggttgaagcctatacacgcaaggagacgctggtgacacgcttcaaaagagcacaggcaatgtaagatttgtattccaaagaacactggggagaactgagttcctctcaacaataaaggcttctagagagctttgaaagctatagcagaacttatatacaattatagcattaaacctcacagacacttcaagaaaacaacacacaggaagaactgacctctattcaatataacctgttcattaatagttcttactgcataaacaaaattaacaattcgatactctaagttaataaatgggagtccaccatggaaacggatttttaacaatcacaaattgcactgggaaagcacagctaagttgccttattccaacaatgaaaaaatcctagccacctcaactgcacaataaaataagacttatgagcacgaagaaaatggagcaaaagaaaaagaccagcttaataatgtcattacttacactttcttaagttcttcaactagagatgcaaaggaaacctagaaataggagggtatcctacttagtaatatgctcaaaatataaatgggccataaatagaaaagtatgttattttttaaattaaattttctactataccaaaatctgggaaaaataaacctggaaattaattctttccagatttttttaaatgtcagaattatgaaaagcactttgaaagtaaggagctttaaagctacttatggtaagtgtaggtcaaaagaaaaaccaatgtataaatattaaaattattaactcaatgatcctaaccatataagggagaagataggtaacctcttttactattatttagaatttttactttacatatgtatattcaaaaccatctatcattacagtaacgagcaaggacatgctatctagagtactctatcca

SEQ ID NO: 29415 - DNA, 1925 bp, Bovine  19866880799374
  misc_feature (1)..(1): n is a, c, g, or t
naatctaaaatagatccaactgatttttttaatttagtttattgtaaattatttcaaatcagtagaggaaaggcttgatcattcagaccaaataaagacatccagacaacttaaaaaaatgtataaagtacttcaagaaaacacaagaaaataagtgaattcatcttatatattgcatagctgaaaaagtttaaaagtttacaagtgtattaaatctacaataaaatttttttaaaacttgattctacaaaccaataaaaaaaaacaaattaatcaattcctgaaaaggccatcaaaatacaaaaacttatctaaatttctattctctagtttgtcactacaacaaaattataaccgccccagggtccataatacaagtatacaattatcttttacaacaagaggaaaagattcaaaccaatcaaaagataaaatactttaacaaagcaaacactgagttgcctaacatgggaacttcatttacaacttcctaaaattaacctaacagactacactggaatcttaaagctgaggtgcaatttctccttgtatactgcaacacatacttatttctatgactcacaccttattaacacatcccttaaattatttcagcaatacccaatctagagtactgctaccccaatctgaaacaaatccaactaaagccagagatgagtgatgaaattcaatttctccattaggtatcatgtcacaacacatgaaacttctattggttctcttttaaccattcattgttttccctttaatacaagactagataaatcagtttgaacagcttctccaaaaaactgaaaatgatctgcatagctggtagcttctgagagttatgccagtccttcagatttttgcttatccatcaagccccaactagtccattttctcaggaaaagacactgttcattttaaaacatatccacaggaaataacctggttaagtttattctgtaaagaaagctaacttaagttatacaaattaaaagctttactaccagaaacttaataatacatttaaataattagtatttcaaatcaatacataaaatcagtttctaaagatgattataaatcatcaaaattgttcaaaaaattaacattagaacatgaaattcataccactgatgtatctgtaacacagttacaccatatacagaagacttccttccgctaaaatctacagtcttaaaatctacttcacaagatctctaggttggaagaggccatctaagtcaactacatccagctgaatggtcagtgattttatgcttattaggaataaacacctcccataagttccttctataaagacattagaatattcttcctagttttgatccacaatcttcctcccgtaacttctccttgtggccctctaactgccctaaacctcatcaactgtgtccaattccactaccacaaggcattcctaataactgatgcatggtattgatgaaatttatcaacaaacagaaaacatacttcaaaccctatcatcctttaggaaagttttgccagggtgttaaagtgacagcgtttgtcactcactcacgtctgactcggtgatgccatggactataacatgccaggctcctctgtcctggaattctccaggcaaaaatcctggagtgggtagccattcccttttccaggggatcttaccaacctagggattgaaaccaggtcttctgcactgcagacagattctttaccgtctgagcaccagggaagttaaaaagtgttaagctaaagttcatcgccttcggtcactcatcaatgagggtactaaaatgataaaataatatatttattcttgcctatttcccaaaaagacataatacttaatatcatttcacaaactaaacatgaaatgtaaatgacaagataagaatgtcaaatactattca

SEQ ID NO: 29416 - DNA, 1501 bp, Bovine  19866880816957
  misc_feature (1)..(1): n is a, c, g, or t
ntagtatgtggaatctaaagaaaacgaaacagacaaaataagacaaaacaaaaactcacaaaacagaacagcttagtggttaccagaggggaagggagttggagggtgggcaaaagtgaaaaaggaggtcaactgtacggtgacagatggtaattagtcttgtggtggttatgaccttgcaatgtacacaagtataatgctataatcatgaaacttagataaactttaaaaaaaaaaaggtatgtatttttttaaaaaaaggtatgtattttcttctctaaactacaagatcaaagtatatacaagatggaaataaaactccaagaaagctaaagttgtcagttgaaggttttgagagagatacagagggaaaatctccactatggtaacaagagtttctgtatttatggtaaatacacactgtatatacattcacacacactatgtcaattatccacggacagacagcaattcttcagttattcttacctaatacctgatagtgttctttctcctttgtgagctgttggtttactgcctgaagcaactgttgtaactgtgttacagtctgatttagacttacagacattgtctccttctcagaagactcctaagaaaaagattaaagagatgaaaaaccctaagcataagggaaaggcatttgcaaccaaaatcagaaaatattttattgttgtttcacacacagatataaaaaatctgaaagatgacatgaaaattgacaataaaaccacatagagcatagtatttgctacctcgcagtgcaaggtagtctgcacctaagcaagtttaatgttatataaatgctgtcactaggctacacagggaaaaataaagaaactatgaatatcagacaaaaatatttttctgcttccataaaaaaagtgtacaaagagccaaaggagaatacactcacaacaacagaaaaaaaacaaacatatattgagctcttacaaaagttgaggcattgttgagttacccactattctaagtcttttatatagtaattcatttattccctgcaacaatcctacaaaatatatactatcatcatcattaccttttatggagcagctgaaacccagagaggctaaagagtttcccctaagtcagtcacacagctactgaacaacagaatcaggattcaaatgcaaggagcagagtctacagtcataagtagtataccataatacctcccaactcaaacctaaacattaatgtaatatctcaccaagctaaagtgaaaacaaacattaataaaaacacagaatttcagataagatacctcaaagaaaagatgaccttgagttaagaatgcaacaaaattgatggaagcatattacaaaggcattttttcagagatggatcttgtagatttttcattcttcacataatttataaggtaattagctcagagatttggacctaaagaaaatgcataccgtttcttgggaaacatcactattctcaataacagtagtgt

SEQ ID NO: 29417 - DNA, 973 bp, Bovine  19866880837809
  misc_feature (1)..(1): n is a, c, g, or t
ntgctctctctggagggctgcgtcggaaggagcatgttgttcactagtaacatttggtactctgcatgcatattagctttgggacttcccaggtagcgctagtggtaaagagcccacctgccaatgcaggagccgtaagagatgtgggtttgatctctgggttgggaagatcccctaggggacagcatggcaactcactccagtattcttgcctggagaatcccatggacagaggagcctggtaggctacagtccgtggggtcacagagtcgaacatgactgaagcaacttaacacacacacacattaggcaacaacatgtaacaatattctctgctttccaaaacaatcaggaatctggagcaccctatataattaagtattaaattatctgatagatatctgttttaatcataaaaataactgactaaaataataattattatttattgggaactaaattctgtgccctttaaaaacatcattcgaggttttccaacaactcttcaatgcaggtattgtactttacaggttaagaagtagattcagaatatggcccaaggacacgtagataacagaggcccttctaagaagtccagttgattgaggcttgaggaggaacatccaaagcatgtatgaatggcttgcgtgggggcaggtatacatgttaggtacatgtatgtttccgtgtacttcagtcattgtcttactcaaagttttgtgtaataggattgcaacctgcatcattccagcaggctgaacatcttgaaaataccagctgccaagataaatgttgtcttttgagagtaaatattttcatatttctacataactgtgatgtggccttattcaactggttttattctgtgaagaaaatgagattcttcagcagatggacaaattttaaggccaaattttcaaggccaagccttaaaaataaaatcccaagtaaaatgaaggaaaaaattgaactc

SEQ ID NO: 29418 - DNA, 1169 bp, Bovine  19866880885450
  misc_feature (1)..(1): n is a, c, g, or t
naaacccttgagcaactttctacaggttgttttaatgtagttctcacatctgctaaattaaaattaaaaaaaattaaatctcatcctacaagacagacaggttgtgtcctttgcaagccaccaaagaaagcaaatgatctttacatttgatttcctctctggggcaaagagttggttttagaaagctgagcattcagcaggttccagatgcaaggcagatgctggaaccctggctgctgtcattatggctttggagcagggggtgccacatttggaacgaggtaatagcacctaccttggagaaacattgtgaaattcaattgaaataatatgaatggcaatgcttgacccaaagtaggtattcaatcagtgtccttagggaaacacaatctaatgtctggatctcattaatgatgccacaatctcattaaaaacacttctatattgaactaaaaatgtgttctaattctgccctttttgactatgcagaatgattctaatttcttctccaaaaagcattcaaatatatgagagtgacctttcatgccctccccaccaaacttctcttttccacctaaacaccgtcagtttcctccaataagacaagaatttgttgtcttcaaagtaactagaagcatctgggctctggtgggtcccaagatacacctcaacacatctcagcaccgataatatgccagtagtcctggaggatcccaaactcggtcctgtgggatcaagttaacctcatggttaacctaatgctttcttcttcatataaaattcaaggaactttctccatatgctctccccacccccaacactgactgcagacactgctttgtttaaaagagcctgtttcaggactaatatgctcttcacagttgaaatccagccctgaacctttgaagtgacatttattgtggtcttgggaaaggctcagcagaggtgagaagtgacagctgagggtgataaatcaaatgcagctcagttttcatttaagggcaaactatcatccagtcagcctggctgagtcaccagccagcttgggcagcttgagatttcttatgtaaatggtaaacggatcactgaatggtgacaatttcttcagctgctaagatgagccgtcggcttctgttctctgctcaaacttgacatcttaagctgctggt

SEQ ID NO: 29419 - DNA, 1642 bp, Bovine  19866880946574
  misc_feature (1)..(1): n is a, c, g, or t
nccatccaacccatctcatgttccatcactgccttctcctcctgccctcagtctttcccagcatcagggtcttttccaatgagtcagctcttcgcatcagatggtaaaagtattggagcttctacttcagcatcagttcttctaatgaacattcagggttgatttcctttatactgtatataatatatagtataataatagcatatacagttatctaatataatagtctatatggttatgagggcttccctcatagctcagttggtaaagaatctgcctgcaatgcaggagaccccagttagattcctgggttgggaagatcccctggagaaggaaaagtctacccactccaatattctggcctggagaattccatggactgtatagtccatgggtcacaaagagtcagacacgactgagtgactttcattttcatatcacatccttcacatacttatgaaatagtaacatggttgtgaaacagtattactgtttgcaaaaaaataacagtatataagaatgcaaaaaacctttcacatttatgagaatttttatcttgggtttgtagcgctttgtttctgtggtggaggcatttgtttttgttcatttactggagcgttgaggagcccctgggcttctatccttccaaaccttgagaagaggctgacagcattattgatcacgtctgtcgcagtggctggccatgtgctgctcctgcagcgtttgaccattgcatttctattgctggaagtggcactgaccgctggggctagcagaggatgccacttgccaagtttataacttacccaacctcctggattcagcattttcacctaactccaaacttctgatgctcagattaatttactcttaaaataagaatgctctgtttctaagaaaaggggctcagaaaagcccttacaaatagttttaaatgtctcgaagagtttatgggacacacatttaatgacttaagtagaaaggagtagtggcataaacatcttccttaaattacttggttttaaaactagaaagtatttggttaaaaaaaaggtttgcatttttctatactttggatttggaaaataactgtaaggtactcaaggaatataatctgaccatccaaacatctgaacctcagagcctgatagacctcattacttgccttgagaaatcatttacacatctttgaagaagaccttggcatttccatcatgaagtttgttgtttattactattattcttttaatcctagaaggaacatggttatgttggaatcttagaaatttaaagtacgtgaggtttttattctcctaagtcaaaatcttcataatgaaatacttgtgtgtgttctttatttgctacagattgagattttattttctaagacaagaattgatagcattgaatgaaacacaggcgtagtcaatatacattttatgaaaaacactgaatctgtttacaggtgcagtgattggctactgtgaatttagtgactggcatatgatattggaggccaaaccgggctcaagagtgactgaaaacaaacccggagggaaggacactgcagaaggtgagccaaacaattacatttgccgagtagttattgaaaagaaggtcctggaagctaacagtttagtgt

SEQ ID NO: 29420 - DNA, 3448 bp, Bovine  19866880993445
  misc_feature (1)..(1): n is a, c, g, or t
ntgtgtaaagcatctagaaaaaggtttagtacatagtacacgttcagtacctcgtcatcaccaccatcatgatgcacgtgttggagtcaggaaaatttcagggcccattctctcccttaagagccattgacttcctcacaaacttggctctcctttccttgtgtcatgtaaggctcctcagttccaccccacagctcccaccttcctggagctctgctgaatacactgattttgggcccctccactctctgcattggatgctgggggtgttgctcactcctgtctcagggctgataggcaaacagaagccagttgactgacctgcaaggtatgcccttgggtctcctccactgcctgccaccccttctgctccatctcctctgcacagaaagggggcctcacaggccacaggcctgggctcagctctcaccttgcaggtctctaaaccctggtattcttccagggcagaggggagctgtttcctgcccccagcacccaccaccttgctctttttcagcttcttttgcaggtctttcctctctacccaatccagactcattgccctgtggtacctccttcaactcagggaccttggttttctctacacacagcagggagcgttctgcacataggtggattggcagcacttcccagagcttctaccagatcctctaaatcccactagcctgcaactccttaaggctgaagcgcgttaatcttcatgtcctgctaagacccagaaaagtgcctctatgtagtgtatcaatatttattaaatgaatgcttgaataaatgatgaatttctagcgagcactggaggtgggggaaatgccctgctaacatgggtccttactacctcccaggcatcagccttctgttggaaagttggcccgtaatccttgcagtactcttcggctgctgattttccaactgtggctttacacctgtttcattttacaatatttattgggaaagcactttagctgcttattatagtcagatatcatccatgacaagccattttccttgaattagctcagtgagaagtatttctaaaggcgttaaatgaaatcatccagacatttcccatggccagctggaccagcagccagttcagccccctggcttgaatacagagtggaatgtgtttttagtctactccaagccccaaactgctactaattctcacactaataaatggggctttagcaaattctcctaagcaaaagcaacaggagaatttacaactgtgctttcagtaaattaaatgagataatgcagtgcctggcacgtagtaagcagccagtaagtgctaactgttatgtctctggacaacactacagagaattgttgcagaaaatataactaaaaagatgggggctgatagggaaaatattttcaaaggttagtagaaagtaaggtcatttaagggcttccctggtggctcagacgggtaaagcgtctgcctgcaatgcgggagacctgggtttgattcctgggttgggaatatcccatggagaaggaaatggcaatccactccagcactcttccctggaaaatcccatggacagaggagcctgataggctacagtccatggggtcgcaaagagtcagacacgactgagcgactgagtgatttcactttcaaggtcattaaaataattatttccttgaagttaggaataaagaagataatgctgaaaaagaaaatcatttaataaaaattaaagggatgaaaatagagttaggagattgctagaaagctaataggcaacgtgcattttataacatgtatttaaaaacatgaattacatgcactcaccctggaaaatttcactcaatcaaatcacattgtcacaaactgctgttacaaaaattttgagatataccaaaacagcaacaccaacaaggtagaagtagaaaattgtgcttacatccttagataatcattgcaaagggttttgggtaaatgcagaaatcctcactgaaacttgaatctacaaaacacgcactgtgtagctctgtgattccatcctggctgtcctgaaataacgcctgtgatgctgtcaacatgcctgaacacatggaacttgcatagggaaactcattaactccaagaccaggatccttttcccgaaatacctattcctggcttcctgatgccactctttctttgcttttgttgttaaagatgaaaatattgattttaaccagactgaaactagttaccagctccgcttttactaatgccttctcaaagtactgctttattcccattaattttggatgttcctgttttccataacttgagtttataagcctgaaaatggaattttatagcacgatgcctcttgatgattaccttttattcctgggtgagcagaaggctgattcttacccagcctgtgatcaggagaggtgatcttggtgggagaaaaatataatgtgatttttggcagccagccatactgggtcattagctgaaaaggagatatgacccaaggcttttttttcctaattaaaaaaatgtttagtttttaaaaaccactttattgaggtatgattgacttgtaaaaaatcgtacatatttattatatacagcttgatgagtttgaggataaatcactttcaaagccacagacatattcatcaccttctggaaggggctacttttcttttgcctcctttattattactgctattaatattattatcttgtgtgcacttgtgtgtggtaagagcgctgaagatgcatcctcttagaaaattttaggtactgttggctgtgagcactatgcttgagagtagatctcctggatgatgttctattacagcaagactggtgggcaatccaagggggagaaaggttaaccacagcacagaattcctgatggagtctgctttaaaggtggccatgagatagtgccagctgacaccatggggagcagagcagcgagcacactgggggaaaactgcttggatgaatgagggctgtgagacatgatggtgtggagccgatcttgtcctgagtcagagtcagtagtagagcaggatggccatctccccacctccatctaagaaaaagtggcagtatttcactctagcaaaaagctagaaataaatcatacttttgctttaacagtatacctctgaagtagttggaggaagttttcaataaatacatcctgaacagaggcagttgtcataaaaacaagatcattagaacacttgtctaggtaacttactcatagtgtagaaaaagcctagtttcctccctgaatttatggcggccagagccaattacagttatatatatattttttaaattttattttatttttaaactttacaaaattgtattagttttgccaaatatcgaaatgaatccaccacaggtatacatgtgttccccatcctgatccctcctccctcctccctccccatacca

SEQ ID NO: 29421 - DNA, 891 bp, Bovine  19866881006018
  misc_feature (1)..(1): n is a, c, g, or t
ntagtggcatttatctatgatatttcagatcactaaagaagcctgggcaacatcctggcttgcagccagccctctggccttcctgtctggtatactttgcaggactggtcatgtgagaaagacagctaacagcaacaattgatgggtgatgaatggctggaagtagggcagctcgaagcatgacggggacaaggaatgcaatcaggaaaatgctgacctggaacttgagtggggtaagttgggctgtgacggatggaaggcagcagctgcacgcatggcatgttggcacacacagtcggaaatgctacttaatttgaattgaaatgggcaacttgagaggcagagctgcaagcagtgaccaccgccacagaccaaaatacagaccttccattaatctgtccaaccacactcacagtcttgggtagtattgttgttgctcagcatcatccttcaatgtgataaagcaccatgatacagagctgtgggccccagagccatgcattatgagacttctgtgggaggagtaggcagaaaaggcttcagactgagatttaatgggcacatcagagccaatctccaaacaaagattcctatttaatatttggaatggtcattttggagcacactgaggtgtctgtgaatgagggcagagtattattggttcctttttatttcacacctcaaagtcatgggctccctatgttatttttcttctttcctattgtggttattgaacttacattcagcccaagtcagagctctgggcacctgggtgccaggaaatttgactcagcaggaacctgatcctgagcaatcagtggactgttgggtccatgctctgtgggctccacattattctggatgcacttgcttatttgcatgggggaaaga

SEQ ID NO: 29422 - DNA, 1848 bp, Bovine  19866881022973
  misc_feature (1)..(1): n is a, c, g, or t
nttatttcatgtattatttgacttcaaatgcattttatagtttaaagaggctttgtatatatacctttaaacatatatggatgcataaatatattgatttgttcatttgttgatgtctaatgatcagtgtttgtatagtagccatggaaagtattccaggcacttcagaggggatttaatgcaagttacagaagtggtagaaggattgggggggaggcgcacaaaacacaaaaatagttcaatttaagtaagtccctagaggagcaaaggagaaattatgtctccagggtcatagctcactgccactctcagaatctggctgctgagtgagaaccaggggaggtctgctgcccactgacactgctgtctctgctgctgctgctgctgcccagagctgaaaaatgaaataggtcctccccttcttccaccttgcagtctcccttcagttcctcccaccagcagaactaacaaaccagctggctaaaaagtctgggaaatgtagtttacaggcttcccaccccaaaagtagagatgagtgaagaaggattgattaggacctgagcaaccacagacggcatctggcacagcccactgaaaatcctttgtcttgggcaagagcaagctgcatgtgtattttagtgtccccattgttgctcgcatcatcttttatccttattttctttcctttctcccttcttcacaatcacatgctaagcaagacacttggcattgggaatacagagtgaacagacaggtttctactcccatcagggttagattctggtggagggtaacacaaacacattctgagctctgtcctaattctttcctttcctgatttttgttcatgctttcccattcctaacttaaccaggattgcaatccccttatttaaatgacatgtcagtgctgcttaatatttatgctttagaatgctgttttcacttctactttgaatgtaaatcacttgtctaataggatgctattccaagattaagagaggatatgggttaatgagtgtgtgtgacttccaaaagcctgtttaaatttcatagtcctatcttttacagctgagcctcagatccctgtaagactttctgtattttcactataatcagtttgagaggtattaataagtagaaagctttgtcaaaacaaaacaaaaaaaaagagctatagtttatagaattttctcaaggattttccctgaaaaatgcataaaaaccagtttgttcacaaattcaagtgaatgaattaacagttaaccatgcattggtgctgtgtactgagaatacagaagaaaataagaaagagtcgctgttctcaaggaacttgcagcctagtgggggaggcagacaagagaattaacagtgacagcccagggtcaaaatgcttaattgtggggcaggaacacagagaaggggtatccatgtcagcctgagggttcagggcaatttccaagacaagtggggttttagatgaattggaagactgcagacaagtcaaatgaagaaggaagaaagaagaggagaccttctgacatcccctcccccgacacaaagcactggagggtcatgagacaagagtgaaggagggtacaggaatgacttctatgaaggataaaatgagatgacatgatggttgttagcaggagttgggttatggaaggattttaagttctgtgcaaaaggctttaacctgaagaaaatgagccagccaccagctttaggagaaagaataagatcaccattgagggtttatcagaaggactcaagactgagatagcaggaccattggaagacattgtggtacccaggtaatagacggcaatgctcctctatgcggttg

SEQ ID NO: 29423 - DNA, 1400 bp, Bovine  19866881043782
  misc_feature (1)..(1): n is a, c, g, or t
naataataagactctgatcagaagacccatgcttggacacaaaataatcaaatggcacatttggactcttgtgtaacctgtgtccactggacacttgcctttgacctttgttttcttttataatttgaaactaccataagccacatttttggtgtccttctcttcctactcccctcttctcctattcccctctctgtctccagtgcatccatatggtatgcttttaaaaatattagatttagtcttcacaatataccaatttacttgatggttttaaatactttttttaaagctatgctttaacaagagacaagtctagaaagttcagtatatcttccaaagcattttcaaagttactttgaatgtcttgcctaaaatcttttaggaacaaagtagggtataaatgaatacaaaatatgcacatatcactctaaatagatcaagagagtcatatagaaagttcatcactcttctaaagacacccactgggactcatctattagattagtgtggcctagattaacactcacctaagcgacatgtggggtataaaatacttctattactaaaccactgagtcctaggacccacgagctgggggtatcttgaggtcatttagttcaataccctacccaaaccttctagcatctcctttatagataagtagtaatggtgataataatgtcaaagacttaggtagagtttaatatgtgttttatcatattatttaatcttcaatgtgacagatgaggaaaactaatgacaaagagaggcacagatgaccatccaaccactgcttcatcttttattacctgacagttccaccatggaaaggctacacctgtaggaatttaaacttctccttataaaagttcaccagacttccctggtggttcacatggtcaagaatctgcctgtaatgcaggagacctgggttcaatccctgggttgggaagatcctctggagaagggaatggcaacccacttcagtatcctcgcctggagaattccatggacagcagagcctggcgggctatagtccaggaggtcacaaagtcagacacgactgactaacactttcacttcactttataaaagttcatctcaaagattttcctccctaacaactccagttcattttcagtcagtctgagttatttcttcttcttccgagatggtaggaattcctaccccaaactcagcatgcacttgtagtctattgccctccctgcatgacagtggtgtttcccagaaagcatcccttggcatcactgtaaaggttattgcctgaataacaaatttacctttgccctttggttcaaggaaggccccaattaccacattgtttcttcctatggaactagcgcacagggtaggcagtaattcgggcctccttaaca

SEQ ID NO: 29424 - DNA, 2878 bp, Bovine  19866881049040
  misc_feature (1)..(1): n is a, c, g, or t
ntctactgaagaaattatgtgggctctcagagagaaagaggaaaaatgtaataccgctgtggaataggttgttgatgagcccaaggaaaggactagcatttaggaagatacagtgatgcctgaccaaagtaaaacaaattttactgacaagccagttagattctggttagagttgaaactgtcttctgtcacaatgtcacatcttagttttcaatgacaattttatgggcttttcagaaattaaaataacaggaaaaatatcaataattatatgaatgccaaaatagatgtgttggggttgtttgatattcttgtaatagtttaagtcctttgggtaatcggattagatcacatgaaaagtaactccagagctaaaagctagtgtcattccaggaaagagaccagcataagcacacaagttaattcctgggtaaaccagagagaaaggagttcaggctttgatccaagacgtaggattttcaaatcatctcccagttcaattaaagagccatctcctgaagggaatcactggaaaccagggtagacattgtgctccttccgttaccactaagtgtcccagagaagaaaacatgctcttgaagttgttgacctgccaagtgagaaaaagtgccctgtggggagggtgcagatgaactgacactcactgtgaaggagtttgctgttttctccccttcgtgaccttggcaaatgacttcagcacctttgagcagggcactgcctttccggatgctgtgaaaatggctgttatgtctatggatcatgcagaggtgccacgaggcttaatttattagttaatgtttgtgttacactctgcagctcttagatgaaaggtgttatagaaatgcaaagcagcaatatattatctaaacatctgcctcctcaaatagctctctagaaagtcttcattgcttcagcaaaaatgattcctcccaaaatggataattctgtccagggctttcttggtctataaattgtttcctcctcctttcagtacacagcatctctgtgcaggatacactctggtggctgcgttttccatcctgtccttggaatgttcactgctgatgctgtttccttgtgtgtgtgccctgcagtttctcacaggtccagcttttcctcaccatggctgccctcttcattctttattccaaagagccattataattaggcttttcttttgatgcttaattttacacatgggcatgtgacctctaacccaagggctggtgtttgaaaatttgtcagtaaaatcgagaaaaactacttaaaagctctcaaaaataaaagaaaatacaaaaaaagattggtccaagtttgaacatgttttggtgagattaactgttgaattgtgaaagattacattggagattatttctgctaaaattaattttgtccacaattttaaaactctgccaagtatcctacagcaaatggatatttatttccatagaattccatagttcttatacatacatatatatatatatatatacacacttagattttgttgttgtttagtcactaagtcatgtctgactcttttgcaaccccatagactgtagcccaccaggctcctctgtccatgggatttctgaggcaaaaatactggaatgggttgccattcccaggggatcaacccggggattgaacccacgtctcctgcttggaagtcagattctttaccactgagccacctgggaagcccatacttagatttaggtaacttcttttcaaatgcaactagagagataaaatgagtaataaagtatatcaatctactgtattcaaaggttttcctcttcccacatttttacttcgattttgagagtattttttccttcttcacatgctattcctcagtcctattgtttgtggttatgggaatgtcctaaaatgtccctgggatttgttttaatcaggtataaaaagatgacagacacagagacaattgacttgaaagaagagtttattacagttcccaagaggaaagggaatgctgtgaccaccaggggaagcacccaagtcattcgggaagcaggagtaatggaaaagcacagcccaggcctctattgtggtctctgcagcaagggatggcagaggcaggattggcaaggttgagcaggcttaggattggatgggctctgggctatgaggatggtctttaggtgtccattcccaggccccagggtgatatgaggcagggaaaatattggcttgctgtgtgagcatttgataaaggaggtggttggggacgtgcactttggattggttgatttgtttatgaaagttgtgctcacagacaaggtgttttttatctcaaagaattagctagctctggaacggtggtctctctccaggttctcaaggcccccaagatgtcacaacatcataaaatatagacaatgaaaaacatggcaacacagggggatcttctctgaaatcctccaagaaaatcttcaaaataaataagtttggccacacagatctctcactttttacttagtgataaaatacatgcattataaaggagaaaatttgtgaaaatcatcatgaaaatagctatcactgatgaaagcttactatgtctagcaattagtgaaatgctacatacactgtcatttgaagtattcaactacggatgctaaaacgaggaagaaaagattaagttaccttcctgctcttatttatttgttgtattgtagtgaagtatctcagcgccaggttggtgagtctgctccgggggggctttgaaagaggtaaatcagcattttcttccttcttaacacagatgagtcagcctctcaacactcatctgtggtgttgtaaagcttctcacttaagtgcctaacccaccatg

SEQ ID NO: 29425 - DNA, 1553 bp, Bovine  19866881059151
  misc_feature (1)..(1): n is a, c, g, or t
ntcttcagtacactgacatttagtttatccacagggctatgtatgtggggcttccccactggcactagtgataaagaacccatctgccaattcaggagactaagagatgcaggttcgatccctgagctggaagacaccctggaggagggcacagcagcccacttgagtattcctgcctggagaatcccgtgaacagaggagtctggtggggtacagtccatggggttgcaaagaatcagacatgactgaaatgacatagctcactcactatgcatgtaccacctatagcaaattccaaaacctttcatcatcccggtagaaaactccatacccattaagcaatcactccccattcccatgctctctccacctcctaacaaccaccaatctggtttatgtctctgtggctttacctattctagttattttgtataaatggaatcatgaaccatttgtccttttgtgtctggcctctatcacttagcttaatgtttttaagattcatccatgttgtagcaagtatcagtacttcttttctgtttatggctaagtaatattccattgtacatatatataccataatttgtttatccattctttcattgatggatatttggacagcttccattttcagctaatgtgaacagtgctgctatgaacgtttgtgtacaaattcagagtaattgtgcatgaacacacatgctaactatacacacacatatctctgattgtgaccttattcccttaacagaagatggggaaaaactgggatggccgaagaaaactgaggctaaaataaactgtcaattgtggtggtgtcagaagtcaatcacaacgggtttggtggcattatgaaaagaaattttagtttctaaacagtcctgtgaagcttaaagacgtctgtccagcctaaagctgttgagcgaggcctcacatttcaaggaggagaaagggagaaaacttagtccttcccaaaccaggatcttccagccaaggccattgtgagttgcgattaccaacatagtcgattgcccttctcattctttagggctcccgccagtcaaaagatataaaccaacctataggaaagggccaaacgtgagtttttaaccagattctagttactactttcaagtctgtcgtaatacctataaacatcaaagcaaacccaaaatggagagaaacttctgcttcaatggaatctatccagccttctaactatatgctaatatgatgaacatgtaatgctaatatcaagccatatcagttgtagacattttgttcattagaaggtatcacttttcaactcttatcagtgtgtaaattaaattttgactctctggccacctgccccaaaggcacaaactctcaaaattcaattaacataatttttattctagcgtgatacttctgttgatgggggctggatagggcccctagctgaggactgggctagggttcctctacactcggcaaaaccagacaatgctaggtgtacctacggtaaaagccactagaagtcaaacttcagggacagaatcagaggatgcaag

SEQ ID NO: 29426 - DNA, 1105 bp, Bovine  19866881061753
  misc_feature (1)..(1): n is a, c, g, or t
ntccccctatccctttcctcccctgggtcaagtgacataaagcctcattgtgccttatccactctgtgcgatactatgtttctacggaaatacagtctggtggaggaaaatgaacctgctagaggagtcagtccttgtgcctaatgcaactcagccatatcctgctctagtgggtcttctaattttcttgcacagacctcctaagtaaactataaattcctagaggtcatggagcataatatccccaggcagattcattaccatctgagctaccacggaagccctataatacccccaggacttaccacagtacctggaatatagcagatgctcaaaatgtatctgctgaggcaattacacaagataacgtgtggaaagttcttaacgcagtgacgggacacagtcaggaactaacagggcaaagctgtgctgactgtgatatgttgacagtgacaacaatattagggtttatatataccattcagtaattttttgctctactggcctcgctggcaatgtgcaaagaatattatttattcggatctcatcatcttagcatgtgtctaaatgccatgagaaacgaagcagttctggaatcttaaaaccccacgttcgctctgctcttgagtggtaggtaattcctgttattaatttcctctgtcttcccaggatttcactgcagactcacaatccaatagtcatgcaatcactgaaaaccagggcccttatttgataactggtcgaatgcatcttgattcgacataggcagcccgctttcgggcacggccagccattctcacagagcacgtggtgaaccccgctgaggagagcaccgacaacttcaataaaaggagcagcagtgatctcggaattcagaaaacacttgacagagttccgcatcaaaggttaacagccagtgtctgagagccgtacaccgagagggaaattgctattagactgataaaactccaaacagcaggaaacaaagaaaatgctcaaggaggaatgggaaaagtcacagaatctgacgtgggctggtggtgaaatccatgatttttatgttattttaaaacatctgaagggaaaccactctgtgtattctagg

SEQ ID NO: 29427 - DNA, 532 bp, Bovine  19866881133200
  misc_feature (1)..(1): n is a, c, g, or t
nggtccctctgctcccgcttactgtgagcccggggcccggaactcaggcgcggcaccggcggctcggcgctgcgggcagtgggatccgagcgaggggcgtccgcgggcagcgccttgcatattgttatggtgaccgccgcggcagccgcagccggagggcagtgaactgtctgcgacccgggcggccgggccggccctcggctctctccgccgggagtgtcgtggagggggcacgaaagccgctgcgcccgcccgggctccggggcgcgcggggctgcatcctctctgtccttcggtcctgcgattcggcctctcagatgtcctcccagcggcggggagctcgccagcctcgcctgcctctgctccctctcggcttgtgaaaaccacattctgaagatagtaattatctacaatctttaaacggcagcaattagggacttcatctacttcctgagtttccttgtgacatttctattgtttacacttaataagcctaaagagaggcttcgctgggattaaagcaggataaagt

SEQ ID NO: 29428 - DNA, 968 bp, Bovine  19866881152353
  misc_feature (1)..(1): n is a, c, g, or t
naaacaagtaggcagatttgtaaagaaatatccctgggagttgcgggccaggaaaggctttcctctctcttgggcacctgagttgtctcattttgccctctcctgtctgccctgccccctctgcccaggtgccctttggttctgctatttctttttacatcttctcattgcacttcagatcagactctccaatatcccttaaagatactattccaggcacagaagacaggtttgtgcatataatacagatttttccagatgtcttgcttataagcagtgctttcatagagtaaatcattcccaattctttaaagctaagcaacattaaagtcattatttttcctggaacacattccaaagattatgatctatgaagaacaccaaaatgagaatggatccctaggtttgttttgttgctaattttattcatttgatttgtggagttgataggtaagccaatgccctcctcatctctggactgaagatgtgctgacagctccatccatcaagcaagttgtcagagcacaatgcttcacagaggttgttaaacagaggtccagctggctaacacttccaggagatgagaaagaagaaagttaatcttatgcccatagaaaagtatttcattaacctggcagagaaacggatatggcagtaaaatctttagtcacaggtattagaatttaaagacaaatctcaaacagatgtctgtatttctgcttcttttatgatcctggaatcaatccctgcttgaaacacattgataaataatcagccaacaatggtgatatcactgaaatatggatccatcttcattaacaaacttaaagactatttgtgtctataactatggggcagagcagatagaggagatgtaattccatttgcacagactcgtccactgaggagctagactgcagctggatgccttcaacaattagggaaggacggggccatttacacagtta

SEQ ID NO: 29429 - DNA, 2633 bp, Bovine  19866881193188
  misc_feature (1)..(1): n is a, c, g, or t
ncacaaggacagggtggtaagaagtcttcctcccacagcacaggagccatttctgggcacaagatttgggctgtgggatgtgtacagtcaggggcatctcagagtgtctggtgaagctgagtagtcaaccttttttttagggaggaaatactggtatttggagtttaagagttgctggagaaggattgcttgtagagagtctagaggcctcttcggagaagagggactaagtccatcctttgccccctgacactcaaagtcacagaagtatgtcaggatgtgatggtgaccacagcccgtcatcagagtccacttgggtagtgatcatggcccctaatcattatggggaggaatgtatccggctagaggaaaggcccctggtctttttggaagtgtttgctaagagcaggaaaatggtaccttattgaaaattggggatcaagtgaatgctcacatgctgaatagtaagatcttctgttgtcttccttctctcggtttctaaaacagtagaagtgagaccagtaacatcagccaggaaatctgaggattcttctctgaggaaacctaccagacctagagaaaaagacctaccagctgccaagtttcagaattctgtccccatcaacaaaacagatgagactcttgattactcagagctgggcctataagaaagaaagaactaataactaagtatttggtaaccagaggttaaagcagctttcagtgatagtaagatcaaggtgaaggtagaacagtgaggaggaaaagaaaaaacacttgggaaccaatcagtcaacttatgagtccaacccttaactaacggtgagttccagaaaacagtagtggggagaaaactacaaagaaatgattcaggaaaatgcatgtgcctccagattaaacgggcccagcaggcacagacaaaccttgttctttcgttccagttgagcaactgccctatgacagaaatatggaagaaaagaaatatattcattgatatatatatatatgaagtctgtaaatatttatactcatatactatagacccagctgtggatattatgtagatagtcataaccatgacagtgaatatttaataaaaaattactttatattagcaagatgaacgagggaaatctggctgagaaagttaaaggctcatcttgcaaaataggaagtcaaaactaacatgtaactgaaaaccgagagagagtacctcggtaggtcatgtcacactgaaccaacttgccgagaaagcctgtggaatttccaccctggtgtgacttgagacaggatggaaagcaatctttcaagcctttgctgatgacttctatgaccggattttgtctctggggtaggtggggcggctttatcgtagtgagattcctcaaggagctatgcaagcttcttagggcaggcttgtttaacatactctttctaaggaatactcttgggttacaaggactgcatcagtgcattcatcttattctgacaagccctgatctctgcaagtttcttttctcctatttgagaaggaacatattatggggaaaatacaggctctggagttggactgcctggtcccacatcctggttctttgtgaccttgggcaagtgaagacacacccaagtttccccatctataaaacagtgatgataatactgcctccttcctaaagtgattgtgaagagtgaatcagttaatatattaaataggtaaaatctttcaactagtgtatggcacatagcatacagttgtacgttattttatattaatagttttttatttagttaacttttttattttctgctattacactgttgtcttcttgattcagttcccaaaaatggaccagtaatttagaagcaattcattgaaaaatgaaaggagtgacagaaataggaatgaaataccacagctcagaataacatcataaacatcaatagcgaccagaaacccagtgtaattatagaatgtgaatctgccaggttgatagttttactcaaatgacagaaaaagaaaaattgtgagcagaaaggagcacaatgactgtctgaaaattgaattttacttggcagatcatttttttgtccacagtctccagtgctttctctgttatgaaactttgtcaaatagtgacatgaaacgctcaacacttttgagtcattttcaggcaaagtacagtggcctttcctagtaagccagttgtgtcttcccagatcaagtatacaatactgttttcagggtgaaattgatgaatgttgtcgctaagggcccagaatagaatacctcggaggcatggttcagaattccattcgtcatagccaaggcagatttgccgaggagtctgcaacatcagcctcgaagctgatggcaaatatactcgagaaagagggacaagcttttggcgaaatcactatatcaattgctgctgttgcctgtcacataacgtcagtggtacgggaaagtcatcttgtgtgtggggggtgaatattttactttatagcttgttgaaatcactgatatacagggtacaagtcagtccttagcatatatctgataacatatatcagggagaaagggttcaggagtttttagagagttttttagatgcttattttgtgagctctgatgt

SEQ ID NO: 29430 - DNA, 1202 bp, Bovine  19866881303968
  misc_feature (1)..(1): n is a, c, g, or t
ntatgtgagataggacagtactctttgccctgctccaaaactctgagtgtaataagaacatggctgtttcatttttctgtcttccaaatttcccataaaacagctctcaaggtccacactaacctggaagtctagagtgaagggaattctgagaaacatgtatccagcaaaacttagctgacacagtacaaattcattatactctcatattttccttttataagagtaatggttttttgcagatctatttctactatcaacatctaaattagtttgagcaaggaacatgtctgatttatatttgaatctgaagctcctaccttaaatggaaggtacttaatgttcagtaaaataagtaataataatgtattcttaaacataacaacttaatactgagtaaaatgcttagttaattaatattatttttatgtatttcttccacattggttgagaaaccagtgtttggcatttgtataaccacctgagtaatgttctggaaaagggaggtttttttaatatccatgctggaactgaattctggaggggaataaacctacttcattggtaaattttggtagggtgctgactgcttcaaaggatgtcagagtaaagtattccctttggaatgcagtgccaagttttccaaacaggtgggaaaggttaattattttaagcatttggaacttggcaacaagtaggatggaacaaacatactgactagacatatgctatagaatattccataaagctccctctcatctgtagtggtttacacagagagcagaacatatggcaggatttgtttggctttttctctggaattatctgtcaggacatgagctgccacctaattacccactcacattacactctgcttttccatttttggtctgatttctcaaagccttcagacactgattttttcatttttttaaaattaattttatctgacctactaaagagttgtgtgcatttctgggagacatttttagagttttgaaatgtggactccatctcctggctctttgactctacagcctatcaaggcaactgtatcttagaaatgtatgattgatcaccctactaaagggcaaagggcttggagggaatggtgggaactactagaatcaaacttttatgttttcttgagcacctcctatgtgtaggcatgtctctcagtggaagcagtacttctctaagtt

SEQ ID NO: 29431 - DNA, 1113 bp, Bovine  19866881411714
  misc_feature (1)..(1): n is a, c, g, or t
ntttgctgggccggtgtttattggttctgccggtccatggtattctaggatgaaaacattggatgaaaagccccgtaaagagtgaacaaacagtgtagcaaagacccagtgatcttaacagcgtctcagcagagtgggcttagttaacagggttaacagtaatacctgccttttactgcatgtttaccttgtggcaggcattgagctgtatgattgatgtttcgtctcatttaatcttcctaaagctttacaacatgggggctattatccccgtattttatagaagacacaacagaagttcagagatgttaagtaatctacccgagattacacagtcaacgagtagtaaatggcagagttgaaatctgctcgtaaccattatgtcatagcccagcagtgggatgggtgtaatattgatgaagtgtgattatttgacttggttaaaaacccattataggtggtccacttgatcacacttctctcattctaagtggcaagagaagcacagttttctttcctaatagctactattgttaccttcctccgacttctcttaaagactgtctttttggacaaagactgggctctctgtaattccttacactgatgttcttccaccaggggagcctgcagagctgaataatgttcttagatttggtgtgtctcatcttgtcactgattagtcctaagtcttcctggcaaggctcctgccaggctatttcaggaaacaaaaattcattacacacatccttattgattttccctctcctttgcttattactgaaatgcttttttccctccctctcttgaagaaacagcattgcaattactggaaacttgctctcccagcagcctgcctccaggaccagagggtcctgctgatgttccaaggaggtgggggaagacgggccagagaagcacctccttctctgctgtcctccaggagtgagctggctgattgcttcattctaagtggctcctatgtgtgcgacttagtcatctctcatcagatatacaccacaaccttgtctggtgattgcccgcatttgctggtttcaagcttttttctcagtagttttgggtgtaaatgctatagtgtgtataccaggaaag

SEQ ID NO: 29432 - DNA, 1276 bp, Bovine  19866881425942
  misc_feature (1)..(1): n is a, c, g, or t
nctgtgtgtagcagagagagctaagcttccccgtgttggtaatgtcaaagctgtgctttctatcacctccttccaggctgagagaatatcatagtcatccctggatattcagtgtctagcatacagcctgactccataatgctggttacatttaattaaatatttgttgaaaaattgaggatattgacatgggaataattattatgacacttctttgatgtgtaagcttttctgtacttattttattccacctttatcagttaccataggctaagttatgctgcagtaacaaataactccaaaaatctcagtggactgtttggttgcttgtatttcatgaattgactgcctctctgctccatgtttccttcatttcaggactcaggctgaagaaacagctatttcctgggacattgtgagtctcgtgggagaggagatgagggatggaagaattatctatccattaaagcatccatttatggtcattaaaacttctgcatagaagtagcacatgtcacttccactcacattttgttggccaaagtgagtcagatggctgacatgaacatagtcaggtgggaaaagtataatcttcctatagaaagaatctattgggtgggcccattgaggagaagcttggaggagaagcttgtaagagaagcaattgatgttttgaagagtaatgcacacaccccactgctctattgcaaaataaattttgagcctcttaaaatagatactgtgttttatacttctgttagcttatatatatatagaatggaacttttaattactcttataatcttagtccttcttcactaaatagtaaacttaattatgctattataggagtcagtcttatgcaaatacagtggttctcaaaatgtgttgagggaaccctagtactttccaagacacactcaggaggtctgtgaggtcaaaatgattttaataataatactaagttgctatttcctttttcactctcattctctcatgaatgtatgggttttttttccagatgttacatgacatgactattggaacagatcaaatactgaaacaaatatgacaatccagttatccaggcattaaagagatttgcaaaagtatgtagtaataccactcttctcactaatgttttcattttggaaaatgaaaattttccaaatgtgtttgataaaaatgttcatgtgtattatatttttttcttaataaggttaacaaatgtattttttaaatttcagctttaatttctaatatagcaatatattat

SEQ ID NO: 29433 - DNA, 686 bp, Bovine  19866881545128
  misc_feature (1)..(1): n is a, c, g, or t
ntggggagctaaaaaaatcctgaagtccggcaaatgccaaagaaatgatatcaggctctcttgaggtgggacctccgtcttttcacctctatttagatgtaggcagaagtttggctgggtcaacaggtgtaatctattaaacgaggagacagatgttcattcacgataaaaggacaccaagctgttcactggcattccattccaagagccattatttaccatctgaaacgcattgccttcatcagttatttcatgtctctttcaccaaagtcaccaagaggatttagtgccctcaaaatagagcagccttctattttgagggctcttctgaaaagttaaacctgagagaaatgaatagttccttgtcctctgcgctcccatttagcccattgaactacacaaaggtttttaaataaccaggtgatgtcttgggcaggtgcctcgtagccagcattagtctttccaaatgaccagcctgatccagccggttctcccatttcccctctggctcagaggctttattcctattctgtcagcacaggaaattgctggcaggtatcttctttcatgcatgaggcaggggaaacaaagaggtcatactgctcagtgcttggactgtgttcagctgagactggaaaattttcccccagaacaaagccattccatttctgatgaaccaggccacc

SEQ ID NO: 29434 - DNA, 1403 bp, Bovine  19866881564923
  misc_feature (1)..(1): n is a, c, g, or t
nactgcctgagcatggtgctacgggaggagggagccccacggggttctcagaggaggccgtgggcctggacagaaatgagaaagagcctaagttagtctgagaaacttttcctctgaagttctgaagcaccatatcccccagagaaatttctttcccttgtgtgtgaggcccaaagggcagctgcctctaaaatcatcaggagagttgataaatatatggatttctgaagcctttctctgacctaccaaatcataacttgggaggtttgagcctggaaagactctaatgagccatcttggtgaacctcatgcaggctaaattgagaacccccaccccagatgatggcccaagcaccaagtcaaacatttatttattcaacaaacattactatacacctccatgtgctaagcctagtgctgggaaatgagtaatacaaactactctcattatcctctctgccatgagcaataagagaatcaagcatacgtctattctgggaataaactatatttccaaggtcaccgaagttttggagaaaaactattctaattacggcttaattgatagaaggaagacctgggaccctcatgggctcagattcaaacactaaagaggtccaagtgaatagctctggagggctattctgagcttcattaaaggacgcccctgctgcaaagagtttgtctctttttctctcctttaaaagtgtgaacacaaagaaatatcaaggaaatgcaactgggaaaatgagactgtttttaaaagtcatttgcagaactggacaaaaacagaggaaattctgtgaccgagtccacccctgtactgcaaatccctgctcattttccttctgatttcttcctcaaaagtaatattgcgaggtaaggacagagtccacctcgctgtagatggtcctggtgtcatccctgaataacacacttgagcaaaccagaagcattcaggcaggcaaaatgaatcccaggaggtggccttcacagttgggaacaagtctgactcatccagtaaaaagaaatatctaacctaaaacatatgcatttagatacaactctataaagccaatgctaattaatcctcctgctcatataaaatggcaaagaaattaacaatattgccaagtctgaaaaagtcttttaattgcactgcggttctttccaagcagcaggcatctgagtcacacatggccgtaccccccacacccaggcggcttcgcccttcatgcaaagcacttggcactcaggctcacaaccatgttttgttgaagcctggtacacatctcccccacaaactgctcagaaaccagcaaggtaagtcctgtttacctttgtaaaagatcaactgctgaacattggcaggtaccctaggaaccccttcaagtcccctctgg

SEQ ID NO: 29435 - DNA, 697 bp, Bovine  19866881660577
  misc_feature (1)..(1): n is a, c, g, or t
ncctaagggcatctcgcagaaacctcccaaactgaaaagcaataggaaaaggaagggaaaaaatgcaaaccaaatatccaagaaccgtggagcgactacagagtgtgcagcctgcatgaaatgggattaccagaaggacaagggagaaaggaacagatgaaatatttgaagcaataatgactgtcagttttccccaaattaacgtcagacacgcaaccatagatccaggaagatcagagagctcaaattaggacagatgtcagaaaactatgcctcggcatataattttcaaactgtaggaaatcaaagaaaaaaaaacctctggaagaagcccatgaaagagaccttacctctcaaaggagcaaagaagagaattacaacaacccttcagaaacgaagcaaacgagagtgaagtgaagtatttaaagtttcgagaggaagaaacccaccgacagagagttctttgctctgctaaattatccttcagaagcacaggagaaataaagattttcttggacaaatgaaaattactgccagtatctcttgcttggcaagacataggtacaaatgcagaatgaaatgtgtgctcttaaccgtatctctgggtgcagttcaccgagtgttgagtatattcacatcactgtgcaaccatcttggatattttttggatcgatttttgatttttttaaatagatga

SEQ ID NO: 29436 - DNA, 1628 bp, Bovine  19866880200225
  misc_feature (1)..(1): n is a, c, g, or t
ntggagaagggaaaggctacccactcccaagtgtctggcctggagaatttcatggactccctagtccatgtggtcacaaaagttggacaccaattgagcgactttcaatttcactttctttaccttctgagccaccagggatgcccagggaagctgattcagtagcccatacttatccttccaacaaatagtacaggattatttgctactgggaaacacatttttattttgcttgttttaccatacttaaagctaagaagggagaaggcaatggcaacccactccagtactctcgcctggaaaattccatggacggaggagcctggtaggccgaagttcatggggtcgctaagagtcggacacgactgagcgacttcactttcacttttcactttcctgcattggaaaaggaaatggcaacccactccagtgttcttgcctggagaatcccagggatggcggagcctggtgggctgccgtctatggggtcgcacagagtcggacacgactgacgcgacttagcagcagcagcaaagctaagaagacataggcctcagtgtctttctaggtttatttataatgtcttgtattcccttcttaaatatagccccttgtatattccactcaacactagttttcttctacttcagactgcaattgaaacctctgtggcaaggaatctcatgtccttgaatggcgctttgttttatgtaggtacaggctgcattttgcttgcaggtgaagtaagctagtaaaactagcctattaaacatgtaaaaagccttggtcagaatacaagtcagataatactcaggatctagaatgataggaaaatactgcttttcataataactttactatattaggaatagcctcaaaaggaatgacggtacatttaatttgttagcaacattagcctcatagaagtagattgtccaaaattcatattatttttcaaaaaagtattttcaattattatatccatattctaagagtaaaaagtacatatctgttaatgaatatatttataaatcaatattattagcaaggcttccctggtggctcagcagtaaagaatccacttgcaatgcaggagacacaggtgtcaagggttcaatccctgaggctggaaaatcccctggaagaggaaatggcagcccactccattattcttgcattcttgcatgggaaatctcatggatagaggagtttggcgggctacagtgcaaagagtcatacacaatttaacaattaaataacaacaaaatcattagaaaatgcaatgtttcctaagtgttttttgtttttgtttttttttttgctacagagaatcaagtaagcactttcaaaactaagctatctgagcaaactaccttgaatcatacatttgtctttgtcctggtaggctgaatagaatcatggattattaatttgctatgtctcctctttctgcagctatgagcttgcatttctgataaccatctgctctcacgtgttccctgtcccactctgtgtcacacgccctctcccccaccctctcccctacaccctgttgatgtagaatggtagaaaagagttgagttcattggcttgaatgagagaaagctctttaaggtcagaggcagaga

SEQ ID NO: 29437 - DNA, 1479 bp, Bovine  19866880221395
  misc_feature (1)..(1): n is a, c, g, or t
nccttgatgtactccttttcctatttggaaccagtctgttgttccatgtccagttctaattgttgctccttgacctgcatataggtttctcagaggcaggtcaggtagtctggtattcccatctctttcagaattttccacagtttattgtaatccacacagtcaaaggctttggcatagtcaataaagcagaaatagatgtttttctggaactctgttgcttttttgatgattcagtggatgttggcaatttgacctctggttcctctgccttttctaaaaccagcttgaacatctggaagttcatggttcatgtattgctgaagcctggcttggagaattttgagcactaatttggtagtgtgtgagatgagtgaaattgtgtggtcgttcgagcattctttggcattgcctttctttggcattggaatgaaaactgaccttttccagtcctgtggccactgctgagttttccaaattttctggcatattgagtgcagcacttttacagcatcatcttttaggatttgaaatagctgaactggaattccatcacctccactagctttgttcgtagtgatgcttcctaacacccacttgacttcacattcccgaatgtctggttctaggtgactgatcacaccatcatgattatctgggtcatcaagatcttttttgttcagttcttctgtgtattcttgccacctcttcttaatatcttctgcttctgttaggtgcataccatttttgtcctttattgtacccatctttgcatgaaaacattgtccaccccagaagacaggcctactctgagacgcagacaagaagaggtccctgcatattaaagggcaacaagtaccacaaatacacacgaaatgagcatgcacataggctcctttcccactgggatccagtgctcagtgctggcccagtacaatctgtaagtctaaacatccactcttacggttaataccgttcgcaccccaaggaaatgctcctactcattttatacccaataaccttgaaacaaaacgtgatgctgtgaggctgtctgtgttgtcctgcttctgacaacagagacagacaatgccaagagagaggagtgagggaagttcagataagataccagtcaaatagcctgtgaaatcctcctctcagcatgaatacaagagcttcttacataatgaagtatagtttgccagatgtcaagcatctcttcaacttctcttcaggttccagtgtgtggttcaggggaagacaacagagtctccaacctatgatggttcgacctactaactttgcaatgacgcgaaagtgatagtcattcagcagaaatgatgtgctaaattttgaatttgctcctttctaggactagtaatgttctgtacaagactttctaatgatgctgggcaacagtcgtgagctgaagcttcgatcagccacgtgatcccaggataaagaaccaaagcacttaaccca

SEQ ID NO: 29438 - DNA, 843 bp, Bovine  19866880319991
  misc_feature (1)..(1): n is a, c, g, or t
ncctagagatgggaggctttttaaggaactcaatcaagacaggattcatgagatccatgagctatgactttgtgtgtgtataatctctatggcagaaagagatccatagcttttgctttattctcaaaggcactgcccccaaccccaccccccaaaaaaaaatctctagcttttaaacaaaaactatagaagtttcctggtgcaaaatatatattgtttaagaatattaaagagaaaaattatttttttaaaaagataaaattgttgtttgactcatgcatgtgcaactcttgtcttttttttttgtttaatgaaaggtcaaggctttttcctttctatttggataagcaggctggaattctgtgtttgatttgtcttgtaaaaagtacatcattaaaagcatagcacaggagttctagtttcagtttgttcaaattgaaaaaaataactgtaagacactagaggaataatatgaataaagaactctagatttttataattttaaatgaacttttacagttgtcatgctcatacttaagtcagtagcatttattaggtgacttacctttgtcaagtcttttcaacatattcaacttaattgaaacaatactaattacatttcacctatttaagtaatgttgaactaaataatgtaattaaaattacaggagtgtacaaaagtagactcaataattagcatctctccttcctatctagtttccaaataagttgaaaataaaaccaagagcaaatattgaggtcagaatatcactttcataatgatataagccaggatgaaggactagactttaacagtagtctcattgatggtgcagctattag

SEQ ID NO: 29439 - DNA, 2806 bp, Bovine  19866880388430
  misc_feature (1)..(1): n is a, c, g, or t
nctggaaatccagcttttaaaaatatcagaccgtgttttaccttacatataaaataataactgagtttcaaatggatgaaatgatccatctatcatctgcctttttagtggcagagttaaatctcaaatgtagatcttcaaattctaaattattcttgtttttcaaatgaagatgatactcagggtgtttaaaaggacccaaagtctcaggaagccaatgaagtatcagaactaagaagataatcaccggtcttcactctaaaaatgcattaaagtgatttctagatcatctatttcttagtatcattctcaaatttctttggtcaagtaacgtgattattcaaataccaaccactaataaccaatttttataagaaataatgattcatatattcctgagtaaatcagctttaaaaattagaaaactattcattaacatgaaattgaatgtgtacatgagcatctgcgaagagttcactgagtagagttaaaaggtttcattcgactgaaacaaacctacttccccgaatcccatgtatttgccaaaatggaccaaggattggtcatatcttgacctttccactttaacccattatctgttctacctagaatgccctttctacccatgtcaaaggactcaaaagcccattccacaaaccttccccgaaccttccaatcctatacacccctcctttcctctgcactcaagagcacttcatcttttgcattccgccagcacttttccttcttaactgaactactgactaaacttccagatcaactctttcacaaccacacatttctctgattgagcacatccttgaatgtgtataaatttaattatgtgtcccagtggtgctttttcatttaaaaggtcaaacagtcagaggtcagcggtatgtttttacagacaaagctgatgaatgcaaacactgccttactaagagtaggttttgagggaactgagttctttgcttgccagtcgaatagttttgcaagcaaaaattagaagccacttgaagagaagtaaacagttttgtgtgtcaaagttcaatggttattttgactgtcccaatgctgaagaattcacaaaagaagagaaactgacaggtgtcatggtttttatcacaaaataaggaaaaaaataggtgcttgcctagtggctcagaggcaaataatctgcctgtaatgtagggagatgtggattcagtccctgggtcggggaagatccctggagaaggaaatggcaacccgctccagtagtctcaccagggactccagtagtctccactgagacaggagcccggtgggctgagtccagtagtctccactgagacaggcagcccagtgggctgcagtccatggggtcacagagagttgaacacgactgagagcctgggcacacgtgcacgcaagtagagaataattacaaagaccatagagaccattccatctcaatctttcacaggatcccagttaattctggaggcatccaaagaccataaataaagagatgctttcttggcttcagtggttaccaatgagagaaagtatgtgaaagtgttttataaatggtaacattcatgtaacatatgtatttttatcatcatcattaccagcatttcatcatcattattatagcagataatgcagcactaaacattatcagccagtatcaaattagacaatatatgaagcattcaaaaatatgagtatatgagattcttttctgatcagcttaagatacctgcccttctttttctcagacatcctgatttttctttttttccggaggtggtggggtggggaacacaggaaaacaccaacaatgtcattcctctctcagtttcatgcccctttccctaagaaaatcttttacattttcttcagtctgaggccttaaggaagatttactcacaaatcccagaatcctcctaatctaccaacaaaggtgtttttcttctcaccttccaaaaaggtgtaagtcagtcccagcctacaaatacagagcctgaagcagatccatgttttgtggggtctaaagcttttacagtttagaagggcggagttctttaaaaataacccagtaaactaggttatttttgcatatttcacaaaattgcaagaccacatgacacagtttgggggccctttgcaaggatttggaaagggggttctgaagttagcttcactgtaaatctacttttgctcatgaacccctgacgaaactagagtccttaagtgcaatgaacaaaagaaagacactctctttctacacttcttaccataaatatagtgcaaagatccctaaacaacagcaatgaagcccagtttaccccccaaacagcagggacagacaagtcaaccaatactcatgattgtgaacttccttgagtctttcatggggacatggggtttcttcctcaatcccagtaaaatcacccttcaggggcagccacgtcccccacctatgagcaaaacccattctataaactatgataactgagttataaggtcacagagaatgcagagaaactcatggcaaataaagacattctgctttgttttcaaaccttaaagaaatatcttgggaacctgggacatgtccctacccaagaaatgcatgtttgcatttaaagaaccacttagtccatcacttcagttgtctcctagaagtgttccacgtggtggatataaccagtctccaggaatgaggaagcactgttgacaccccatcacatgctttgcagcagaaccagcagtggccaacagaactctaataatgggcatctccacaagcacagat

SEQ ID NO: 29440 - DNA, 1275 bp, Bovine  19866880429041
  misc_feature (1)..(1): n is a, c, g, or t
ntccaaaaaaaaaattccatatgacacaattttgctgtgccaccaattttatgccatcagaaaccacctctggcctatgctaaaaacaacaataaagaagataactattagcatgcaaaaacacatgttctgttcttagatccctctctccataaagtttgaattgttcttattgcatgaactgttgaaccaattagcagtttctagaaaccccaaaggcctgttttgcacgttattgttcctcctctttccaaccctcatgtacccagtgattctaaggatgcattttgaaaaatatcgtttctttttattctgactatatagaaaggtgcttaattgggcctttgtcatttaaggaaagtgaacagatggaggaaggaaaattaataactaaatttccccacctcattgattgagcccatcacaaagaatattagaatgcttgagattccttctcatgctttagaatatgatcctagaaactaccaagcagtttgcagaattcttaaagcaaagctattccattatcagtgtaacaagcatgaaccacatcttcagtttgagaatcaagacaatcaatcctttgtgtttttgcccaaatttacttgctccacctctactccttccctcacccctgaagtctagaacctcctatgagtctccattcattgctcaaataaccaagaatcacactactttcttaattcaacataaagacctatctctaaacacatcctgaaaaggggacagggatgccccataagtctacaagtcagagacttctaacattttcttttaatgaagtttattttatttgcacattgcaccttaaagtcttttattatattctgtgaaagtgaaagagcgttagttgctcagtcatgtccgactctttgtgaccccatgaactgtagtcctctcccctcctctgtccatggaattccccaggcaagaacactggagtgggttgccagttccttctccaatgcatgaaagtggaaagtgaaagtgaagtcgctcagtcgtgtccgactcccagcgaccccatggactgcagcctactaggctcctccatccatgggattttctgggcaacagtactggagtggggtgccattgccttctccgcattatgttttacttcatgtgaaaaatatgctgattaataccactaaaatgatttaatgtaccatgcattgcacttgagaagctggggctgggtacaattttcaatggttgctgtcacatggtgcctgctgtttaaaacaaacccaa

SEQ ID NO: 29441 - DNA, 2134 bp, Bovine  19866880429877
  misc_feature (1)..(1): n is a, c, g, or t
ntgcatattctactttctgcagcatttgcaaatctgaccagatatttcttttgaagatttttataatcaggtaatcagctctggatatgaaaatgggcggccttgagccatctggtcttgattgtaaattaatcttaaaagagtgaagataaataggattccagatgaatacagattagaagaaggtcaccatcttctggtgttaaaaaaatcaccaatactcattcaatggactgtatagaaattttatatgcatatttatattctttgtgtttaaagaatgttatttcttataagaatcatagaatattagatatcacagaacccaactgcttcatttttcagataacaaaattgagactgatcaaaattaatgagtttcctaggatcattttaccagttagtgaaaggaaaagcaattatcaagtggtacacactttaaaggacttcccctagtagctcagatggtaaagaatccacctgcaatgcaagagacctgggttcaatccctgggttgggaagatcccctggagaagggattggcaatccactccaatatcttgcctgcacaatcccatggacagaggagcctggcagtttacagtccctgtggtcgcaaagtgtcagacatgactgagcgactttcactttacttcagacactttaaaaaatattttgtcaagtacttttatagataattatttttcattatctataatatcagtattatttcccacatttactctttgaagaagcaggtatttctaatcattggatctcaaaaatacatctgctgcttctaagatgtatgtatattatacatctcaagtatatatattagatatcacagaatccaactgctttatacttatacacagaacccagcaccatatatacttgagaagaggtggagcttagattcaaattcctatctttaatgcccaattttcagacattattttagatggggacatggtctcatgtattttacttatcggataaacctactgatgtgttatattaaagaagtaatacagtaaactgaatgtgaatatgtggcataatattccatctgtattatggatggaggtaagaactgagctgggttaaatgtctttaaaaactttggtcaaacaacagaaaacttctacatcaacagattatacttaaaagtaaagatctgaaatccacttttaaacttaatattaaatataatgtttttataaataatctttgtactgtggggcaaaattgtcatttgtattctgtgttatatttactatatgaaccttttctttggaggacataatttatcttattatatatccagatccatgtactaaatagcagcacaggctgctgtactagcaattattttaaactagaccacacatctgttttttacaaagtcatctgctttgccaacttatgttcagtcaacataaaatgaattggactccatgacctttcaatgaaccatatgattttgttacacatattagtttcaaaaggatttacttttccaaagtcatgctgtatatgtaacactatataggtaggggaattttaatggacattaaacatttagagaaaggcattatgaataatatttaaaataaaatatattgattatctatgatatatttttcaaccatatgcacagcagttttatataggagaaaaggatttttgtcaacaacgatgactggaacatgccatacaactcagtgggtatgagccaaatctctcatctaattttatacacatgagaatattctagatattaaaagtcagtgacaagaaaaactgttttgctatgtaatctgaaaaatcgctagttaagtaataaaaatattttatttttagaaaaaatatatatactcatctattacatactctcatacacatttctcaaggattgcagtttaatgaaaaagaatgttatgtaagaaggtctatcataattttagagaaacatggctcatttgccagttttttgtgggtgatcgcaactcaaaagagccttaattttaagccctcagtaaatagatgtcactcatttagtctaagacatggataaattaggatataaaccaagaattcaagctgtctcctatcataattaattatacaa

SEQ ID NO: 29442 - DNA, 1415 bp, Bovine  19866880441382
  misc_feature (1)..(1): n is a, c, g, or t
nacataaaactgagtttcttggtggtaaatgaccattatttaaacttgcagaaaatactttatttggagaaagaataataaaattttcagatagatattacttcttaaaattataaatgtgggtaagggcataactgccaagccacttagcaacatcattcatttttgacaattatgaaaaaaaatgaaagaaaaaggatcagatttattttttgtactgttttttctctggaagccagtaactctgtcagacagatatgtatttatttacatgaaggacaaagtggattcaaatttgacattaaagactctaatggagaattacaaactccatagggatatgcacacattttgaaggtgattttcttttgctcctggaaaccccacccttcgaggagagagttgtctcaaaaacacatttatctcctttgcgtctgccaacttccttcttcactaaatacccagatataaatatatttgtaatattaagtaggctatctggaaactcagtgtgtatatgaaaaggacaggatttggaaatgagaagtgtgggaatgtggagacttatatctagctgatgtcagaatgagagggagaaaaataaaccttttcttctttgaattcaagcaacctctttatggtggagaattgcttgaacagagaccagacaaagcatgtggtctgtgtgggatcagaagtgaaagatgtgactttcatggtgactaaataaacaaaagcattgttcctttgagtcattcatgaagacatcaaagtgtctttaccaaccagttcttttcattgcagtggggtcttgcccatttcactctttccaattataaaataacgatttcctacatttcaaggctgaataatacaggagtgatcttccaccttttgcatagatacgcacttacccccacaccctcataaacccactgaaagtgaacaagcttcacctggatggttcccgaccactgagcttcatttcaccctgctgtggcctgttgcaacaaaacatttggcttcacaagtgaaagacaggtgaataacacttgggacacgttggaggaagaatacacttttcttctatgatgttcagtgtgttctgcatctgagcatgacatatatacaacaccaccatgtgttgggaaaggtgtttctattgaagtgtcattatctctaatttacaggtggaggaacggagttataaagaaacacacggtgaacttcccagtgtcaacatcgcggttggctttggaatctaagctgtctggatgccagaatctggctccacaccctgagaaataatacaaactcctattgtcctcatcctctcttccaatgtgggtagcttcctggaagcagtggagttccacttgtactggtactggatattattttagccattttggggc

SEQ ID NO: 29443 - DNA, 948 bp, Bovine  19866880444617
  misc_feature (1)..(1): n is a, c, g, or t
natagagaattttatcagaaatatataatcaatttaagcttattttatgcaaattataccctattaaggaagcttgtaagcaagatctctgaaaacaagattctgcaggatttttggcactgctgtgacagacagtactaaatgccagcagacttgcatatttaaaatacttaatgatggagagaaaatataaaattaattatcttggtgagaaaaaaactgtcagacagataatttatttaaaactattttcgaaaattgttacataaaacatttctaaataagagcaattgatctatctaacaatagaaattggaactttaccaaaatggtggcaaattaagatttatatggagctccaatccaaacaatagatgaaataacttgtacctacaatacacaattgattgttcatgaatctattgggccataaaaatggcttggcagcctgtatttgcaaattctaatagcttctatgagtattatttgaggaaagtcaaatatccttagtgttatagccatgccttcaaaggttatttttcaaagaatggtgctgtggtttcatatggtgtgatgattaattttgtgtgtcagtttgactggaccacagggtatccagacatttgatcaaataatgttctgggtatgtgtatgagagtgtttctggatgagacgacatttgaattgagtagagcagattgccctccctaatgtggatgggtctcaaccgatcactgaaaacctaaatagaaggaaaagactaagggggatctttgcccacctgttgacttgagctgggacatcagtcttctctcgccctcagctaaaacttgcaccagtggctctagcagctcttagtcttttaaactcagactggaaatacaccagcagctctcctgtgtctccagtttgaggactacagatgttgggacttcttgatctccgtaa

SEQ ID NO: 29444 - DNA, 2657 bp, Bovine  19866880475069
  misc_feature (1)..(1): n is a, c, g, or t
ntaataataattttactgcttcactaaggtcagtccatagtgaagctggcacatttttattgcaagtgtgtgttggagaagaattcaacgtttggttccattgccttcatttatgctgagctgtcagccatttgacccaccatttgcttttgtatcatcactgaaatatcaacaaagtgaaaatgtaaataacatgtatcattataaaagtaattttgacctcaatggctttctgtgacacactggtggctcaaaaggtaaagtatctgcctgcaatgcaggagacctgggttagattcctgggttgggaagatcccctagaggagtgcatggcaacccactccattattcttgcctggagaatccccatggacaaagcagcatagtgggctatagtcgatggggtcgcaaagagttggacatgactgagtgacaaagcatacaatggtgtaagtgacatggtattagttttaaggaaaatttggtgatattaccaggtgtgcaacacagactgtcccactcccagtcctggactgagttttaagtgctgaaggaagttctgtacagtgccagcatcatctctctcaatgctcccagttctccttgtctcttcccactaatataactgatcattttatccacaccaatagactgatttggaccaatgatgctgaagtcagaccatcttggctatgccttacattaattgcaactttgggcaaattaacttctctgttcttgcttcagtttctttgcatttgtaaaatgatgataagtaataggttgttttgaggatgaaagagttcatgatataccgtacttagacctctacagaacattgtaagctatcagcaaatattagttgttgccgttactattatttaataatttactcctgctagtgaagtttgcatgttagccaggaatatcttgtgcaattggattgaatatccaagtgatagaatttcaagcatagtcagcaaactgttttgttgttgttttttcagtttttagggtctagtttgtggggacaacagatacttcagaacccctatagtcatccatggtatcctagttatgcatatgaaatgactatgttaataagcttattcttaatgttcagtcaataatatactccaagaggagtccaagaggaggtagttatgtctttgttcagtttttaggctctgctaaactactcacgcagtaatttgtgtatggttgggtcctgataaatgcatgtaaaatatatatactgaaaagaaaaaatatatatacatttgcaagtgaactgctccttggaaaaaattattctctaaaagcaatatctcctgagtttccttgattaaaccaaataaaattttctttaaaagaaaacttgaaataacgtatcttctggctatagctcccagcagtacataacatgagaatgttatcattctcccaccccccaaaaaggagccatttgttgcataagaaaaataaaggcttaaaaatgatttccccacaaaaagaagtatagcttattgcatgtattcatatcagtctctgctccagcagagaatgccttacataattgtatttggggaactttcttgtagagagagatttatagtttggggcttataaaaaacctatttttattttaaaatatagactctcagcaagtgtcaccctgaagaatcaggcctcctggactattttgttacattttaggagataaaaaaccatgcggcagttacactattaagctacagcaatggagctgccactctcaacctcattactcaaggctctctttagttcaattatacacctctacagctaaggaagatagatggaggtcatttgagagctgtaaaccacaatgctttgaatgcagaactatgtttttaaactgatttacaccttgttctccagtgttctacagcgggggcttggattgaaatgcaggggccatgattgaaaaggctttttcttggtttcagcatcacagtccatgctggctagcaattattacctctattaaatggcaagggacgatgaatgtcgccttcattacttcagtgtgagcagcaaaaccaaaccaaaccaaaagggaaataagagttcttagtcagaatatcctttggggaagaaggaatgacatttatgtctcctgtaagttttaacttgattgtgtgtattggcccagcaagaaaggaattgggtaattgaaaggagcaatttgctttttcagcattgacgaaactactgtcatgctgccctgatttaactcacatacatctcccagtgtgaaaggggtaatgtacactaaaggaagttaattaaacaaggcaaatccacatgaacttctcccagagaaatggaagattttatgaatttgtgtgtgtgcttagttgctcagttgtatcagattctttgcgaccccatagattctggcctgccagactcctctgttcatgggattctccagacaagaacactggaatgggttaccactcccttctccaggagatcttcctgatccagggatcgaatctggttctcctgcactgtaggtagattttttactgtctgaaccaccagagaattcaaggtaagtgtatttgactttcctgaagcagctactctgcttcaatgttcggattaaattt

SEQ ID NO: 29445 - DNA, 1303 bp, Bovine  19866880506279
  misc_feature (1)..(1): n is a, c, g, or t
nttcgggtaatgttaacactgttttcttaagcaagagaagtgtaaggagcagcagtagtacgggaatcacacagaacaaagtctaggcgctctgcaggcttaccttctggggcataacataactgttcatgcttgaagacactggcatccagttagtgctagggaataataaggtagcaggtgggaccaggcaggacactgagaaatcacaaggtaggaatgtccttcaggctcaaataaacaggaggtaaaaagtcaagttgcttaaggactttgtcctttagacaaagtggtcgatggggatgtacagtatattattaaagacatgcagcctgatggggcttccatgggcatccccagatggtccagtggtgaggactcagtgctttcactgaggggacacagcttcaatccctggtcagggggactaagatcccacaagctgcacaacatggggcagggggagaacatgcagcctgaaatcacacagcccagggctcacattcttcccctgccatctgcaatccagtgggaccctcagtgaatgacttctctgttaaatggaactagtggcagcatctaggtcatcaggatacctgtgttaaatatgacccatgcaaagcactacacccatcataaacacttcaatgttttgtctgttaagggcaacctgatgccaccaccaatacttcccaaacacacaggttttcatagtctcctatcctcacaagtgtggcatgttttgaatatagctttgagggttcccacgcacctgcagtgattacaaagtttccttgttccctgttgtcattaatttttccatttaatttatcattttccaaatccttctcaggctagctgtcacttgatattagatgttgattgggggggaaagtggctgctccagatgaatgagttttaccttgggataagcagtaaggccatctataatgactaatggatcatctgggttgtagtctggtcaaatacacagagttccaagtaaggtggaaatacaccagaatagtcttatcctgtctctgattaagcagcataaaagggaagggatttatggagaaatatgatgtcttttattagaagaggaagaagaaatgggaacacagtccctaatgttcaacaacgtggcgatcttctatgagtatggcgatcttctaagagtatggctatggagcctaagggacacaacagtgtaccacgcagcactgctttctcccacatccaaaattactaaaataaaaaagtcacactttaataccagcctaagagaaggacaattacaaaa

SEQ ID NO: 29446 - DNA, 1149 bp, Bovine  19866880517568
  misc_feature (1)..(1): n is a, c, g, or t
ntgggcctaaaaacctggggttgttacgtttgatttgttcatgtacaagagaaagtagctgatagaatttctatttaaatcaatataattcacacacacatacaaatttaatccagcaagaaaggttttctcgtggctcgtttcagtgacatgagttaagattcagtcattggaggctgctgctcctttcttctcctaaaaagggagattttggccatggacttgtttctctcacaattcttcaactctgtataactaacgcaagaggctgtggctagaactgatataaaccagtgctctcctcatactctttaagggtagcaaccacagccttcggagaaaaaccaaaggcaccatgtcaattacagcctgccttgattcaacaaatggattagcagcaatgttttcaccaccaagcaggacatcttgaaaacctaatatggcaaaatggaaacctgcaaatggtcagcggctactctggtgtagctgaaatgggcttattgatgagcataaacatccttgagccttcataaacatgtaaggcttctgcacctcatgaattgctttagaaatgaaacagaaagaggctgaagcttcagagaggttgccactttctctctccaggctttgtttgacacccaaccaatctctttaatcaaaagcactcttttccgtccacagatgaatctctggaaattgtaaaaaaaaaaagagagagagaaaagaagtgcctctgttgggaaatgagttggtccaggccacctgcttgcctgctccttcatgatgataaaggtaagttgagggcagaggatctgcaaacttgtgtgtgaaatggacagaacaaatggcctggcatcaagtagcttctggatgtgtgcccaaaatgtccagaaaaatagctctcctgaaacaggagctgccacgagggtaagtcttactgctttcacatgcatcaacagtacaaaagaaggtcaaggaattgccatgccacagtgaaagggatattctttctataggaaacagaagagtatccatcacaagcattcttaagggtggtaccccattcacataacaaactgatctgtagtaaacccttacaccttcgatggacacagatccctcatcttgccttgcagctaaggaatttga

SEQ ID NO: 29447 - DNA, 1687 bp, Bovine  19866880521751
  misc_feature (1)..(1): n is a, c, g, or t
nccccagggctttgaatataattttacttgatgagcttccaatatgcttgtccggtttctaaacacagcaacagtcttggacactgcattcctcttgcttgtgttcctttggtctcgggaaaggtccagccttactctttagtaaatctagctgaaaatgctgtggccttggaatgttttacaaacctttcccattctctaactaactgctctaatgaagagaaaaatggtaattgaaatgagactaattagattgtcaattacctgcctcctcacataggtaattgaaatctccctaattatggtgtctgtgtgtctagatgctttgtactgaggaattattaatggaaagcagctttagatgaagtaacaggaaatcttgaaaaatgatttagagcaaatttgttctatctaaagcattcatttttttcaaagcaaaagatgttatatatccaatccagtaatgaattcaccaaggaagaaggaaaatcattctagtatttttcggactataaagttcaggtttaaagaaaataagatgagattaaaccttgaccttgaccttgatttttgtttactgtttatccctggttttgaagatactccctttgggtccacaggttctttttgtttgaagaaataggtttacatcagcaggcaattagagaatctcaagataaatatagaaagtgagatttgcagatgaggtgcaaaaatatacacgaaattaaatatatatatcacacaaatgacttcctctgagtgcccactaggaagagcctttattgaagtggcttcaggggtgagtagaaaaggcagttttgattctggaaaaaaggttataatgatgaaatccttagagttctcattgctaggagggtggtttcctactttaaacaaagtatgttcttagcaacaaggcttctttctcttcagtttcaattttttagtgaaaggtttccttggagagagctataaggtcgcatggataatcatgttatgtttgtattaggatcatttaagaactttttccagccctgcaacatctgatgtctcatcagttttacaataaacttgaagttaggtggggaaagttatgatgacctctgtctgagaagcagagccacagcaacgcagaaagatgaatagacttgacccaatatgaattattgaagatactttaacaattatcttattaaagagaatcttactgaatagagtcttggtccttcctctcttagttcttcacagagaagcaggaagcctactgagatggttggatgacatcacagactcagtggacataaatttgagtgaactctggaagatagtggaggacagaggagcctggtaggctagagtccatggggttgctgagtcagacatgacttagtgaccaagcaacaataacaacaaaagcaacagtgggtgagatacttaggtgagtatcttagggtgatatctctacttaggtgagatatcattatccatgttttactccagtgaggttgcaatacaagatacacctgcctcttttgctgtctaggtagtggtagctcagacggtaaagaatccacctgcaatgctggaggcctggattcgatccctgggttgggaagatctcctggagaagggaatggctacccactccagtattcttgcctggagaattccatggacagaggag

SEQ ID NO: 29448 - DNA, 1293 bp, Bovine  19866880544051
  misc_feature (1)..(1): n is a, c, g, or t
ncattttaagtttggatgtgactccaaaaagcggtcagtccagatggaagagacgatgcaagagaccagcatgcttgagaaaagatgacttgatttccccacagaacaaagttaacacttaaacaacttaattgtaaattttaagtcacaaaatttttaaaagagtggagagagcaatgtcttcctccctcctttcttaaacaagaaagcccagtttataataagtactttaccaaggcatctgcttaaacttttgctattcactcaagcatctgtctgaaaaggagtctggtcttctctagccatgctgcaagatactggtaaggaaagctgtttgaacttcctcagaacactaacatttaatactccttaagtatcccacaggaaaagaaggtaagtcaatattttctcaagttgatacataattgaattagagttttacttaacttaataaattgccacctgggataatagaaccaagaacggcattcaatttcggttctggatcaattgtgttttctcactggaagtctaagtgtctgttaccatgactcccagaggcatcagggcaaaaaaaactgttttcagggaagtgcttggaacaagctggttagtcacacctggctcaagtgaagggccctcacacttatcttgaccaacccatgtatagtgaatcttcagctgcctaggcagggaggagagttgaatttccaaaagttatgatgtgacttcactcattcagacttactgtcaccaaacctactggtgagattcattatgaagatctcagaagcttgcccttctgacattatcagagcgtgtctccaatctctctgtgccaacttcctgctgtaacctttagataagtaaaccaaatttgatttatccagtgggtgggctctgcctggttactccatcaatcccaacctacttttgatttatgttcatgataactcctccataacccaatttttaaaatcaaaaatgtcttcattcagataataaattagaaggaacatcatgactttctacaattcccttcaaaagattaaacccaaaaggctaggtgtacaaggccgtttggttttgtttcatttttccacaatgatacaagtaaacactgatgacatggaataaacccaccaggaggtggatttgtaagttcttatatttaccatacagtatatattataactaccacaaaagacgaggagtagttggaaagcaaatctttactgaaaaacaaacctttaacaggaggtctaagagtttcccaaaggaagaatttaaaag

SEQ ID NO: 29449 - DNA, 4604 bp, Bovine  19866880550579
  misc_feature (1)..(1): n is a, c, g, or t
nggttgcaagacagccctagaaattagttaccatttctaagttgattgactttagcaaagcattctgaaaacttcttgagtatgatcactgactattcaatgaattctccactgtcaaggggcttgtgatcactaatgaaaatggaacagccattctctaccagtctttgaaatacttctatttttagatgtttctgcattatttctgtgtaaaaaagctgaagggttgctcagcagtgaaaggattggcatgaatttccatttaattcctgcaaacaggaacacttggtgatgaggccaaagattctcagtcttggatcttcctgggcagaggtggtccctgatttggaggttgtgaatctggaccaaactctagtggatatattcctgatctaaactaataagtaaaaaaaaaaccactttcaagatccccagcattctgcaaaagaaagagtgagcaagcatctgcaataagacttcagagactttgtaagtctgtaaggctttgtaagcctgcatacaaatagagcaatagttttgacatattcttgtcattgaggagaatagtgtttcagcgactgtaagcttactcaggtgtgccgtttgtttcatgtgttgtaacgcactgcttaggtatccggatggtgcaggtttacggggtaattacctcactgaaaaccagatttcttattgtttggatgtcagttattgaaagtatgccaaagaactctcagaccgctgggaaacccccaacaatacttgcctgatggaggcgcctgtatttttcatgtcatttttcgtgtgtattttttgcgtgctgccagggcaggcaaactagttcagggacgagaacttcacttcttactgcagtaggaagcccctgtcccctgcaaccacctgcactccagctggggaaacatcaaaatgatattgtctctgatggtgtggtgctctgagacaactcctgagccttcaaccaagaagaatgaatgatctgacatttgtccctctgacaacctcctctgcttggaaacttctgccgtcctattgacagcatgacatcagaaaatctgatcttgaaattagatcagttttgaaaacttgaataaacatatattttatagtagttataaatatgtatatgtacaacataaatataagtcttacaaatgtttgtctgatttttgtggtggagggttattaagtcaggagttagtttgctggattgaactctgcttcaaacttctacttgttacttaatctctctaaactaattttcttcttctgaaaatgaggatgaaatagtaatttctcatagttctttttttttcagaattaaatgaggaaaaatacgcatacaaatatctgacaaggaatcgtgaattagttttgaacaccaaccaacacattttgggcttccctgctggctcagatgataaagaacctgcctgcgatgcaagagacccaggttcgattcttgggttgggaagatctcctgtagaagggaatggctttctactccagtattcttatctagagaatagtatattttgggagtttactatcaagcaagttcaaacagaaatccaatcgaagatagatggggacttctatacctttgtgattccaccctaccctgcaacatttcacaatgtctgggaacattattagtgtcagaacttgcagggggtggggaatggagctactggcacttagtgggtagaggtcaggaatgctgctaaacatcctataatgcacaggacaatacctccacacccaaaagaaattatcttgtccaaaatgtcaattgtgtaggggttgagaaaccctgatctagataattccttcatcctcgctttcatgagttagattctatgatgtggccaaagctacttgaaataggttactaagcctgagatgatgtaacctggcaatgtttctttttgctccttcacgtctatagcaattgttttaagcctgtttttattgtacacggtagaccaggagagaccagaaaaccatgctttacagtctgcagacagagccgccctgtttgtgttcaacttcatgcagccaagtgaatcatcactattcagtcttagtaaactgcaaattgaaacagtcaattagaacctcttcaactgcccagaaacactatcttacagaggtctgcttcctactgggtgttagtggttgtttcaggagctcatgtcattcttagtatttctggtttcttatctaatgctgtatttcaccaaatttaataagccattgattctaagatgcagcattctttctttcccttggtgtatattccactgagaaagagcgaaaatactgccattttcaactgtaggattctattgttggtaagatatatgccaatttcagatatgctaaaatgtggaaaaaatgtgcatacttccttaaagttgaggaagaatggtcactattgtccatattattgaattacattaaacttactttgcttttagaatatattttttgaacatttaaattttacttttgagtaacttcattatttccaaactgcagtactctaaaatgtgactattgtaaaagtgagcaaaaattgtgttcaacaataatagactgcctttctgggtgaagggtacatactcagcaattcttatatcttgagaaatataatggtgaaagtatttcaaaattcctgggaaaattatattatactgtaatgtgtgtatagtgttacatactttttatatctattagtatatattcttctactagctgttagagtatgactccttcctcactcattttgacattcagaattctattcatttatttgattacagttcctcaatcttccataataatattgatctattcccaaaaattccttagccttttcttggtaggccaaaatcagaaacctgactaattttggctgcaatgagaagcagagctagaatttgaatcctttgggctcatctcttctatttgtgggcttccctggtggctcaaatggtaaagaatctgcctgcaatgtgggagacccaagatcccctggaaacgtgaatggctacccactccagtattcttgcctggagacttccatggacagaggagtcaggtggaccacagtccatggaatcgcaaagagtaggacatgactgattgactaacacttactttcacattttgcagttattattgcagttattggagaagcacagagaggcagaaatgtcagggtgtataataggtgatgattgaaaatgaagtccatagaaagggagccctagtgagccatagaaagaacagcttgtgctgttgggactcagcctaaggttaaatccggaaacctgaaaatgatgatgtttatatacagcaaaattccttaacaggtcatttcagagtcttaccagaatctggacccattggtccaacatcattggctgttcacacacagttatagtttagtttctttggacagtctttcagactaactagggaaatacaaattgttctttttttggtctttttggggttgatttattcaagctgggcaggatccaaacaggaacccacatttcatatttggttgttaatatttttaagtttttgaatctagagcattcctccccccttttgtaatttgtttttctctaccactgacttgttgaagaaaccaggtcagttgccctatgaaatgtcccacattctttgtctgtttccctctttctggtatcattcatcatctgttttgtggcaatggaatttatctctagaggattctgttactggtggggtcagggtataaagtgtgaatggtgagagttgaggatggaagttaaggctgggttaggttgtagtttgaatgcagggcggagctacctgtggcaggacaattcagtggttagcaaagactcagggctcaagatttccaggtacaaattgtgctctgccgcttaagagctattgaccttggacaagtagtgtaatctctctgtgtcttagtttcctcatttataaaatgaggataacaagaatccttacctcacagggttgctgtggaatttaaatgagttaatacctgtgaagcccttggattggtgctgggtgcatggtatcgctgcacagtgtttgccattctattgtttgggggttagaggcagggtgcgggggggtgggggttgggggctggcctttagttgcagggtaagggtgatttcgtgttcatgattccacccagtaccagagcttctacctcctggtcagagaagcttgggggtggggagtgccagaaccacccctccttgaatggccttccctcactgcctttctggagaccaatttggggttgaatgagggcttcccaggtggctcagtgggtatagaatctgcctgcaatgctggagatgcaggagacagctgttgcctccttggattgggaagatcccctggaggaagtcagggccacctgttccagtatttggacagaggatcctggcagactacagtccatgggatagaagagtcagacatgactcaagtgactgagcactcacgcatgcacgcatgaggtggggagggggaatatatttttttaatagctt

SEQ ID NO: 29450 - DNA, 1825 bp, Bovine  19866880551606
  misc_feature (1)..(1): n is a, c, g, or t
nctgggttgggaagatcccctggggaaggaaatggtaacccactccagtatttttgcctggaagattccatggacagaggagcctgctgggctacacatgaagttgcaaagagtcagacacgacttagcaactaaacaacagcaatcatatattaatatgatttgcagaataagagtcagaattcagaatccttgaggtgcacaaggctttttagcccaagtatccttaattttcggaagaatccttttgagtatagctaaattttacacagattcttacggccatcatctattatattttgtgaacaagtcaggaatgtaaagaaaaatattggattcacttcacaaattaaactaattgatgtaaatagcaattgatggcgattgatgccctgtattctgtcttgtgtactactgaaagtttccacaaagaataaggagattcagctgcacattgtcataactacaactcaaagagcaaatctgatccttctctgaaacacctgactttgggcaagatagataccagcgccttcacctggggagtgctacagaagcagctctggtagaacaaggatctcagagtgtggtttgttggtctctgtggatgcagaagtccatcatatatggtctgcaggcagagtgagggcttcagaggaaatgccaagaaatgatttattcacagacattgctgaattcgaaaggtacggttaatgattatattctgaaagactcagcttattctacgaggactgcagtggccttttcctccctgctggttcattcaataaacagggtgtggtttaatttgtctaactcattctcacctcatttacatatagttgtttatatttgttagattcccacgattcattcttccttttctaaggtgttatattcctgagtcacagaaatggatcagtggctcaaaagttgttaactgaagcatgaaagaagtgatgaaaatagtgaagcacatactacaactttgaataacatcgtaaatacaaatagtgaacagggcttagatgagaatatagaatgtgatgctgcatgtgctgagataactgaatttctaaacgtgatgaattttcatgagctgtaaaagcaaagtttaaataaggacacgggatgtctgaaaatctggttttgttgggctgaccttccattttcctttgagatgtcagcccttgtttgctgatataaaactttgtcaaatagtggcatagggccatcagcttttcaaatcatgctgaagtatgatcaacacactagaagttttatcaatatttttttcagaacaaccattaaatcatgctttccactatccaatggacacattttatttctgaaggctgagaaaaggccactaagaatttctctccttgttggcaaaaagtaaaagaaacaaaaacaaagcactgttccagtaacaatatggttgacaagcttataaaatttaatgacaaatattttgtttggagaaaaagtagtatgagtatccctttatcaaaggatacgattgggtgtcatataatatcagtggcatggcagcagatattgtgttttacagttactgagaccattgatgtcagagtgtgtgaaccagctcttgccaagtaggaagagacattagagaaaatagagcaaatgtttactgagagcttcctttgtactgtgtgccttaggtgttctatttcattttaccaacctcaaaatctatgggttgttggttatgtgtgctcagtcatgtccgatgctctgtgactccatggaatgtagcccgccaagttcctctgcttatgggaatttttcaggcaagcat

SEQ ID NO: 29451 - DNA, 1537 bp, Bovine  19866880607116
  misc_feature (1)..(1): n is a, c, g, or t
ntgggcctcaagcctgctggccttcacagtaaacataggccatcctctctcctggatctccagttttctgactcatcctgtagatattcacaacagcatgatgctccaagataacatgaaatcatatcttacagcagtacttccaaaatgtcccatgcccattgtagtcatttggggccacatgtacagatcctctgaattacagaataatcttttctgccccctatggtacattggtgttgtggttcagttgctaagttacattcgattctttgtgaccccatggactatagcactttaggcttccctgtccttcactatctctgagtttgctcaaaatcactgctcaaactctgttgagtcggtgatgccatattaataaaaatattgacaaacgctttacctccacacctgtgctggctgtgctggcagtagctagcacagggcatgctacagaaaaagcacttaactgattcaactgtgggttgaattatcctgtgccttgttgatatggtcttacatttgtatccctgataagagtcaggcagacctcagtctgaatttggactcttccctcacagttatgtgaccttgagcaaaatatttaacttctttgagatccagtttcattgcctgtaaaatctgggatatagcgcccactacacggggttattataagatttaaaggaaatagtgtgtcaagcatgtagggcaatttgtgatacaacgtaggtactcaagtaatgagagctgttaccatagtaacgatgatactggggatgttggtgatgttagctcaatcttaaccactggaagaaacagtgaaagagctataaatgaacagtaatgatggtgggggaacattttcaaaaataaatattttttactcaacatcaaatatcagttttattccatctagtagaaaaggtagagcaaaactgaggtatgctgtaagtccactaagaggtgctaacttgagtgaatgaaaccatcaatattctctttcctaagtttaagtgttaaatggaaatcccaagtcttactcatatttcctaagttaattatgaatcagatacaatcaatgatgttgtagggaaaacactaaaaataaaacaaatgagtctagagggataaggctttaaacagagctgtgagagatggaaaccaccagcatcatttttctctttccattttcgtgagaacattttaagatttttttttcttttcccctaggcttgcttatcattatgggagagtgataatataaaataatcttctctcagccctcgagcatctaatgaaaatgtacaaccttctgctgtcagtacagcaaggacatcagcaggccgtgtcctggaaagagaccattctttgccaccctctgtatccattcagtctgagaaaacatcactttaacctcagcccaccaacaagggctgtactgtccatgttatcaaatccacattatcagtttttaatcagtaacctccatttccgaaacggctcatgtctgtcacagaaatgctggctggatgat

SEQ ID NO: 29452 - DNA, 2235 bp, Bovine  19866880614766
  misc_feature (1)..(1): n is a, c, g, or t
nctggggatctagagccccggattattaagctgatggcttaataatctgcttgatgtactgtaatttattgtcgtcttttcttgaaactttttattctagaactcagtcattttctaaaatctgcataagaagaaagatattgttaatatctaacaatcttggatcttctcaaatgtacagggagcctgcatagtcatgaaagtcttcaaattattcccccaaaagtaagaattttgacttgacagagaggctatgtaaatggcaggaaaccggtgacttttgaccttgactctgaaaaaccttggccaggaaagtcctttggggaattctttcaggaatctataagttgggaggatacctggctgtggagggcttatctgggcaaagtgatggtacactggtaaatagattgcatagttttgaatttgccagaaagcttcagcttctgtcttatgctacttggaccagtcaaggtatccctcctcagatggcaatactgcagcaatcgagttaaaaagaagaattaaaaaagaagaaaagaaaagccccttaagaaaagagagacactctttgatttcttcagtgctcagggttgctatttttaacttaagaggttggtgccggacactggggtataaacactaaatctaccttgatattcaaagaacccatactgtcacaatctgtgtcaaaagaactttggttttgtgttcaaacctctctattgtttgaaagcttctgtgggagccttgctttagagctgcactctcaaaaagatacctgatttctaccaaaatctgaactggaaggtaattgctatttatattacctactgcctatcagacactgcaaagaccggctgtcactaaacgttaaccttacaacttactacttgacttccagtttgactttctgttttgttctgtataaccaacacacgccatttattccctaggaagaagcttacgtgtatatttagacatctatcttttttttttaagtggcaatgcatgttctgtccacaacttgcttcctatatcagacatttagtaatcaaatattttcccactgatttttattatacatttaaaaatgctttgctttaatttctgatggattcaattggcaaaggctcctactgcttgaagcatcagatatcctcagcctacaacttctgtgtcaggtcgttaatatttcataggatctgaacatgctctaggagcttattaacctatataatgagatggagagtttgattcactaaaattccagggccttttctccacgagattaatagcgttcagaagacttccctgggggctctgcaggaagctgggggtcatgagctggagtggattacatgaatggaatggctgggtggggaaacaggaggggcgagtggcatgatggtggaatcagagaaaggaagaaagtcatacagacacaaagaaatgcacacatagaaaaactgacatagacagataaacacatgcaaaaagaaccttctgtgtcagagcagctactgtggagtctcatagcagatggatgtgtccttaggaattttaggatgtttcactgtgtcatgtgctatttaagctcatatacagctctttcgggcttccagctggtgttagtggtcaacaactctcctgccaatgcaggagatgtaagagatgcaagttcgatccctgggttgggaagatgtcctggaagaggtcagggcaacccactctagtattcttgcctggagaatccccatggacagagaagcctggtgggctacagtccatagggttgtacagagtcagacatgacagaagcaacttagcacgcacagctctttcaagaaaaccaaatataaagatttagactctttgtcaagactaatgagatcagatgtatgttgtcctgggcaatgcatcaatggatagagactgatctcaaggccgtcgagatatatttgggtttcatttaggatttaagcctcttcccctccttaccaccccatcctacctggtctccagttgctggagaaattttccttaatcaaaagtcctactttccaatcccttttgtggaatttatgaactcctcatctgagttttcatacctatcatggaggctacagcacaagattacaagaagtgagtgaaaaaatgcttgtaaacattcctttcaccatgtctggcatgtaatgagtttaatggatctcatatctagatcagtggagaata

SEQ ID NO: 29453 - DNA, 2045 bp, Bovine  19866880632561
  misc_feature (1)..(1): n is a, c, g, or t
ntcagctcattcagttggacaattccctgccttgcatactcctctgacttttctggtcctgaagtgtgtctttcctacatgacctgatgtggcttcttaagacacaaagcttcttacctccttgaaaaaaaatctgttcttctcttagagtaacttgtttctgcagaatcacgcccttcaatttgcactgtattatgacatcaccggagaaggcaatggcaacccactccagtactcttgcctggaaaatcctgtggatggaggggcctggtgggctgcagtccatggggttgctaggagtaggacatgactgagcgacttcacttaatttttcattttcatgaactggagaaggaaatggcaacccactccagtgttcttgcctggagaatcccagggacgtgggagcctagtgggctgccgtctatggggtcgcacagagtcggacacgactgaagcgacttagcagcagcagcagcagcatgacatcaccacgtccaatgattacctggttgtgaataagcccatcccaataaggagcagagatttgactgtggaaggtgatggagttgctttggaagaagaccagttcctttctagatctttctctaaagctcctgctagaggcaactggaggaaacagaagaggatttaaagtcagatgacttgcagagaaattcccgttgttattcagtgcttaagatatgtacaactctttgtgaccctgtggactgtagcccaccaggctgctctgtcctccactatctctcggagtttgctaaaactcatgtccattgagttggtgatgctatccaactacctcatccctctgctgcccccttcttcttttgccttcaatctttcccagcatcagagtctttcccaatgagtcggctcttagcatcaggtggccaaagtattggagaagagaaagcttgcagattgtaatttttccaccactttgattctcccttagcattggggcaattcctgtaaaatatacaaatatttagaaagctaaatgaaatgaacaacagctaaaataggctccgctaggattgtgtttcgaacaatttcagttggcacagccacccaaagtaatgagatttttaaagaactccatgaggtaatcaagtttatattacaaaataaataagtctgcactaaatcagacatcacagtaaactacactgaagtagtgaccaatgagaccaggtaccaaaggttctagtcacagttgtggaggaatactcaaaatggaaaagatgatatctataaacttaattttccctgggacatgggaaatgactgctgttaatcaattttaatgataatttttgtggctcttttgaggaccgctgtatcaggttatcaaggtttgccaggaaaagagaggtaattagaaaaagagtagaagtccataaaggtaggtgcttttgaaaaaaaaaaaaaaaaattaaaagcctctactgtcctgtacaaaaagtttcacttagaatgtacagccgccacctccccctcaacccgccaccgccaaaaaaagaatgtacagcccagaggctggtttcattccatggctgctgtgggattgcttcctatgaatatcatgtcttaagccatagaatccatgttggaaaaggcaggtgcagacacgcagtcttttcagaccctgcatggtcacagattgagggcaggaggagaaggagggtggggaacagaggatgagatggttggatggcttcaccgactcaatggacatgagttgaagcaaaaacagatggggaatcctgggatgctgcagtccatggggtcgcaaagagttgaacacaactgagtgactgaacaacaacaacaacagtggttacaggagaatatgccttgagtctagatcatttccttatagagatacagagtccttgcagcctgtgctgggcaaaagtctttgggagttttttttttttttccttgttttggacttggtgtatacttctttgttctgcttaagtgtgtgcatcacatgacacctggccaaccccactgctgta

SEQ ID NO: 29454 - DNA, 640 bp, Bovine  19866880649160
  misc_feature (1)..(1): n is a, c, g, or t
ntatagcctcaatatttgtctgaagacacttaaattctgacaagtaaaggaaagttctagaagcaatattttcacttcttaaacattctccaaacaacatcaagcattgatacacactgaagagtgcatttatttttttgtatcactccaagtatgttggaatatgcaaggactgtggttaaaattagaatgtataaggcatattataatttagttcatactgaagaagaaattaacagaacaatgcttggttcatacatgttccaaaagttgaacaatctcttgagttagacatagagattttctattttgttttaatttgtcaaggtatttttcttcccttcatgaactttaggtacacataacttatgtcatttatttatggtcttttatacctagtttgtaaattgtaaaatagcaaactaaatgcaaagagtttgcatttgaaaataataaagtagttgctgtatacaaacctggaatctagttgtctcttttcaacagtttttactgcatgcatgatgtttctaaattacttacttactggttgtcatttggttagaacacaaaatcttcaattctaagcatacttatttagaaaataaaaagcattttgacatctaaatggcccttgcccttg

SEQ ID NO: 29455 - DNA, 2525 bp, Bovine  19866880652511
  misc_feature (1)..(1): n is a, c, g, or t
nttgctatgggatcctgtgggctgccatctttaaagattctgagactctgaccttgaatgagtgattcagagaatgccaggggtggaaaaaactctccagatcaccagatgccactttttattacagatgaaaaaatggaggctcacagatgaagagtactttgtgcaaagcctgataacccattaatgaaagagctcactccagaagcccaggtctctctgattttggactctacttaacagaatggacaaattgctgtggaagaaattttgtatccaccagttctgagtgacagatctgaataaagcaatattttttaagggtttgggaaagaagaatgtttgtatgagtatatatgtgtgtgtgtggatagggaatcactgggaagacaaaaggacaattctttctttttctctagtacaatagcattcatgagtaaatgataaagatcaagagatgaagattttttaatttgttttattactgataatgttgataggaaaatattatttcacatgtgtagccacaaggcttgctttaactgtgcacctcaagaaagagttcatgcaaggagagttttagtctgaaaagaaataaatatctaagatcacctcttgtccaggacaggtgtagaacaaagagaatcaatctccagtgtgtatggcctttggataactggactctacttagctcctatatgtggactgatattttacccaccgatccagtgagttgcttttcatctgttagtaaggaaaagggggcttagggagctggcagaagtgactcttacgagtagccaaatctttctgggaggaaggaggtaggcaggaggactggaataaagtctggatgccattgctgagctggggagagtagacctgtttgacagaatgcattgatggaatggacctttgacctttcctcagtagcagaattcttactacaccaagattattttatgagtgataaaaacaccatcctcatattatatcgttctctactttattgcatatgcctaaaaggtatgggtccatctttgtatttttctttgactccctggaaattaacatgctctgattttatgcatgcagagcagctatttgctaaaactttgagggaactgatggtttcagctgttcacattttctctccgtctctcctaattccttattgagaggggctctggcataataaggcatgagttctaatccccaaactccacttcatatgattatgaccttataaaacgctctctccaataactctctgtgttcttcttcacaaaattaagattacaatatttcagggaagattaaatgagacaatggatgttcgttttcccagtgcctagaatatagaagtcactcaacaaatgacttgtaattatacatggggctggcttcatggatgaacagcatgtgcacatacttggtttaatgctctgttgcttccatctcgaaattcttaatcatttttgaacaaggggttctggattttcattttatactgaactctgaaaattatgtagctagtcctgattaaagagttatacgggaataatttgggcacaagttacagggaaagagggaaagacagggaaagagataagagaaaaggaggaaggaggggtagggaaagcatttggtatgatccaatttccactggaaaattaaaatagtaaaaataagaataaatcccctcttctgtacagcaatatttccatgaaaatggggttacagtgggaggaaaaaaaaggttacggtgcagatcaaaagactggtgagcttctaaagcaaagtataactggttttatcattatgcttaagaattgaccagaaaacggagcaaaatcaagaaattcttttgaatagacaaatcaagaacacaatacctagaaaatcaatgcaatattatagaagcccttgactgaaatacttacataacttttaaaaaatggagaataatatataacttatctatgcaagtgaaaaagcaatttttataacattgtacattcagtttttcagaactccagagaatgatttaaaacacaattacacctcatcgaagagataggcaatctaaaatcatgagaagatagtaggctctttatcaatgcttgttgattagtttattaatcactccttcctccatcaggagggattctcacacaaagtccccacctgcctgagagtagctagttgtcttgctccatgtcctaacctgctccgacaatacagaatagtgcatgccttcaacccagtccaccgtcaacatggatagttctccttcatccctaagtaatttttccttataataaacctgcccagccagtagtcatagtttctgcatcctgcattatcttagacatttttttcctaagtaaattctggtttttgagtatccttttaaaatgtggtgcctgaccttcaaatagtcctctagatatatatgcagatgagctcaaaataaagtgggtgtcaaatttctatttctttcgctttagatcacatttatttta

SEQ ID NO: 29456 - DNA, 2856 bp, Bovine  19866880659351
  misc_feature (1)..(1): n is a, c, g, or t
nctaatcttatagctatgaaaattcctcctgggagcaaattaattttttgaaaggcatttgttttggttttgaatagttttggaaaggagcgagtgaaaataaaataagcctatttttatttcacgcaaaattaatgaaattatcagattgcagatttcattctattacaaattcttcctctatgtaaagtgctcagttttagtgaaatggttggctgtgagtcagagaaattgagcagagtcaggtcttcatgagagataaactttgaaacaccacatatgtttaacctgctttttgaattggtcacgcaacactcagaatcagtttcagtctcaaggaaggcatacgtaaaacatttaatgtatgttcatgaagaacaggtcaacctgcccttggcttgtgtatcatttatttaatttatacagttttaggcctttgggtcctttcaaaacatttgcaaatgtgcagcattatggggtttccaggcaagtcttcatcccgtgagttaaaaactagaacaccaagaactcaggaagggaagtagaagataggaagttttgctttctttttctggtttgaaggaagaaagaaattcaccctctgtcccactttagaagaggcttcttagaaagatgtcacaatcttcttggaatcttttccttagagtctggaacttcattgcaaaattccagtgaactttgactgtcatgtccttatgttttatacagaatgatatgtttgccaggtattagtgtgtttgtcctatccattttctaacacttagaataaaatgaacatttaacacttattaagtcaatgtgagcattatgaaagtgaacttaaaatataattaaggattcaacacactaatacctggcatacaggtagaaggttgattttttgagggatgctgttaaaatcaattatcttgaaactcttggcagctcattatgtgcataccgggtctgccaaaatagttcagtttgttgatctaaattttggaagctttgggttaaagtctgcttatttcaaggttactctttaaaaactgtatattgagatgaatatccaaggttaaaggtttatcaggttaagtaattttagaaattttacattgagaagtgaaggatgtggctacttgagttcattctaatcataccaagtctaggtggctcttgctaatgctctcttacattgagagcatcatttttaaattttgtgtttccagaaatactttttttcgttcctcaaccaagaccttatggtgttgaaacatagctacaggtaaatgaacattagtttttcgatttcttagttaaagactagataggcatgtagttcagtgaaactaacaccattcagcaaataattataatgctttatttctctgcggttcctttacatgtagtttttgtttgccacttcatattgtgacgtgctgcagaatggcatggctttccccacctcagagatgaaagtgagcctcagagaagtggtcgatctgaagtcattgagctaggagtacgtagcagaatcagcctgaaaacctcattctcctgaggccattttacttttaaataaaacaaattcctatcgtatatctgtgagaaaagggagagaatgactccagaatactgcagttcagattctatggcaaaagttacttttgagttgttccattaaaactaaaaggacaaaaatgctgaattctgtagcatcagctctggctttgaagtattttaaaaaacataggcatttgtatttttctttctctaaacacaatcagtgttacttcccagtggaatttctctgtttgggctagtagttataaacccttgtattttgatattcttaatagatgttgattggtataacgctatgccaggtctttatatttgatgtatcacatagtacctgcaaaatgcttatttgttttgtacaatcttttggtcttaaccttttgatctagatataaaacaggcagaagcaatgtaattcctgcctttaatgtaatatgatgacaggaatcaggaatgtccattttagaatgtatcaggaagtggggactgggtttattcaacaaccatgttgtgttggatacagtgtgttggttcctgccctgtgtgtgtgcttgtgcacaagtgtgagtgttcatttaaaaacagtaagaataggttcttcctttcccaataagccattcttggaaggtagatctcagcagctgtagatgagataaaatatagaataaattaggtttaggaaaatttaaaactttaatttttttaaaaaggaacccattgaggggcaaatctgcaggaagaatttttctcattctagtttccttgctgaggtcagtttagtggctcacttcacagaatgcctcagggtttgagatttttatagtgtgtataaaatcagtgccatgcactcaatcccagatctgacccaagagaataagacccagggggaaaatatctcagcattatcaataagagaactactttttttttttttttaagaactgaattgcagatccacacttcagaaagatagggtcagtacccagtaaaactcagattaaaaagaatcctccatctgccccaaatattccctaattgcaaacaatatgcaagggttaggaatcaagtccaaaggttaaaggttcttgctggcaagtgaaagagggaggaaagaggtatattgatgcatgtcagtttccagattctggggtcaagctattgtgcctaaaaggaacaaggcatcttcagaaaaagtgtgattatcaaacaacaggtcaaagtttatctctaggtcaatgaaaagggtgggggggagggtcatcattcagattctga

SEQ ID NO: 29457 - DNA, 1071 bp, Bovine  19866880666060
  misc_feature (1)..(1): n is a, c, g, or t
ntctgtgatttagaagtcaaaaagtcataaacctgtgttcatttacatgactggaaaattaatttctctcctctggaggaatggaaagaaggcatttttctcagctctttgtctgtggagtcaatggcctgagaagataaagttcagaatggaagtgatgtccttattaatatcttaatgtgagtctaagtaaactccgggagttggtgatagacagggaggcctggtgtgctgcgattcatgggatcgcaaagagtcggacacgactgagtgactgaactgaactgaactgaactgatgctcaatgttgaatctaaatgttagctcgtaagtgttaggttgaaaagctaaactaagatttgaaactgaacttcatcttagagctcctttcagagaacatttaatggacgctgatatattaagcgtccattaaatgttcaggctatacttttaaagatgaaaacaaggagaaaaatgatagaggcataggatgtgggggtggggaaagtataacaggtttctaccttgatcaaattaacctggtgactataaagagcacctgtgtgagcacagaaatgggtcagtctctaaaaactattgcctatggaataatttgggatttctagctctagaaatctgtaaaagagctgagccattagatcattgtttgagctaaaagcaaatgaatagagtatcagtttgctagggctgccataacaaagtaccatagcctgagggacttaaatgacagatatttattttttcccccacaattctggaggctagaagtccgagatcaaggtgttggctgggttatgtcttctggggcttctcttattgtcctatagatggctgtcttctttccggttcttcatatcatctttcctctgtgagtgtcttgtgtcttggtcacgtcttcttgtaaatttaccagtcatactggattagagtgcaccttaatgaccattctataggccataggccttttttagcttaacctcattttaacctttcacctcattttagcttaatgacctctttaaagaccttattgccagatacagtcacatt

SEQ ID NO: 29458 - DNA, 1300 bp, Bovine  19866880686934
  misc_feature (1)..(1): n is a, c, g, or t
ntgagcggtttctagtagaggcccttgatgttagggtggtggattacacccatatctgctttaggttgttcaactgtattttgaattccagcttttaaaatagcttactaatggctcctagccattaatgttgttttccttttaaaaagctccactgcatgctaatgagcagtttaatgctaacagaagctagtgcatggctatgcaagctgaattctgccatatgcttaactcctgtttcacacaagcactaagtttgcagaatgcagggttgccacaaatatccaagtgcagaattaggtcccatggacaagtatgtgagtgaagaatttggctcatgtatatacccttggaaaaaattttcccatagttttcttttctctaaggtattgaataggccaacacttgtcctcatgtttcaaacatttcagcccccctgaaacattttgattgcctctaacattggctagaattgcaaaacattatgttccaaatgatatctttttcactggcttcatataattccagaataaaccctctgcttcatccactatacccttatgtatatggcttctatttttactttgcttcttcctctgttttctttctactatttcatccaacatgttttgaatttgtgtagttgtttatatttgagacaatcatacttgaaaccaacaatacttactttatttaaaaaatatttgtcttgatgcaattcccaatttggggacctggcacatcaaactcaatacaaagaatgcaagtcttgggaagatgaaataaacccatgatgtaattgacagagttgaagtgttgattccactcatgtggaattaagatctttattttattatcttcaaaactcaacaataacagaaatataagagtagtcttacaatagtaaaagccaatttttttttacatgaatgaggagatttgaaaacgcacattcgtgatcttgtttcttgttcatttcattcagtcatcaaatatgtgccttaagatatgacaagagtatctgtatatgtgtgtgtgctttcattttaaaggactcagatgtttactggtaggttaacaacatatgttactcagaaattggaagacctacattctagatctactcctaaaacacagaagctattatgccccattggagagagagatgctcatggagcttggcctcagttcattaacaaagtagaattgcaccagtttctttggtgcaacttgactttccagggaaaatccagttttatgaccccattttcagctaagactctactataattctgtgaaa

SEQ ID NO: 29459 - DNA, 944 bp, Bovine  19866880721970
  misc_feature (1)..(1): n is a, c, g, or t
nctttctggagtccatggaatgctttgcttgggtttgtatatagacagacacaggctgttgcttttctcagaagtgcattcttcctttagcttgtacttcttcactagagggaactttctttttctcccaatgatgcttcctgagtgacttagattcaaagaaaatgaagctctataatttggaaataaatcccatctttcagacttggcagtaatcttacctttctgtctcttaagcacctggctattataaattctcgttagtctgatactctccctcctctgttagaaccttattcacttttcaggtgtttgcatcttctcttcccagctagaccatgaactccctgaaggtaaggactggtgtgatttgcatccccacagtgcctaagctcagcacctaacacatcacaggcccctggttatgacctttgatgaatgaatttactaggaattaattagtcaggaagagctactggctgaacacaaatgtaagctccaacatggagccactgtgtcttagattagggcttctcacacttgcctgcacatcgcttacctggggattctgttagaaagtaacttctgattcctcggactgtgttagtgcctgagagtctgtgtttagcagggaatgccaatgctgttgttttgaggatctcactttgagtagcaacatcttagacatgaaaattaggcatgaataaatcatttagaaaccatttctttgctttctatgctttttcagaggcatacatggatcacatttctggttgatgtgaagctatgccacttagagacttttagaaatattcaataaccaataaaaggtcttctgtacaataataatagctagtgtggcagggtaattcaccgaggtataatttgcatctgttcccctttatttttcattcatttgttacgagcaggtagtcaagctcatt

SEQ ID NO: 29460 - DNA, 663 bp, Bovine  19866880762991
  misc_feature (1)..(1): n is a, c, g, or t
natgaacttgagcaagatcagaatagaagcgatagcactgtagttccacgttttgtgcgacacccccactgccttcgagaaccaaattcttcattttctcatcaaacaaacaaacaaacaaaaaaactcaggcaaagagaacacagtcaacaataatgtcatgaaatctcctttcatttcttgatttttatttgatcagtgccctaggttctgagttgaaatctctgatacagtgaaaccaggtagccaacactgccatgtagagtcattttaatagtggtctttgtatattattaccttttggcttttttattatgtcattttgatatcaggagctaatcacttaaatttactttaaaatatagaaagtgtttcagattgtattaattttatatcaaattgatttgaacatcttaaaatggagtatttagtttatcattaaatatgtgtaggtattagactagttgattttagtcctggtgaattcattggcagttttttcattatgtttttcctggtccacatatttgctttggctttttttggtggttgtagttgctgctcctttaacttccgttaactgaaaactaaagattttttaaccaccaaatcctaattgccaaatactacttgctgaaaaatacaaaaactaagtaacttaga

SEQ ID NO: 29461 - DNA, 864 bp, Bovine  19866880765566
  misc_feature (1)..(1): n is a, c, g, or t
nctggagaattccatggaaagaggagcctgtcggggtcgcaaaaaagtcagagatgacttagtgactaaaccaacagcaataacaatctctctagtaggttctgtagggtttaaaaacagaaatgaaccagttatgttagaaaacatgaaggagataccaaaactgatatcatccgttgatcttgaaaacttgagtgtctgaattgcccttagatttcatactggatctcttgtgaaggtacatatgatcaaaaaacatgtaagtcaaggccaaggatggttctttgaaaaagaaataaatgtatctgaaactgtgtgaacataaaaaatggatctcactggggcaactgttgtaagaacgtatcttccgtgatatttgcttgaggctgaaaccattttcatttactttaaagagttaagtacttgaaacagcactatttccttatgttaagattcacatgacttaccacatgaaaaacaaaaaggataggatgagttttgttggagacccctatcccccaagttattcctttaaaaacatgttttcacatggctagagggagaaatcgcatacagagaaatggttaaattcttacggggacttccatgggaattagcagtctgtagaccaaggctctggccgaaaatgtcatggttggaccatgacttcctatggggttgctgttcatggccagtttcttgtttttctttctgcagtgtgtacataggcccagaggctatttgtaatgggagaattttaagaaattcataaatttaaaacaccccacacatacaaaattctttctgaatgtgtcatcctaaatttcttttcccaaatccacataaaataaaacagcataagag

SEQ ID NO: 29462 - DNA, 1651 bp, Bovine  19866880772670
  misc_feature (1)..(1): n is a, c, g, or t
ntcagttgcctcacatatggatactgatctcaatgggaaacttctggattagacaaactgtaagataatttatagctcttaagattccaagatagtaggatagtccttgttacaaagattgcatatttcctatagggtaggtagcccaggtttaggatcctgtagttgtaggcagtcggagaaggcaatggtatcccactccagtactcttgcctggaaaatcccatggatggagagcctggtaggctgcagtccatggggtcgctaagagtcaaacacgactgagtgacttccctttcacttttcactttcatgtattggagaaggaaatggcaacccactccagtgttcttgcctggagaatcccagggacgggggagcctggtgggctgctgtctatggggtcacacagagtcggacacgactgaagtgacttagcagtagcagcagcagttgtaggcaatggcaccccactcgagtactcttgcctggaaaatcccatggatggaggagcctggtaggctgcagtccatggggttgccaagagtcggagtcgactgagtgacttcactttcacttttcactttcatgcatgcaaatgtacaccatagcatcacaaagttagatcatctatttccccaataggcaccaattataggaggagatggggatgtcttctggaagaaactactcacattttataaaagcgtctgtaacgatgaccatcaaccaagttccctactaacttacttacttctaaaacagctttatcaggcaggtagagtgttatcatccccattttacagttgggaaggctgagtcatggaaggatgcccagagttctgtaccgctactcaaagtgatttgaaaccaggtagactggctccagcctctaagttcccaactctgtgccatacttttcctgggtaagaactgttagaaatcaagaaacatcctcctaagttaacttaacaatatggaatctgctttgcattcttacaaggtaagaagaacattttaaatgcctgagttataaacttatgtaaacagtgtcctgtattgactccaagatttggcaaatattcctctgtcaatgggtggcctttgtattatttcagatggcctggcaaagaggaaaatgtgactttgcaattgttaaagctgaagaccttgtcatagaatgtattactgagcaaattattcttattttgactctgaatcacagcaccgagggaggttataagcatagacccaagtctatacaagatagaacatcgtctcctcttaactggaggatagctgaaccgaataacttttaatttctcagaggtggtacgataaatccaagggctatttacctggaaaatcaatctaaaaagaggatgtacttttgataatctaaatgttggatttgtgcttttatgctggttcagatcccgtatttatttgcaaatgtgtgcaggaaaaaaatggcaatggaatcttttgtaatgcaattcatttctgcagttgggtgcaaggagaaaaaaggtggggtcagcattggaaatggtggttccttcagtacctacacagctattcatcctccttccctcgtgttgtgacctcgggcttcagtgaaaatggctcacctttcaacacctaacaccag

SEQ ID NO: 29463 - DNA, 1482 bp, Bovine  19866880776272
  misc_feature (1)..(1): n is a, c, g, or t
ncccaaggccatactcttagcagagaggccaattcaaatcacttttttgttggaaattctcagggactatctattgtccgaaaggccttttgcaatgtggagccagtctgacgttccagctgtagccctgcctcacccagcattcactccttgccccagtgtccagccacactggacttctgcttttctctaaacacagtggtttctgtgcctgtgtgccttggcacaggctctcccatccccgggctctgtaccataaaaccccaccctccagaactctgtcaaaatgtcatctcccttgaaggaccttctctttcttctcaacactgagccatttatggccctgtctgtagtcttctgttgtttgggacacatttcggtggacatgggaagtggtgtggtccaacggctgaaagatcagactcagattggtgccaactgctctccctttggtaacaaaagtgcaattgcaaattaagatgaggactgtggcagaaaggaacatggtaccaaagagccaagcctagatggcactgagatctgacatatgaggaggagataaccagtgatctggaggtgagagtcggtaacagggctccaggagcaggaaaccgtgcgtgcagtggatccacagtaggggcatgtgtttctgtgaacagaaaggggctcatgtggctggaatggctgagcaaggagaatagtgagagaccaggctggaaaggtagacaaaggccaaccttctaaagcctgaaagaccactcagaacactttcatccttaagaacaatcaagaagcaaggaagagctttatacctggggaatgacaatgctacttgcattttgaaaaataatctagcatcagtgtgcgtaatagaccagactaagaccacagaagacatagggaggcctattaagagttattaagtcctattaaggcctattaagccctattaacagggacttccctggtggtccagcagttaagactctgtgcttccactgcaggggataccggtttgattcctggttggggaaataagattccacatttctggccacgcaatgcggccagaaaacaaaacaaaaaagaaacaaatttggtggctatttacaaataaaagaaaatataataatggaagcttcagttgggaactgatggagcagatgaagagaatttgggtgagttcagattgaaatctttctcagaacttctaagaaccaaacagattaatcactcacattaaatactcaggtggtataacagaaaagtgtcaccctaaagctgtgattactctatggagcttattataaaataaagtcatttaaaaggaaattggttaaatgttactattgagaagaaagcaaagggtgaagttgtatctgggtaatataatagaaatagcaaaactttcttttaaactatctagttaaaagagcatttgttgccttagaaagctccaaggagcctctggaatatagaaat

SEQ ID NO: 29464 - DNA, 956 bp, Bovine  19866880785334
  misc_feature (1)..(1): n is a, c, g, or t
ngttgcttagtggtgtccgactctttgcccacctatggttataactcatcaggctcctttgtccaggggattccccagccaagaattctggaatgggttgccatttcctcctctaggggatcgtcctgacccagagattgaacccacatctcttacgtgtgtggcctgcattggtgaattttttttttcttttccactagtacaacctgagaagcctatgttttggttgcctattgcctattagattctgctctaggctctggggatacattactgagaaaatagacaagaatccctaccctcattgagtctacattctcccaagggaggcaatcaataagtaaatcaatatgtcaatatacatagcatgttggatgctgccctactgaggaaagaaaaaaacagggaacagaatcaggagcactggagggagggcgttgaaattcaaaataagatggtcaggaatggcctctctgagaatgtgctatttgtgtagccatgacgtaatttgggcaagaacactgtaggcagagcggacagaggctgaggggttggccgaaactcaggactcattcagtgcaccccacacttgaacttgaactgtttttttctaaaggcgcaatattaaaaatgttcgctagatacagttgaaatcatatttttaaggattaggttctgtattcaatttcattttgggttcagtaccctattgtgggctgtccagaaagccaaaccactatgaataatgtttccatgggaaaatgttttctgggtttcaactcactgacttaccaatgaacttagagctggttagtaagttgagaacgagctgtattaattaaggggcgactctcctgccatggctccctctctcagcaaggatagaatgccattgactgagcttctgcctctctcacattcttttttctgtccttatcctttctctagtctctttg

SEQ ID NO: 29465 - DNA, 831 bp, Bovine  19866880796773
  misc_feature (1)..(1): n is a, c, g, or t
naattcctgggtcaggaagatcccctggagacggcgttgactacccgctccaatattcttactggagaattccatggacagagaagcctggtggactcgagtccatggggtggcaaagagtcagacacagctgagagactaacacttttcactttcgctcttggacaacctgagttatataccaagcacaactcttctgcaatcagattatttctgcagttaccccactgtaatccaactctcccacttgacacatacacaaataaaaccattcttttcagctacatcaaaaccatttccgttctacgcagctcctgccttcactaaaactgtcctccacgtcactgttcccctcccccgctcagctccctgcccccaccacttcctggccctcctaccattccaccaaaaaaaaaaaaaattacccaggcctccagccaggaaaagttgttaaaccctctcctctgcaacttcacagcacatttgctttaataccaaaagaggattcatcttggccaatgagacacaaatgaatatgcagtgattcgccacttgctgtaaagcactgccaacaattcccactgctgtgttctcttctgttttttacaatcaattaaaaaggttcagttcattaggggcatgtttctttccccctcccgaaaatggaaagacgaaacgagcagccctcagaagtgggcacaaactcttctgagaaatacccagcagacagagcttcttacagtaacacttgattttaatggttctttaatgcagaattgacaatggaaaccccccactgaagccctcacagcagcctcaatcaccctaaat

SEQ ID NO: 29466 - DNA, 2032 bp, Bovine  19866880837782
  misc_feature (1)..(1): n is a, c, g, or t
ncagcaagagactatatttaaggaactctagcacctccctttttgttgtttgttgcttagttgctaagtcatgtccaactcttgcaatcccatggactgtagcccaccaggctcttctctctgtgggattttccaggcatttgcctggaaatgggttgccatttccttctccaggggttcttcctgacccagggatggaacctaggtcttctgcatcgcagacatattctttactgccaagccactggggaagcctccatcttaggtactggctaaagaaggtctacttctgctttctggccagcttggaggacttgtctcagtgctccctgggcctctgtccttattactgggctcctgacttggcctctgaccttgacacttcgccagttcatcctcactgagatagaagatcaaagagacagcattgacaactgcccacacaattttagttcaacttttactagtctttattttcataacccagaaatcagtaaaggtatcatccattcatgtttggggtgtaaaatcatgcaggcacacccagaagaagactgaggaaaaagtgacatgccgatttcgtgttgtgtgtgtgtgtgggagaggggcggggcatggtgcggggtgctggttggaagaccaaggctgagtcttctaaccctcctggtactttctctgttttggaggttggagttccagaccgtgaaaaacaagaccagaaaatattacatttcctcaaaaaagtagaaaaatcacagacctagctttagtttcagtggcaaccggagggctttttattacaaataaggaaaagtattctaaaatgaagggtggtgaagcatcattatacattcctagagggggtcgttgaattactgtaatggttggtctttcaaatgcagaatgtctcctctacttagggtcatttaagtatagttgattcaagtctgaagtggagacaaatgtgggaagacttattaaaagtatatccacccctgtaatttcagtcttcatggatcagcagccatttctcagtgggtttaccaatttctaatagttgatattattttaggcttaccagtagctgattcttaaacatgtttcaggcatccaaagctgtgcataccaagatttctggtaacagctggaaatccataattatagttcacggggtacaatgctcgtctggcaaactctgtaaataaagcttagaaagcaaatatctcatttatataaacagtttctcaatactacacgatcgattgccaaaggactagagagctagcttttttcaattactccttttcctagatttgagggcaacactttattacttcctgtgagagtaaataaataattttctaaaatatttaaagacttggatgtaaagagtgaaatttatctaaaaatgtttccccccctttttttactcttcatataacatgaaaaagtggtcgacccacattgttgaaatatcatcagaaagaaaattattgcttaaaagcaattttgtactggaatctattccccacaggcttattttaaggaagtttcaggattagctgccaaagactgtgaggtctttctgtcttaatgactttttaaaatcatttgaagtactgtgaaccaacatgaataaaatggtatgggattgaggaagaaataattttgtattcctaagtgaaaaacaacccagtgtatgcactgaatttgaaagaggcacaatatataatttaaggtataaaacagttaaaagtttgctttttaaggccacacttgaaaagtccctgactttccattttattccaagtatttatttgaaaggggattttagtggaaaatattttaaactgaatgaactcttaagtaattaatgattacaattctagtagaagtgacacgatataaacccacaaacacaccacaagagacattccagtgactgcttaatatttgtggtggcagaggaatgagagtgtggttatcactcattccaaaacaagcaattacagggtcaatcacgctaaattcc

SEQ ID NO: 29467 - DNA, 1060 bp, Bovine  19866880842597
  misc_feature (1)..(1): n is a, c, g, or t
ntcaaaaataatttatggtggtttttgtcgttagttgctaagtcatgcccaattcctttgcaatcccagggactatagcctgccaggcttctctgcccatggaattctctaggcaaaaataatggagtgggttgtcttgtccttctccacggaatcttcttgacccagggattgaacccacgtctcctgcattgcaggtggattcttcaccactgagccacaaaggaaacccaatttatggtggtagaggtcagaatattgattacctttgaccagagcaaatgaataactgggactgttatagcctatacataacaatctgggtgatggttacacttgtgttagctttgtaaaaattcattgatctacacaaaatgatttgtgcccctttctgtatgtatttatgtcacacttcagtaaaaacagctcactttttaaaaagtggcatgggaggataaaggtattaagagaaataaatgtgatcgaaatccagggaacaaaagcccaagagaataatagaactgtaaaatgtaatgaaatatgaagagaataaaatatatttattttgatataaaagactcaagtaattttaccaaaatattctataattattaaactcctattattaatgggaaacaagtgacatcttgctgcattatttattttcataaatagcttttgatgggtaaataggttctgtatatttattctgaaaaggattgtgcagaccaatattagcttaacatagcacttcttgacttttttcaggctgacacaagtgaaagcttagaaaaaccaccattgtggtattccctttaattgagcttgcataattctttgcataataattgattactaattactcaaatttcatctttataaagtgcttccccacactcaacatgcagtttcttttttcccttggtgaaaccatatgtagtaatggtcccaaaatgacaacagaatagggatagaatggggaaaatatatggactatatgattgcagtttagggaggtattttagaactcacaggaagtatctagactcatgtaacctag

SEQ ID NO: 29468 - DNA, 923 bp, Bovine  19866880858277
  misc_feature (1)..(1): n is a, c, g, or t
ncttggcaatcctgtttttcacagtttatagaagacttagcacatgagaaaaataagatatttctcaatcatgtgaaaaaacagatcagatactagtatgaaaaacagtcttttctaaataccaagaggtgttctatgttacagatactggctatctaattttaagcaatagcctctgaaacaaaatgtttgcctaaccaaaaattttgtacagtctcttagatttcaacagaataggatttgccctggattgtacaaagaatctcagaacccattacctgtgttggttgtgacttccaggggctcgctgaaatctccatagccagctgctgtcctggctcggacatggaaaacataggaagtcagagggttcaggcctttgatatctgtgttcctggcggccgtcctgacgatccgatagcttcgttcattctgatcctacattacaagaggataagatgaaggaaggtggcaaaataaatcctccacttactccagacacaatgttaaagcagctgagccagtccactcagaggctgaaagtaaatggagattgatgaactctaaacactctattcggttcaatgttagaagtactattgtgacttagatgttgaaagaaatgtgaagttcaggtatgatcgctattgacattgaccatatccagatcttttttttttaaaagaacattagatgatggttggtggctttactcactccacacccagcaatttaacagaaataacagctgtaagaaggtcccttttctgttttctattttccatctagaaaatgtcaaaaatgttataatctggtttcaatggggaaaaaaagcctgtccttttcctgcttttattaaggaaaccaataagtgattatctttaaaacggaaagagaagacaattgttcatttttctcgacaa

SEQ ID NO: 29469 - DNA, 2848 bp, Bovine  19866880897266
  misc_feature (1)..(1): n is a, c, g, or t
ntcgtcggctgcgatggtgtcaattttggcaaactggctctctcggataaaacgctctttgtcattgtctgattcatagtagtacaggttaaacgtctccttgcaagtgcccatgacacccggaagactgttgcagtccctcaaggtgaacttgatctcgatatacaccctctgagccccttcccgggtgatccaatcagttcgcagccagttattctggctgggctccatcacgttgcagacttggtaggttcggattggtgtatttttttcatccataatactcacttcctcccactgcaaagagccaaaggaaatgcatcaattgcaaacatttcatcatacagtgatttatcagttctgttttcccctcataggacagtgataatttttgtttcaataagaaagaaaactacccagcactaattcctcatcaagatggtactgtattggggagctgttttcattgtttcactcttttgcctaaaattccagaggtattactagattgattgcttctgagttctcaggcagttcctggtggtggtctaacaacctcaaattcacctattacaacagctgcaatttcaagtggcgacagttcaaatttactcataaatgaaaaactagggatgtgtattgttccaacaactgagcatagacctgcaaattaagagcaggaagagcagagtttgccaaaggaagacaattatcagttaattagtggtgctcctgtcagaactttgctctctaatacctaaaaaaaatcgcagtcagttttgttttttcttttctttttggcattgtcattactctttaaaggggtaaagaaaatctcaccattctggtttcggtaatcctggaaagacagagagtaaactttatggttggatttctcaaatacactgtcatttaaaatggtaggacacgtttcaagagcatgtattcagtccaaaagtttgtatactgttcttatttttaaaagaaagccacattaagtaaacatgaatgtacacatgcattgcttctaaatagtctgtggatattgagaaaaaaatactaagtggtatttatgatggaaagcccaagaaaattaaagtatggtagggttttctttcaatctactttgtaacataaagattctcacagtgggataatctgagttcagcaaaattcactgtgactagcattctagtttcatttttgctatgcttttaaaacaatcctaaaagcagcaagataatttgggggctcctaccagactaggaggcagcctccaattcttcattagcatctacagtaatggctttatatagagctggtataaatcagcttaaatatctaacacatgaatataattagaagaaaaaagatagtttaaaaaaatcatattctataatagctccacttaaagctccattcaatccaatgaagtacatagaatcataatgtatcttttaacaggtttcccatctgtgcattggaaaactattaatggatagaaatgttactatgtgaagggccataatacataaaattctgcatccctttcatctgccaccattatgaaagttggaactgaaagagataagtgccctgtggagattaaaatttatttttatccactaagcaataaatcaccagtaatttacttatttggggaaattcatgtaaatccaaaaatagatccccaccttcaaaaaaacctactcagcatgcttctcatctcagaacaaaggatatatggaaaaacacatttatcaatgtaaatgaaagcacgtagggacatatccactgttcatacagataattcagatctaattcagattttccagccaaacttaattgtctaaacacattgatcaattcaccagaacaatgacaaatctccccttagttttgcattttacaatcagtgtcagaaactcaatattctcctttaaatgaatactgccaagaaattaggtttttgctacaatgttgccatcaggagtcatcactttccattattttcatgttctgcttagctgttctaatgaaaaaatgaaaccatagctcatttttgacctggtggtattgtcaaataaggtttctttttaaagataacaataacaacaaacaaacgtatggcattattggtcaaaattataatttcaaatttccaaccaaggtgtgaactgttctaaggataagtagagatttcagaataaaaaaaaaaaacaaaacaaaaaaaactcaaatatgcttttacactaaagaaagaacttttaaaagccaatccatctcctacttggtacacatccaatttatcccttcattctaagtctgcaaatgtcttctttattacaaaagctagaaattaattaaactttataatttgtcacataatttttcaacggctactatatattttagaaggactaattttcttacagacaagttcatttcttacctttcataataatacttaaaacattacacatacatggcatttcaggaaagggaaagagaacattctatattcagaagtccacattctgcccataaaaagttctgggttgtgtatactcagctaggcacagtattttttttaagggacatcaagacaaccaaaagaagttttgtatctagaaaaagtgatcagatggtctttcaacagttctcaggagctggggtgtggggaaggagatgtctgtggcatattaaattataataaaagctttccagaaacaggacagaccatgaactatactcaaaaaatgtgctactccttgcttttaaataggtcacatgtacattgagagtaacaggtcaggtccaaaatcacgctagatatgtcccctcttta

SEQ ID NO: 29470 - DNA, 1420 bp, Bovine  19866880982757
  misc_feature (1)..(1): n is a, c, g, or t
naatctacctgcgatgcaggagatgtgggagactcggggttgaccgctgaattgggaagataacccagagtaggaaatggcaactcactccagtgttcttccctggaaatcccatgggcagagcagcctggtgggttacagtccatcaggtcagatcagatcagatcagatcagttgctcagcggtgtccgactctttgtgaccccacgaatcgcagcacgccaggcctccctgtccatcaccaactcccggagttcacccagattcatgtccatggagtcagtgatgccatccagccatctcatcctctgtcgtccccttctcctcttgcccccaatccctcccagcatcagagtcttttccaatgggtcagttttcattccaatcccaaagaaaggaaatgccaaagaatgctcaaactaccgcacaattacagtccataggatggcaaatagttggatatgacttcgcaactaaacaacagctgaagagtaaggccacttcctgcagcatctggagtttctaaggaaaatctctttcctccatcctgcatttatattagctttgctatggacagaacactttggaggcttctattgcatccattttcagggattttagaaatgttaagttagggcgaaaaaaaaaaaaaaaagacactgtatcctagccaaaaagaatagtgttgtactaccattgatcacaaacactcttggcaccgttttcttgagaaactaatacagcagtttggtaaaatggaatagcactcctctgaggggtgcttatacaacagtagtagttctcaactaggaataaccctacctgctcccccctacccgggcacatgcaacaatgttgggagatatttttgattgcccaggagggtggggagtgctccaggggtctagtaagtagaaaccaaagatgctgctcaatgtcctcaacacacaaatcagaatcctcatcaaaaaagaagagctcaacctaaaatgccaacaatgcagaagttgagagactgtgtattatatggtccccccgttttttctccacttgtcctttggtttcataggcacatttttactaagagataaagcttatattttctttaaacataatcaaatcacaaattttcttgggtgacaatcagatattcataatccatttactataatgatgcttcaaattcatggattgaaaatttaaagtttgataaatattcagcttgatttttcggattcattatttagtgactgggctccagcccaaaccttttgttagaatgaaatggtaccctgcatggttatttcactcttgcctccctctcatgattagggatctgatgcccagaaatggcttggcagctctatgaacccacagagctacattttcctttgtgtgtggattttctgagagcccagca

SEQ ID NO: 29471 - DNA, 1176 bp, Bovine  19866880985951
  misc_feature (1)..(1): n is a, c, g, or t
nttggggaacagactggccctgaaggcaggacagcttgtgagaaatacaggaagatcaaaatgttgtcaggagtaagacatatctagaatgggccctggatactgtgtgattttagggctttgactgttgccagtatcacttcccaggtggcgctaatggcaaagaactcacgtaccaatgcatgagacacaagagatgcaggtttgatccctgggttgggaagattctctggaggagggcatggcaacatgctccaatattcttgcctggagaatcctatggacatgggagcctggcgagccacagtccacagggccccagagtcggcatgactgaagtgccttagcacatacagtgtcactgtagatatgctaattatgaatgcaggtccttaattctcccactactttgtccctgcccaccccccaccagatctccttgatttatttatttattttgccatatcgtgtggcttgtgcgatcttagttctctgatcagggatcgaacctgtgttctctgcgttgggggcgtggagtgttaaccgctggacagctagggaagtccaccaaaactcttctttagaccacaatggttgattcaagcatttttacctgagatgccccttccatctccgtaggggagggtcaagaagaaagggaaggtgcccaagatgaggtcaaggtaatgatcaatgcagaatctggtttaatagctcctatggatcctaagcctacagttctccacagtgtgcacagctgatgtgcaccctggggaagggagaaggagaggagagctttcctttgtctttgcttgtattttataggaaagctgagtccggaagaggctcagcgagttaggagagaaaattacatctgttaacactaagctaagaatgagaacatgagctttctctactttgggtggtgatccttttattgcagtcagggcaaacagtgatcagcgtaaaatcagaggatatatacagcatcacttgcccctgagtcgatgagaactttcatttctgcattcattgaccttagtctttagcctttttagattcaggacataaggtgacatttttgtgtttactgtattctgcccctcaatgaatgcaagaaaatcttcagtgaatgttttaggcagctctacattgaaatactaggtggcagtctaa

SEQ ID NO: 29472 - DNA, 1382 bp, Bovine  19866880988463
  misc_feature (1)..(1): n is a, c, g, or t
ntagtagaagagattagacagtatagtgtctaattctagggcagctcagcagtgaacatggccctttaatgcttcctactggagtggttcagtggccagaccacacaactgacctaggatgagtcagttaacctgcctgtgctggtcctccatctgtaaaatggggctcatcctacctcacaggggtgtcaagaggatacatgagataatatatgcagaaactcttttacttttttagaagaaagacactatataaacctaaggtattattatcattcattttaacttcggaatagcatcatcctgtcatttttgattccataattacaatacatcaggtaagcatggatttaaaatcaagggagcactgtacaatgaagggagacatgaaaactttgtcacatgagaacagccctgacaacttctaaagtgccttagggctgcatctatttccatattaatgtaagccacatacatcattaaagagaaatgcaaacgcgtagtagcggctagactgtatctctcatttgacagatacacaaaaatcatctgttctggctttgtaggaatgactaaccactagcaacaagctttccttcttgagacaaggaagtgaaagtgcttttcgtttgaagctgtgaaccactactgcccggctgggacaatcagagttccctgattctaaagcaaaatttgaaatctcgcaatacttaacatctagtttccttttagataaccatgcagcctggtcttgaaggttttttttttttttttaatatggcaattcttagaagctctaaattctagatattgcaagtttaatacctttttataaagaaaatattttatttttatttttttattttggatgtggaccatttttaaaatctttattgagtttgtttcaaatattgcttctattttgtatttgggtttttggtcaccaggcatatgggatcttaactccccaaccaggggtcaaacattcaccccctgcattgaaagtgaagtcttaactactggacaaccatgggaatccctaaagaaaatattttagacaggtttgatcaacaatttttttttttaatctttgtttgcctttgtccctataaatgggcttccctggtggctcagacagtaaagaatctgcctacattgcaggagacctgggtccctacaaaagcccaaatatttctgttaagtgggataaaaggaagctctctagtgtaacaattgggagaccttagttttacattgagtgatgtcagccttatttccccattatgtcaaaagctaggatgggactgaagtcctgcggtcctctggcttggtcaacagaaaaagacaataccctgtttaagacatatgggttgatggtgtag

SEQ ID NO: 29473 - DNA, 1583 bp, Bovine  19866880989331
  misc_feature (1)..(1): n is a, c, g, or t
nctcccctgtgctatatagtcagttctcattgcttatgtattttatgtgtagttagtgtagccaatcccagtttcccaattcatcgtacccctctttcccccttggtatccatatgtttgttctctatgtctgggtctctatttctgctctccagataatttcatccatactatttttctgaattctacatgtatatgttaatctgcgatatttgcactcttctgtatgatagtgaagtcatggttcttgctctgatctctcatattgtttgtataccgcaccaaaaacagacagtgcacatgccccataaatttcacttagtctagactaggcctcttgcaggagttccttgggattttgtttttgctctcctcagatgtgagcaatgttgaaatagttaaacatctataatattcaattctggcagatagttaaataaaatcattgatctactacatgcaataccaaaaacaaaacaactgtttaacccaatcatatccattctgtataaatccctttttagtcatgagtactcagaattttaaaactccctcaaaatattcaatacaatacaataatattcaagaagtaaatgtgaagagacccacaatcaaaaacctcagcagagaattgtaatgcgttggtaataactgcaatggtgaatcttgtaaagcttctttttcttcctcttcttctgagctcctctggccacgtcaacataacaaaaaagacaggggggcactgagcagttattactgtagtcatttcagccacataaatcatgatttgtgacaattcaggctggcaagtcgtttggatgacaatgactggcgacgctgttggagttaatcaaatgatgatttaacatgtgtttctcttggtctggccttggctttggaacatatttcattcgttcccttataacctttgcttctaaatggaaaaacagcaagtgtaggatgtacattgagttaatgagagaatccctaactgggctgtgatccccctaaaaagaggggacttgtctaaatcagttgaataaaaccttagagtgcccaccaccatgatctgtctctggctagcagtcactaagtctcgttttattttcttctgggtagaaccaactttgtgaccaaactctttttccttcaggaacacactacttaaagggtcatccattcttatagatgccgtctttctactgaagttccttctataagcagatagtcttgggttaggtgcataggaaaggcccccataaaggatgccctctgtcagagagcatcattgagacgggagtgtgagccatggtcttctcccttccaaaaggcaacagttttcacatttcccctgttgcccttagtatgtgctcggcaaatacttgctatcagtgttactaatactcttatcataaaggcttaacaaaagtattataataataattaataaatgtttgttcgaacatgaatggtcaaatgaatgaacagatgtgcatacctactaatggatgacttttttacgtaatgattcaagtattaaattcagaccattgtagtgtgaggcgtggaagaaaacatagctg

SEQ ID NO: 29474 - DNA, 916 bp, Bovine  19866881134255
  misc_feature (1)..(1): n is a, c, g, or t
nctaaactctggggaggtaaataatttccgggttgacaggcagtcaaaggcaatccaggaagatagatgaaccaagttcagtaaatcctagtgtaatcctcatgccagaagctgctttgacatgaaggactggtatatattctaggaatttatcacatttctttggctagagcttccatgcagaaatctgcctgaatacactcataactagctcctggggaggttgagtaggggaggaaatggggagggagattagggggatatattagtctggattctccagggaaacagaaccaagtgataagtgattgattataaggaatcagctcacatgatgatggaggctgagagattccaaaatattcagtcagcaagctggggtatacttccagtctgagactaaacatttgataaccaagagatctgatggtctaagttccagtctgagtctcagtatgaagacagaagaagacctatgtctcagcttaaagatcatgaggcagaaagagaaagaatcctctcctacctcgcctttgttgttctattcagggcgtcaatagatgaagtacacccatctgggagaaaacaatttgctttactcagtctattgactcaactgctaatctcatccagaaataccattgcagaaataatgtttaatgaaatatctgggcactctgtggtgaggttgacacactagtcatgttgacaacataaaataaaccagaacagaaactttaggtcatcacctcttgattcacatagaagagctctggttggatcattccctaggatttgacttgaagaaagggctctggctatagtggaaagtttgcaggacactttcagagctcaaattactgaagcatttacagcatttgctaacgagagtccacttgtttccttgtttgtgccc

SEQ ID NO: 29475 - DNA, 828 bp, Bovine  19866881169026
  misc_feature (1)..(1): n is a, c, g, or t
ntattctagagagttcaggggaaagtgagaaaagaatggctttatattggaatactggaatagttctcactatagaatcaattagtacagatatattttacttaactattgagtgcacttactgaaacattcatttcagagagaagtgcagcaagaggcaatagggttcttagcaatttataatcctttcccagtaaagtgtgttgttcttaatagcttcataaaaggataaaccatggtcctctcttcctccacccctttaaatccccaaaattaaataacagggagctggcgatgtgaaacatgtggtagaaatccagaatggaaaattagtatgagaaagtatggagactgctttaggagaagaatgggagtaagtgggtcaggggcagagcctagaaatctagattctcattcacactttggaaaatctgatattcaagactggataacagttctgaaatgaactcagcagaaacaccccaggaacagaatctactttctagtcatctgcattagaagagaaagtgtgcaggaaatgaggcaaattaactctcctctcccacctgtccagtgtgaatgttactatgaaagtggctccaaaagtaggatgtatttgaaggaaaattttgtcaaccacacagatcaagctcccctttaaaccattccttgttcacaggcttatagggtaattctaacaaagacctatgtggatattaaaaaaaaaaaatcaaaactacagctgctaatgtttttgttgaaaaatacaagtgtagtgctctgcatgctaaaaatcaattttgtattcctaaataatctgtaaatgca

SEQ ID NO: 29476 - DNA, 1275 bp, Bovine  19866881207947
  misc_feature (1)..(1): n is a, c, g, or t
nacattacaagtaaaatttcctaaagttttcattcaaatttccatctttaaaaatgatactgtcattaaaataaggggaaacaggaaccaagtgtttgataattactattagatctttgatggtacttgaaaaccatcttctcaaaagatataacaggttataatgggtaatggtctcattcacttctaacttttatcaaagtgtagtaataatattattagaagtgtaataaacagaactctattctgcaaggctgaggaaatctgaggccagaatagattttctgacctctttcataaatggaaaaagatattaattagatgttcatggccacttgtgctcatttgagatcccataacctctgtcataaggatcaagatcttaacctcaatgccctgccaaattcctgctttcataattaaattctctatatctaaatctccttataattcaaggtaagtaaatgattctccacttcctcttctaaattaattttatagctttatcatttttttaatcagctttttctctctcccactgtctcactcttttcctctctcaagagttaatgattgctgctctataccatttctacaccattccttaatttgaaatttaaaaaaaaaaatcataaataaactggcatataatctaatgtagccctggctttatgaactttcatttgtaggagataaatacttgacagagtcatcagcatattttaaatcttttctttaaaattcactttcagggacccatctttattttttttttttttaattttaaggggcgctgagtctcagagccccaaatcccacgacccggccgcagatccgggaccccaggacccccacggacccctcccccaatgcacccctccagggacccatctttaatttcttctattttgaaaggtggtactcttttcatttgagtcttcttttctctctttctctacttagatagctatttaggaccatgggggagtatactacaagaagaagatattgctagccttggggtcaccgtgccaccatgtgagattagactctgcgttgttctctgcaggaaatgatagagcacatgtagattgcaaagcaggccacttggttctggtctcactctcagttctgttaataacaggtacaggccctggcctaaagtatttatgttccctggacttttacccctttttctttaaagagaaaacaattgaactaattcctttgagctctgacatttttgttaaattcatccagctaagcagaagcaat

SEQ ID NO: 29477 - DNA, 1651 bp, Bovine  19866881213150
  misc_feature (1)..(1): n is a, c, g, or t
ntggaaacacgggactgacctgaggtgaaaggccattgccaatggcggggttcatggggttggagggcccggatggaggcacaaagctgtctgtatagctggaaaatccatgcctggtgctggggaggcagtaggcagagctgctgtccgggttggaaggaagagtgctttggtgtacagtgcttggaggaagcggctgaggtctgtggacggtgctgctggggtctgacacggctgcaaggaagaaggttatcggccataaatctcctttgaaggctggcagagaaggttcagtgcaaaagttcacagtcaccgagccatcagcatatccactggtcaagtaaatgtaaatttcatactgtacttcttgatatgtaagtatagaaccactcctaacaaatagagccacatctcttctgcacgtatgttcaagtacatagtttatttatatacttccaaggaacacttaaccagaacagaaattcagaaatcaccttaacagtgagaacaaacctatattagtagtgaatgttactaatcaacataaagattaaccagtgtaagaactgcatcttaaatttctttttttttaactgtttttttttttttactttacaatattgtattggtttttaaatttcttatcaaataaactcccaaaacatctaaatattagtgtgagagtatagtttcaaatgcccacaatgctatcttttgtaatccaaaataatttagtcttcctatttatcccattcacctctatgcactaacattttgttgctgttgttaagctgtgtctgactctttgcaaccgtgtggaccgtagcctgccaggctcctctgtccatgggatttcccaggcaagaataccggagtgggttgccacttccttctccaggggatcttcctgacccagggattgaacccaggtctcctgcatggcaggcagattctttagcactgagccacctgggaagcccatgctctaacacagaaggactctatcaaagtttacctaccctcaattcctaccccagtgaggagccatcagaacttcagttaattgcagactggagtacaaacgtagaggttttaacaaaggaaaagccaattgcatgcttattttgggagattgctttggttcattgtttgattttgttttaaaatcctgaaacaatattatattacaacacagtttaactagagagattcagacatgtcatagaacaaactatgtttctgaaaggtgacaggtattttcaggacaacctgatataatgtaacaaacatacagacagccacagggacatcacagaagatttcaccatataaagtaagcaggggggaacaagactggggattacattttaaccccttgactgctttcctccataccttgtggaatagctgtgggctggtaagaggtctctgacagctggtacgttggcagggtcggcatggctgtgggagggaatccccccggaatgagatggttgaaagccatcagttgattggccccagcctgcttcctccatcttgcacggcggttgctaaaccagacctatggatttaatttaaaatttgagaatttcactgatgaaataatagaacattcttaatgaatttttcatgctaaaacagattaaaggcc

SEQ ID NO: 29478 - DNA, 1748 bp, Bovine  19866881237754
  misc_feature (1)..(1): n is a, c, g, or t
natgctctgttccagtgaaagacaaaagcaaataagggagagattgatctccgagcgcttttattgtcggtgctatacacatcataaagttttggcccgttaaaggaagttccataaacaacattagttaataatggtgaagtcactgtggacctttctggagcttctgctcaactccctttccgcttgcccgttagcagagcatgattaagaaaataccaacaggatgtgctggagggaggaacagacttcaactggaagccatacggatgcttgtcggatgagtaacgagatggggaatgtggccatatctctcagagaatcacacagttctgtggatctctttttatcttctggtttgaataaaatctgctgactgctggcacggttggtctcttgcggtggtcacgctaatggaaaagggccttctcccagctgatatttttgatagtatgaaaacacccaaagtatgtgataaatgggaaaaaaaaaaaactgagagtgaatcatactggaaagattgtgagtaactgtcacatttttaatggtacctctggtcttataaaataactgtatttttaatggccttgtcactgtgggtttaatatggatggtgtgggtcaatttttatgtgaggttgagactgatttgggaggtgatcttgaagggcataggggagagaaaaagggagagcaagaccctactaattattttttattgtgaggtttcccagaattattgaggttttccacattagtcaaagcagccctcagtgtcagcatgatgtttataaagatgaagtcatggaaagcgggtcaggtgcgtgagggactatatggtccatgttctccccaccagtcactgggctgtgtgtgcagagggagggaggtgttgaaaaatggaggaaggggaaaacaggagggttttatgaagttgaaaataaacatggagtatctgctgatcttaaaaaaacttaacatattccaaaatgttctgtgggtagtttatattactttccccctgaaatcatgatctacgtcttaccagctcttttatgcttggttgcttatgttggtctttcactttggctataattaagaaataatcacctacaaatttttggttggcactgagctacacttccaactggttggttcaagaccgtgctcttagattccatagcatggggccaaaagtacgggctttgggggccgaacacttgcagtcaaagctggtccctgacatttaccagatgcgtggtctggtgccgacaatttactgctcaaagctggtattcctcatttctaaggtaaggttaataacagtgcctgtggaaatggagagctgtaaagatcaaacaatgttgtgcatatgagcatgtaggaagcacttgggtaaactttaggtgtgattttattgatacaactggttttaagaaaattttttcatagggctttgccacctgaccagtcatgttaaagattattaaagagtggttgttatcaacaaatattttgggttgttttacctgcatctccagccagatgctcacttgttgttcagtcactcagccgtatccgactctttgcgaccccatggactacagcaccccaggcttccctgtccttcaccatctcctagagcttgctgaaactcatgtccattgagtcggtgagattagcaaaaaatatctctttctgaatcaaggaagtgacatcttgctttgctttgttaactaggggtttata

SEQ ID NO: 29479 - DNA, 755 bp, Bovine  19866881239052
  misc_feature (1)..(1): n is a, c, g, or t
ntaattttgatgcttgacagcattttaaaatgcaccaacctttgataaagagcaaatcagagctgaggcgttaaaatgagaaagagggaacaaaaaccacgctaagctccaagtaattcattttgaatatgctatttgtattaagcagagatatgtataagctgtgggtttatttttcttatcagggaaagacctccttaagtaaacatctcctctttaaattcagatcctggggagggagacaaaaccctgctgaggttaagacgtcatctccctccaaaacatgggctttgggagccactgtcatcctttactttaggcttcttaaggtccataaagggctgtttccagtcttctttgtacacaggctggagactttttgttgcttctgtttatttcctgccttcctccctcctcccccgccctaattagagccagtagtgaaatgccacgtgtctgtttcagctatttccctacccaaggtcccctaaactgtttttaattcaatgcttgtgatgtggggcccttgaaaagagttttcagcccacaagtgaaggactgtagtgactccctcctccctttcttttccccatgtctctttttctcttctccatcctatttgggtgtcacaaggaccaaactgctgcagtaaaatgacttgtaggtgtttgatggcaagtcattggaggaagtgaataaaagaaaattgcagcattcacatcagtggggtgcgggaagaactgctgagctttgaa

SEQ ID NO: 29480 - DNA, 710 bp, Bovine  19866881334701
  misc_feature (1)..(1): n is a, c, g, or t
ntacctgttggagtgcttgaatcctcccacgtcctgtatgctctaacttccctccaacttctttcccatctacacagaagtcactttttgctctggcctcacagcagcctaaatctatgctttcttgtttcatttgttcataaataagcccagtgattttttttttttttttggttcttttacatgatgtcctcaaatgctcttctaaccacaagtttattccattatctagagttattttcctgctatatgcattcctgtttctgatttctggatagacctttggagaagcagtgggttctcagttccagctgaagtgtgcgtgctaaattctttcagtcatgtccgactctttgggaccaaagccccccaggctcctctgtctgtgggatttcccaggcaagaatactggagtgagttaccacttcttctaggagatcttcttgacccagggatcaaacctgtaacttttatgtctccagcattggcaggcaggttctttaccattttttaccactagcgccacctgggaagactggctgaagcaactgagcccaaagattaaagacaagttctggtgttctgtgtgtttcttttctaagaatcttaaagtaaagcaaaggaattgtaaatctctctcaaaactttgcatgcccctgcccccacccccgcaataggcttctctggggctcagctagtaaggaattcac

SEQ ID NO: 29481 - DNA, 846 bp, Bovine  19866881337361
  misc_feature (1)..(1): n is a, c, g, or t
nttcaggcaagaatactgagatgaattgccatttcctcttccagggaatctttctaacccagggattgaacctgcatctcctgcattggcaggcagattctttaccactgtgccacctgggaagccagtaatcttagttcttaccgcctttcataaattgaacattcaaacccatactgctggcttccagcaatagagcccatcagactaggggtttcagctctattgtccgatccttaacacccctttctgcttttcatcagtggatatttcaagttatgaatttatggagtcatcctgcatagaggtctctggattctagcaattcttttcaaaattcattcacattaaaataagagattatgaattcttgtcttttaaaaccatcttgagtaggaataaagtaaatgtctaagggatcatctaaattgaattctaagcagattcaacaaattctgctcttggcgtctttgcatatgaaagtatttgatgaaaataaaagctacatactcatgaagccataaaaaatggagtatctgcccattttcagctcctgactgtctcctggctaaccaacacagaacacaagtatctgtacttgacctatagcagtggttttcagactgtattctagaaagtctgtggagggcaagttgaagagctctttttgttttgggggttcctgtgtaattttcattttagagacagttccactgctataagggcttcccatgtggggctagtggtaaagaatccacctgccggagaaggtagatgtaagaggtgtgggtttgatccctgggtggggaagatcccctggaggagggcatgccaacccactccagt

SEQ ID NO: 29482 - DNA, 1758 bp, Bovine  19866881375342
  misc_feature (1)..(1): n is a, c, g, or t
ntcagtctcttgtggggtcgttgttcctttcttctgggtcctggtgagcacgaaatttgtttgtgccttccaagagtctgtttccccagtcctgtgtaagtttttgtggctctatggtggggttaacggtgacttcatccaagagggcttataccatagccagatatgctacacccagagcccctgcccctgcagcagtccactgctgacccatacctcctcaggagacacccaaacacagttttgtctcagtctctgtgggctctctgggtcctggtgcacacaaggtttgtttgagccctctgagcatctctggtaagtatggggtttgattctaaatgcaattttgcccctcataccatcttttgcccttagacggggcatatctcctcaaagtcactccagcactgcacagcccttttatatcacttatattcttgaagattcctccatgatcctagaagacattctttaaaaatacttatatctagagatggattccatatcagcaactcaaaaaaatatttattctccctaaaagctaagttgcttactttgttcattggataagtaactaagtagcatacaatctaacaggaagtaggagacagctagtaaaggaagagtctgttaatttgtctccttactacacccagaaaatctctggagaccataccaaaatggaagacacttgttgatagtcttgggtcaaaatcaacaacctggtacaccctgctagtacaaatagtacaactggtacaactagttttaattactcaactcaactttgccatctctatcagcatttattctgcaattaagaagagagcttttaccatttgcccttcagcatacttttttcttctttcctgctgtcaatggtgctcagtcaggcagttgtgtcagactctttgtggctccatggactgcagcctgccagacttctctatccatggaattttttgagtgggtttccattttcttctccaggctgctgtcaataagaccacttattatatccattttcctctaccacaaactgatctgacctttctcatgaatttctggaggacatgcttgtcacctcacagaaggggaaccctggtattatctgtcctcagcacacaccctcagagcatgaggaaggagacacagtgaatgtcattcccacagatggcctgttgagaaaccaaaaacttacgaacctcgaataatgactgttatcatgaagtatggcagattttgaaacctccagtttctcttttgcagtttctgataggaaacctcccaccacccatctgcccttactttagcttgtactgttaagcaggaggaattgctgacctgggacacagtgtaattatcttgatattattattattctttcctaagagaaattagactctggtactgatgaaggacagggatgagaagagaaacaaagcttccagattgttgagttggattgggctcttttgagtctcagaaacctgtacctactcatgctgatatatctaggtaatatccccaagtagctcaagtgagctttttttttttttttttcctgttgtaaaccattgtgaaacttcagaaatttcttcttaaatctcactcctccatgcttcctcaccatagttgtttttttttttttttttttttttgctttataaattgtttagatttcaaccaatctggtccacggaagagattttttcaaacacagagaccacaccttatatatctgtagccatcagaagc

SEQ ID NO: 29483 - DNA, 704 bp, Bovine  19866881457094
  misc_feature (1)..(1): n is a, c, g, or t
nccaaaaacttgcccctacttgccccttcaattataaataatatactcaagaaacaaattactcatccgcctaagaagaaaataaatttttataaaaggtattccttccatactttcagtttttgttgccttgacttttttgtctaatgtgaattcaagtaaaaaactcgacagcatttaaaaactgacctaaatctctcctctgcctgtgagaactttaaatctatgcttgcactttctcttactctgatcccattaggataatagtatgtggaaattttcatgtttcctttgggagtctctggggctattaaatcctcccaagtaaatatgatgtgccatgcactgtcaggtcaattaatcaaaatcaccgctagtttctagagaaaaatggctgcttagatgtacaagaaccagccagagctaattctgagggtcaagaccactgtttcaacttaacaattaatgcccgtccacctctaccccgcccagaatataaactctgtgagcttaagtcccttcctttgacttgttcattgctagaactactgctgaaacataatatgtgctcaataaatacatgctgaatggctagaaatacaggagaaaaattcagttttgaactaaaatttacttctctgccatcattttagatctttaaaatggaaattctgctcttatgagtcacccaccatttagatgag

SEQ ID NO: 29484 - DNA, 963 bp, Bovine  19866881662757
  misc_feature (1)..(1): n is a, c, g, or t
ntttttcttctaggtctggcaacaagtcttgtctttattataaagacaagtttattgatgttgagacaagcagagttcctacttccacttgtgtttgaattcctgagccgtggctgaacctctctggaaagcagcatggaatcactatcagctgctagttcagacctgattgtttggagttcaaacttctttctaatatctcaagacatagagcaagtaataagtccatcagtgtttgataaaatggcttttacttaagagtaatgggtggagtagctgaaaatattttcaactattgtctgaaattgaaatggcagatattgttatcaatttaagccatcttcatagtgttagaaatacatttagtatttattctctctcctgatttctccttttagaaggactccaaccccattattgttgggagtagacacaaatctttttggactgccatcctgagtcatatttatgatagacaggactaaaatttcttgaggatcatctttacatgttcctcttggaagacaccttaactaaactacacttgggaaattggtcaagaccctcccctgtacagtgagcagccaaaatgcctcataggccctcaaaagctttttggagaggggtaagatctgtttgttttcctaagataagaatctcttcaggatcagtcttagagttttctttcctaataggatgccaaggtaggaatgaggacccaactcatagagggaacatgcctcaacataataaaggccatacatgacaaacctacagctaacaccattctcaatggtgcaaaactgaaagcatttactctaagatcaggaacaaggcaagcatgtccactctcaccacttttattcaatgtagttttggaagtcctagccatagcaatcagagaagaaaaagaggtaaagggaatccaaattggaaaagaagaaattaaactgttcctgtttg

SEQ ID NO: 29485 - DNA, 1921 bp, Bovine  19866881694271
  misc_feature (1)..(1): n is a, c, g, or t
ngggaagtcttaattttcccaagatctgtctagaaaatctcagggaaggactgattggtttggagtaggtcacatgctcgtccttggacttatcactatggtcagggggaagagtcattttgattggcctaacttgtgtgatattctcatatctgtggcccaggaatgggagtgtataatcggaagcctcactctaactacctaatggagggaaagagtgtttcttctgaaaggagcatcattcaatgaaacaagattcagttctaaaagatagggggtaaggcataatgacacaatgaaatgccaagacgtctgctctgtggtgtgttggtaaaactttaactaccatcctcctctcccacaaaagaagccctgacttgtagtatttgccaatctctgttgagtgaacattgctaccttagctagagtcaagctacccatgtgacctcactggatgtagagttgggaagataatcacaacagcatgccatttgagtttttcccctaaacagatacaacataagtaagtaaccccaagaggctaaatcatgggacaatgcagtaaagtaattggaagcaacaagtttgagtacttttttaacctttgtttttgatataatctatttaattgcaagtttatataattcattagatttgccatgtccaacaactggttcaaagatttcctgaaaatttaacacgtggccatgcaagctggctccagcataccatatgagattaaaagaaaattagtcctccattcatcgcaccctccctttccctcttggtgtccatatgtctgttctctgtctgtgtccctatttctgctttgcaaataggttaacctatgccatttttctggggactgagaaagtaaagaatctgccagcaattcgggagacctgggtttcatccctgggttgggaagatcccctggaggagggtatggcaacccattcttgcctggagaatccccatggacagagaagcctggagggctacagtccatggggtcacaaagagtcagacacaactgagcgactaagcattcacacatactgtttttctagattcacacagatatgtaaatatgtgatatttatgttttactttctgattgggattgacatatatacactgctatttataaaacagatagctgatgagaaccttctgcatagcactgggaactctactcaatgctctgtggtggcaaacaggggatataagtgtatgtataactgattcactttgctgaatatcaaactaacacaacattgtaaagcaactaaacttcaataaaaaataaattaaaatatttttaaaagcaaagctagtcaaaatatgatgtcaaattaatcaaaattgtcacacacacacaaagatagaggcagtcacagttaatatacataacaaatactctacccaagataaccctgaagttccttccttccttatcccctttctccttccctcccttcttcttgccttccttccagacttattgatagcttactatgtgtctagcaccttatcagagatagagttgtaatgtggtgtgtaaatacaagtaccaccataacagaccagatgaacatatgtacatatgtcttatacaatacatctgaaatgttgccattattaaaaatattatgtcttataattctcaccatctgtaggatgtgtatttcttattgcacagatggcttatcttgaattatccataaatttccttaaagcaagaagagttgtttcctattttgggtcgtatggcctgaattttgaaaacccttccccagaaattattatacatcggccaagacatctggtcacttacctggtaaatataaaactccccacaaagtccacttgacacagggtcccatatgccagatttacaaaataggtctgcaaggccaga

SEQ ID NO: 29486 - DNA, 827 bp, Bovine  19866881716154
  misc_feature (1)..(1): n is a, c, g, or t
ntgcacataattaatgatctttgctaagagtattttgggagattttattcaacaaagtaaaaaagaaatacattaaatattagtcctcttatatattataggacattacatccatttgtgtgcccataaatcatttagctatgaataccgtaagaagagcaagaaagtgataccagtgtactctctgagataatattgtcttagtatttgattacaggcacagtgtccttaatggacagattcttgctccatatccaatgtccagttggagctggggtactaagaaatggtaacaggaggattttagagcaggatcaaccaaagttcaggggtgtgaacctgttgatgaaataaaacttttactacccttgttagaagactctctctgtctctcttgttgtattgccttccagtgatcagttttgttgctccagtgtgggtgttttgtgtatgtgagtgtgtgtgtgtgcttttggggaaggaagatattaaaaatatttgacctggtttcaccatctttttattgggtcaaataaagatagaagggcaatggttgcttctgcaagaactggaggaataaacctgccttttaaaacaaatagatttattctttctgaacagctacaaaaaagtcgtttcaatgtgagttaaaccagagctgaatctctgtctccatacacaaggtaaagtacacagcttaagaagaagcagaagaaaaaggaggagaaagaggaaaggaggaggagaaggggaaaacagaagtcagttcagttagtcagtcagttcagtagctcagtcatgtgtccagctatttgcaaccccatgaa

SEQ ID NO: 29487 - DNA, 836 bp, Bovine  19866881744272
  misc_feature (1)..(1): n is a, c, g, or t
ncaactttcactttctttttcctcccatagagtagcatttctggacttaccgtatagctaaacaacttatctcaagagttggttgagaattcccatcttttccagggaaataagaatagcaaagatgtctgaacctctcaaaatctagaccccaagacctaaaggaccctaggtttccacaacagggtagagatttgagacctgattgatgtcctaggacaaaaattacaccttcatgtgtggatacaaaattttttttgcatgcttattttatgctcatcttcacaaaagggtagaaatggaaacatgtttgactgggtaaaactaaaggacacatttgttatcaaggaataatggatatcaaaatgaacttccaaggcccatcacgcaatcaatagatctctacttttccttcccttcatattttcagtttatagtagcaataaatacattggtgcatgaaatttactggagtctaatgatcagctggcatttctgaccagaagctgaactgagtaactgcatcccttccccactgtcatcaactcagacaatgccgcaagcgtggttattagtccccaaatgacatttaattatagctctaattggaggtctcacggttattcttctaaattgaggtatgctctgtgaggtctttgtaaaatgattcaaaatccattaagcagttgaagaacattgcatttgtgctttggtttatctctctgggtaacagaaactgcttggcttagatttcattttctaaaccttttccttcaaacttaggaaataacggaactatgtccttcattgctaaccccaaagcatcagaaaaacat

SEQ ID NO: 29488 - DNA, 1375 bp, Bovine  19866880518953
  misc_feature (1)..(1): n is a, c, g, or t
nttgctgaatcttctccactcttagcgaacccatggactgcagcccaccaggctcctctgttcatggaattttccaggcaacagtgctggagtggggtgccattgccttctccatggatattttactgtctgagccattaaggaagccctttaagccccctaagtctcggaaaaatttattattccttcatttctgctgcagatatttctgactcatgaagtataagacagtatctattgagtccttttctaatatagaaaaatgggccccaaacgggtacttctaataataaatataaatttagtcttgaaattttcccatacaaaacaattgtaatgttactgaaaattgacttgaaaatgaacacttgaaaagtactgttttgttttttttttttcaatttttcagaggatgtctatgtagatccttatttcctaggtaaaatccttaaagtgtatagacaaatagtctgcttaatgttaaatctgattcaaacatgttattttttttaaaaaaatagtccttgtgtttgagtacatttgtttctcttttttgggcatatagtttttaaatgttagaataatttatgtttttaaaaaactgcaagtgcggttgcaagtgtaataaattttcttcccaaatatacttcatccagttccctaattattaaaatattacattactatgagtcatttatctcaattagtaaagcagtattaatagatcattgctaactaaaaatcaaaccctttgacatgcccccatcaaagctgatggtatgtttgtttttaatataaaatatgttttaatttctgtaactatgagctgtttcaggttcatgtggtatatttcctgcccagtgtttcatttgatttagaaatgatatttatttgcattattctaaaaaaatgttggcaggtcttaaagaggagagagtttgtattcagcttgaatttgcccgtgagagtatcccttatctcctctttatctttgctttaaaaggatatgaacctaagaatcatctgataacattcatattaatgggaaaaggtgttacagtttttacctatttctgtgcactgctaaatggaaaacatgtctatcaggaactcgaaagggagatttgggtttattctgagaaaagtagccactctgacagccctactcctatagtatctacagaggtttgcagcatatctgaatttgaaagcaaaaaaaaaaaaaaaacaacccagcatgttaagctatatttgtaaaatgtgattcccacagatgtcaaaaataccgtctccctaattttaccttcattatgaaatgccttcgagctcaggctgtgtaacttttctatgaagcacttaatctctacccaggccc

SEQ ID NO: 29489 - DNA, 838 bp, Bovine  19866880611513
  misc_feature (1)..(1): n is a, c, g, or t
ncaaggtttacatattagctatgaattggttcagacaactttctagtcatttaaaattgctccaaaatacataaaagccatggttgttccaagggaaagctcttttctaagtatgctatgttcttgatttatgaagtagagtagttaaaaggatgtttacatttaaacaaaatgtgtctttttttaacttgaacttatttatttagtagaattcttaaagaacaagcctacaaataaaaggaaaatgatagacataagtaaatattgttacacttaaaataaatgtgtattttttgatacttataagaaattgatttaatataaattaagactaaagcaggtgccaaagtcatttttgcagaattgtgcttttgttgatggtctttttcttatatttgtaatggtaattttcttatattgtgttatatataaatacatatacaaatatacatgtacaaacacacagaaaggaaagcactagagtcttgttattttacattttaactttcaatgaaaagatatttttctcttttcttatcatcagaaaatcttacacatctacactgtcattaccacactgaacaaattttgcctctctatggagaattctgctttgtcatagcagataaaatagatccatgagcttttagcaattgtcataacactgtagtcttgcatttcatttggatgaatattcatgtcaacaatttaagttaaaatttattaaaaaaataaacctcaaaacgtattttatatttcatttttggttttccactacaaagatggaaaagtcttattttttgtcaaaaataataaaatacaaaatacattttacatg

SEQ ID NO: 29490 - DNA, 952 bp, Bovine  19866880614874
  misc_feature (1)..(1): n is a, c, g, or t
ntggcttatcaggtattagtttaaaaaaaaaaaaacctacgaaattatttgaagacactgaaatgacttgtttaaataggatgacaaataaatcaccatttgataatttcatcaaatttaactcagtaattcaactacaaacttaataaaggtcttgctaaattgaccagatttatttttcccagaagccactgattcagtagtcctttggcttctagtggtcccaacactttaaaattcaaagttccttatgagtctttgtcagtatagtattatagctacatacaaccaagacagaattagctttaggactttgtaatagaatttaatctaatttttaagtgctttaaataaattatatagtcatgtaatgtgaacatagtttcttttttgtgtgtgtttttgccattgtgtaagaaatcattccttttttcaattatgctttaaaaataaactacagcacatccacaaatgcctatttccatctttgatatatttatgtaggcataaaagtgaatgagtgaatcctactaacctaactatatggatctgccagcatttttagaacctgtcctgttgataataatgagagtggcatattttattagatgtagagttctgtgcttttaaaaaaatatcatttatttcaccaatatttatgtaaatggattgtaaaatattcagtgagtgctgcatttctgtccctttcctttccagttactgatcaggatgttagaatgaattattattgccagcttactaaaatttttgaataattgaaatattatttgctttctctcctatgccataatttagcacttaactacgttaactatgtgcagtgttagcaaactagaggtaaaggaattcaaaactgattcattttggctcatgtatagaactctctctacaaaataatacacctgtgttagaattttaatgttcttttatc

SEQ ID NO: 29491 - DNA, 1808 bp, Bovine  19866880799504
  misc_feature (1)..(1): n is a, c, g, or t
nactatgttagtacactgcattggtgtttttctttctggctgacttcactctgtataatctgcttattctaacgcatgtatatggaatttagaaagatggtaacgacaaccctgtatgcgagacagcaaaagagacacagatgtacagaacagtcttttggactctgtgggagggggtgggggatgatttgagagaatggcattaaaacatgtataatatcatataagaaatgtatcgccagtccagtttcgatgcaggatacaggatgcttggggctggtatactgggatgacccagagggagagtatgagaagggaggtgggagaggggttccaggattgggaaaatgtgtacacccgtggcggattcatgttgatgtatggcaaaactgatacaatattgtaaagtaattagcctctaattaaaataaataaattaaaaaaaaaaaacactatgttatattgcctctcttatgctccaaatttagagaagaggtgttttttgttttggcttttgttttgaatattcgtaagcctgagtttcacccaatttataagaaggaagatcatggcatttaccttgcagagataatccaagggttcagtaaaatcatatgggtaaaaaacttagaaaagtgattgacataatcacaggcataaaaacaacagcagggttgatatgcattaaatgcttctgaatccacattgcttgaaaagggaatttattttttttaatttaatttaatttatttatttctttttttttcttttttttttctttaatagaaaattatttaattagtatacatgtgttccccatccttgaaccctcctccctcctccctccccacaccatccctctgggtcgtcccagtgcaccagccccaagcatccactatcgtgcattgaacctggactggcgactcgtttcttacatgatattatacatgtttcaatgccattctcccaaatctccccaccctctcaacatttggaatatgtgtattttagaaatgtaactgattctccacaccactataagtctgattaacatattcacaaagtgtgaattagactgtttgccaggaatcaaaatcaagatatattttgatatttcagacactttgagaggtacttgcatcttccaaatttagttaaagcatttagcctgtggttgcttaccatattttaataaactactgggtattattttgcaaatagatcacagagttaacatttttcgcttatgatatatgtgaatttgactctcaagtttcctttgtttcaaggacacttcagtgaacaccttgaagatataggcaatttaaaacgaagctcttcccataaaaagagaagctctgaatggacaaatctcaatgtcatttcagagttaccagcaatgaaaggggatatattgaaggtctttccctgtctttcagtagtgaagagagctgtaggttggtttacaccctgactgcttcatttacaattcaattaggatgaatgtcactggaggcaaatattgtgaacagcatttctagattcatttttaaagatgcctaccacataatgcagcttcagtttcaggagttaggttcctatggaattataggtaggctagggagaattataatcccttctaatcattaaaatgcatgcatgaagtacttcaaatcagattattcatcactcctgaaacgctgacaaaatgcttaagggtctacttctttactaaggtgaaaccaaaaaagtcgctattctttaagggttggggtaatactgtgccttggtaggtcaatttttaactg

SEQ ID NO: 29492 - DNA, 1771 bp, Bovine  19866880885124
  misc_feature (1)..(1): n is a, c, g, or t
ncaaaaattctcacaaactcccaaaacttctctatagtttggtaatgaatttgttaaagataatggaaatttattcagatagtttcatctcagcaacattttattcaacgtattctagtggtattgtctacatcttttgatattccataaacccttagaaatttcttactgagtaagcagacaaggcaattctagatgcttctaattaactagaagttgatctttgatgagtatgtattgggggagtccagacaggagagaagttggcaggaaggagaaaaaggatatgtgaattcaaatgatgcataaactcaaaatagcatctagtcaaaggttataccctgattggacttactaaggctgaaagaaacaatttaagaaaattgaaagcaagaccataaagcctgtagagaaggcagtcaaagcatggcacctttatattcaattgttacctttaccaactatggagaaaatcctatatgcttaacttcactggatcatttgtggaggttttctgtgatgttggaacctggccatacttagacaaatatttatttatccttgatggataaataagagattttcatacatgatctgacaccattgggaaagtccttctctctcatctgagtaacactgtgaaggtaatttataattggtcatattttaaattgaaggaatgtttttttagactatttctatctgaaaatgtgatatgcctagtttgagaaggctataaccatatagatggctatagccatctatttactgtcctcattcaccttcaagcacatgtgcacatgccttttcaggtttgcagagtggtcatttgagtattactctctgtcaggagcaaatagaaaggaaactgtctcgttttcttctcccctgttttctgattgctcattagtagcttaacactttatgtattcacacttgtatctgtaaagaggtaagcatccctggtctcaattaagagcaattacatagatttctgtctgattttgctaagtgcatttttctgctaaaaccttttttctatatttagaacttcaaaggctagctgacctaaacttctaagggaacatgtttatgtgtcgaactgagcaataagtgtagaggtgcattattctaattatgttgacaagtgaatttgtaatcaatgaattaattcaatttcagatagctagaatcaaaagtatggctttacataaaataaaaactcaagggaaaaatatgaactactaagagcactgagaataactaattggtattacactttcgacattattttcaatagcaatttgtgttatttaagcattttgttatttaagtatccatcagcattatctcaattatgttatttctacataatcatatctccaaatttatggtgaatcatgaaattaagttcaatgaaatttcttctgcaattaaaaatgtacttttttattgtttaccttttgttgttttgaggtttgtagataccttgaaataggccaaattgcataaaaaaaaaaaatgcagtgagtcttcttttagtccaaaggaaataccagcatgtaaaagtttattcaaaagtttactcatgtttctctgaccatgataatatcttatatttgaatagaatttgactaaaacgaataatgtcatccatatttttgtggcaaagctatttctgcacttctgtaaagtgatcagtacgtgtctataaatttacaaagaatgagggtactgcagttatggacatttttgttatgatggttcttga

SEQ ID NO: 29493 - DNA, 1813 bp, Bovine  19866880906272
  misc_feature (1)..(1): n is a, c, g, or t
ngagagaaaaccactgctaagatgttaaagctattagatagcatgctctgaatattacttttataaacatcattattctgaagattgtatcactccctgaatattctattcattcttaaggttaccaattctgagatagtcacacttgcaaaataatagctattgttttaaatttatatatccaatttattatttagtgaaataatacatctactactaatacatccatattgtattaatgttaacttattgtataatgcactttcttacagtagcacatactggtaaaacatatagtagacaatgtaaaatcatttggtggcacagttttgatagaatcagaatttctctgaacttcccttagcctttagtctgacattacaaattataatcagtggaacgtcactgattttcctgaaataaattgtgaatgttctgaaagttagacttttgacaaatatttcaaaatatgtttgcatgttaaatgtatactagaaataattgaaaaattaaacagtatcaaattagtttatttatcaaaaaacttccatttttaaaattggaaatgaagttggagtgattccaacaactctagatctttctaatatcattcctcaccaaagctcagatcacctttaaatgaaatgcttataaaaaacactaaagtgctcttagtaattttcaagcagtatgtacaacattgcccagaatttgaactcttccagatttcatttccaataaatttgaactgctttgtatagtgaagagtaatttaaaattattgaagtgctcccagagtaaagtacccataaaaatgtaaagcctttcaggattttaatcactatgcacactttagaatcatttcaacacataaaatgctttgatttttagtttccattgctttaatttgaaagtatgaaaaatgccaaaccaaaatggcatttataatcaatgaaaattgtaagtaacctgaatttcaaaattgatataaagagttgaatatgggaaatatagctattattgatagggggaaaattagcaaccattataacaattatctataatactaatttaaatacccttgtcagacaagattgaattaactattatagtatgtttctataatgtaccaatagtttactttttctattttacacattccgtgtctgtgtggaaaattgatggtgactgcttatagatacccaaaagtgttgctgttaagatttgaaagcaatcagaattgatttaagattgtaaaaaaatcttattcaattacatttaaaaatctttaaagaatgaccaatgaggactataaagctatttaaaaatgttggataccagaaaactcctattttgatcctaacacaggtaatattttattgttttagctaaaaaattaaaatattgcatatatgatgaagtagaattgattgatagtacaaacaaaaaattagaatattgcatatatgatgaaatagaattcatagagttgataatacaaacaattaaaagtgataaaattctgatgttaaaggaggcaaataaataacatgcttctgtatgcccaagttctgaactaagtgagaaactgggtcagaaaaaggtagaggtgaaattaaatgtgcaccttactagtgattttctgtgggcaagggggtttataatactagatctgagaattaaatagagttataaatgtatttaaggggaagctaaaatcagttattcctcaggaactggtgctttcccaatggatctgagggaaaagcagaatatatggcctttcaggactttctagcttcaataaaaggag

SEQ ID NO: 29494 - DNA, 3227 bp, Bovine  19866880947701
  misc_feature (1)..(1): n is a, c, g, or t
ntggaataggtgttactcaaaatactagaggtttagcatgaaaaaatacaaatttcagtcaccttggaaatcacatattatttgaggaaatactgttctacttgaacacataaatcaagaaaatttgagtcataaatattagaaaatattttctaacagaaacaaatacaaattccataaacaatttgtctaagtgaagtaaatatttgttttaacatttctagctatttccaattatctatctcaaaatagataaataatatgaaaggcttttttttttaagttgttggtgagcttcaacattttgttggacaaaatatacatgatgttaagtcttttttgttattttcactgtgaaaaggcattaaaaatatcatgatgatattactcacttctgagaccactacaatcagtgtctcaattcaagtaccacttttctctcatttgttttctaagaatactttcagttgaattgaaaaaattgacgctgagattttaatcgaagcagtgtaataaagacatgaattattttcaattttagagctgtattcccaactttgaatagctagaactagtgagatttgtgatagaaaagtatgtgttcaggtaatttttttcaaatatttcacttctatattcatgggtttctctaaattatttatacattatttaaaatgtaggttgcaaagaaacagaacaagagaattataacttaatgatacattattcacagggcaatgcacaatctttgtgaggtagtttagctttcttgatcattggagagtttctctttagatgattaatcagtgtaggctttgattgaaaagatatagtggagttagtagcaagtcttcttttttccttcaaaagaaacctagtaaaagtgaaacagagaaataagaaagtataattaggacttagaattagatatgactgagacagagagagagaaggaggaagaaaggagcaaaaaataaaacccatatgtacacaggacccctttcaagaagatgctcccttgtatagctctaaggagtttgggtaactggtatgccttcttggacagaccctggccaatgactaagcaaagcagtggtaactatagccctgtctttcttaagtggcccccagacaagggacaaggaccatacaagtcctttgttccagggcttagttagccattaaatctaagattgaactttgctccagaattctccttggggctggcagagactgtcaagttcgctttgtggtatgagggctgcctcatacattcctgtatatcacctattccttttctggtgttattccccaatatacttgtgcctccaattatctctctcagtatctacttcccaggaaaaacaaaacaaaacttacaacaaatatcttttgaatttagtaggaaataaaatgtatttcacaattgtatttaagaaattggagttaaaaagaattaacgttccttattgttacaacctgacatcaacacatgaggctgaaagacttgattaggtatacatggcagttatgtttctagcaatttcaatatttctaaatgagtaaaaaaagttgctcaatcgtctccaactctttgccaccccatggtctatagcctaccaggctccgccgtccaagcgattttccaggcaagaatactggagtgggttgcatttccttctccaggagatcttcctgacccagatattgaacccagtctcctgcattgcaggcagacactttatcatctgagccaccagggaagtgagtaaaatgagtaaaaacaacaccaactgcctaatgcctgatgaacactctcctagcatatcacttgtggtgttatttttaatatccttagttttcaactgacacatttcaactacaatctaagtaaaaatttaagtatgcaaaattatattaattatacttataattatgttgctataaatttccactccagacagtgttcagaaaaagaaaaaaaaatgtgcccaagtaacactgtataattttgatgttatttaaaatcaaattaatagatagagataaaacaaacaatccacactctgtaatttcacagtcttgatagaacctgtcacataatggaaaatgcctcttaattttgtgataagacataagcaatatttattgaccagttgtctttttcagaggcataccaaaaagacaaactagtagctaaggagtgctagagaaaatgagtcttggaactagttttaaaacagtatccaaagtattgtacatgtcatgctatagtcagtaacctaatgcttctcatggcgctgatagatttctactgctaatattcggttatcatcacaccttgtcaactagtagcttgaagcatatttatcacatcagatgctagttgtgtaaaaaaaactgagaatatcaaaaaagcatttttagtagttgcattggaaatagcactctattacatcacccagcactacatgctctttctctataatcttgtaaaacttcagcagcagagaaatagactcaagaattagtattggttctcagatacaagcatcatgttgttgtcatgacaatgaaccacagctacaattgtgttctcattagaagtgatacagtaaagctccacatatcacaccacacgcacagcggcttattctgcttacatgcaaaaccatcagagaagaaggcagtctataagagctttatatctcatctctatgccaactgcaaactggatgtggactagaaaattggccaaagtatttgttagcctatgtgacctgtgcacaaactgtcagattggtacatttatcttaagccatctgtatcaaatttttcctattctttttttcaccctaactccagaaatcaaacagattatcctaagtggttgtacaataccaagtgagctaatctggataaaacaatgtgattctactacagagataataacataatgaatgcaataagtttcaacagaaaatagattcttataccaaaggatgtactgtaaattgtaaataaaacaatccacaattttcctatatgcacacacaaataaataaaacaaccactgttcttagtgattaagttttataaatgtcttcatatagatgtgtccaagcactttcaattatgacaaggctatttgcaaatgcaaaattactattttaaatgaatgcaaatattgtttctatatttcaatgacatatacactgacatatctg

SEQ ID NO: 29495 - DNA, 1220 bp, Bovine  19866880966105
  misc_feature (1)..(1): n is a, c, g, or t
ntcatgtaaagattactttaaccacacagccaaaactaaaaattaacctaacaatatatattaaagcatatatctttttaaaaaaactgaaaaagagtatatacgtatgtgtgtataactaaatttactgtgttatatgtctgaaactaacatgatgttgtaaatcaactgtactttgataaaaagcaaaaaacatatatcccttttagcctatgatattattattaattagcactttctatactacagattttagagaaggcagtggcgacctactccaatactcttgcccggaaaatcccatggacggaggagcctggtaggttgcacgtccatggggtcgccaagagtggggcacgactgagcgacttcactttcacttttcactttcacgcactgaagaaggaaatggcaacccactccagtgttctcgcctagaaaattccaaagacaggggtgcctagtgggctgctgtctttcgggtcgcacagagtcggacacgactgaagcgacttagcagcagcatactacagattatctgcttattaaatatataaataaattgatccatcacttacgtattatcgaggccacataatatactgtgctatacacataaacatatgactaaagtgaatccttaaaacctgatgcatgagatgaacttatttttcaagtacaatttaaatgaatgtaaaatacacatttttattgctaatcatgtgtacacattccctcagcataagaattatattttaatacattatgctaacaaaaaatgagcaaaacatgtttcttttcaagataatttatattatcaagtcatgcatgagagtaatgagattaataatagaaagtatagatttattcactctctgggatgataaatcatgacaagtcattaaagtcatttaattctgatacagtaaaaccatgtgatggcagagagaatggataatactatttagaacagttcatgcctagttgatgagataaaattaagtcagagttgttagtagtgttttaaaattgttttgcattaatagaaatctggtaactttgaatggaatgtaaatcataggagaatagaatgctccctttgatgatttcaataccacatgtgaaaagaacattccaagctagtatctcttacagtttatgactcataatgattgagttctttcttacataacacaggtcaatagtctcccacaacttaa

SEQ ID NO: 29496 - DNA, 1820 bp, Bovine  19866881021559
  misc_feature (1)..(1): n is a, c, g, or t
ncctttgactgtgtggatcacaataaactgtggaaaattctgaaagagatgggaataccagaccacctgacctgcctcttgagaaatttgtatgcaggtcaggaagcaacagttagaactggacatggaacaacagactggttccagacagaaaaaggagtacatcaaggctgtatattgtacactgtttatttaacttatatgcaaagtacatcatgagaaacgctggactggaagaaacacaagctggaatcaagatttccgggagaaatatcaataatctccgatgtattgatgacaccacccttatggcagaaagtgaagaggaactcaaaagcctcttgatgaaagtgaaagtggagagtgaaaaagtgggcttaaagctccacatttagaaaacaaagatcatggcatccggtcccatcacttcatgggaaatagatggggaaacagtggaaacagtgtcagactttattgttttgggctccaaaatcactacaaatggtgactgcagccatgaaagtaaaaagacacctactctttggaaggaaagttatgaccaacctagatagcatattcaaaagcagagacattagttttctttttttattattattattattttttaaattttattttatttttaaactttataatattgtattagttttgccaaatatcgaaatgaatccgtcacaggtatacattgctgtttcaaaaaatcctgtgagttatagaatctttagactttgaatggaaaagatattgcagttgtttgtgtgtgctgtgtttgtgagagcaagagaaacaaagacagagagatactaaggactgtaaaataattgtgactttacctcatttttaatttttagttacataaagaatcaaaatactaattattttctgaaaaatctgaatgatgttgtgaatgacacaaattacaatttcataaacttaatataatttactatttttgttgttttcaaattgtataattcatacaaagttaatctgcaattttttttcagaacttcatcaactagattatttcatagcaactgattgtaatgcaataattcaaggaatttttttttctttagaaagcacaaatttgcgtatgcaaaaacagtttcaaattttattttccttggatgaaagcttcttttatagtgcaaatgtattttaattagaaatctacacttaaaaatcaaatgaaaggagaactaattttttttcttttttactgctatatgccagggggaaataatattaatgttaaatacatgtcttttaagaaaagattaaaatggactgtgatatgtctttgtgtaagcacaaagttccaacactctgcaattgtcctttgaatgaaatttgaatcgtattttctttattctagaattgaatcagagcatttaaagaggtaaacattgattatttgatgcttcacttaaaagcattcagaagaaattaatcaaattaacccatccttctttctactggtaaatatatatataatataatatatatattatattatatatataggtaaatatatattttttatttatatttttatattttgtatatatatttatatatattatatattatatatatataattttatattattatatataatatatattggtaaatatatatatttttatttatatataatatatatatatacatatacatataaatatatatatattggtaaatatatatactatattttattttatattatatatatatatttatatatacaatatatatataaataaatatatattatccatatatatggatat

SEQ ID NO: 29497 - DNA, 1689 bp, Bovine  19866881397103
  misc_feature (1)..(1): n is a, c, g, or t
naaatccaaagaaagtcactgcactaaatcaattggcaccattttatcattctacatagaaggaaaaatatgctcttttatatacaaggagaaataggtaaatgtaattactataaaaataaaatagcaagcaataaaacataaaaggaaaggaaaaggaaaaatttgattgtacttactaaaccttatttagagctccctaaagaacagctgttgtttcttttctgtgataatccttccttgctcattcatgttgctgctcatgtaacacctctgtcccagcactttaattcacaactaaagattccatgccaaaccctttacttaacacagtaggaaagcattaacttatacatttcaataatacacagtacttaattccactattcccccatttaagctgattttcttaaatattgcataagccagaggtaatttgatttcatgtttttatttaaattatatacattagtaccactgaaattaatctcaatacaacatttaaaaataattagaagcagattgggagtaacttaaactaaaacacatactgaaattatatggcttcctaagaaagaatagtgtttataaataattacatttatgaagaaaaaagactaatttgtatcctttctaaattgtgggctataggttaccatactacatacaagaagatcccctgaagaagggcatggccactcactccggcattcttgcctggagattcctgtggacagagaagcctggcaagctacagtccatagggttgcaaatcagacactattggagcaacttagcgtgcatgcatatatatatctatatcaatatctatatatatatatagagagagagatatatatatatcaccttagttcctttattttaactttgaatttaatttttattactttttttgcttatctttaatacttttggagaatatagatttttatatcctgaaactacgtaaatagctatggcccagctgctctaataattaaaggctgtgtgatgtagtaaaagtaaattgaccaagtcaagttaagtgacttctaatcttcattggtacagctggccggatatgtcacttgatacctcccaaactgtttcatttccaaaatattaattttgtatcccttcatcacttctcaagggctaatccattttatccctcatgtgatatataacagaagacatttgaaaacattagatgttcttgaaattctttgacttttatttttgcttgctaacctaactataatatgttggaaaatatacatccttagaacaatttctcatcatataccataaatgagaactgtttttttttagcggaatttcaggattagtaaatggcttttgatattgttcacatgcagaagatactgaaagttccccttgattgctataaaaaatgactaaaagtggaaagtgttttactattttatatttgtagagtaagtacatactttgttgccaaagccagggctcttttgagagggagatgaggttaataaaacatacaccaaataggcagtagttaaatgagagtgtcctggtaaatgtgaagcatatgctcatcctatgactgtgtggatcacaataaactgtggaaaattctgaaagagatgggaataccagaccacctgatctgcctcttaagaaatttgtatgcaggtcaggaagcaa

SEQ ID NO: 29498 - DNA, 837 bp, Bovine  19866881702467
  misc_feature (1)..(1): n is a, c, g, or t
ncttgaattgtcacataataatacatgttacactgaaaatattttatgatgaaagacctttggaataaaatacccttggaatattataaacaaagttgcaacagattaaaaaggaaactttttagcagaagtacttagtaatttcctcacaacttgacatagctttaaatccaaacctcacttagaatgattgcttctatcacagagcagtcctacactaagatctattccattattgaaatagctgaaaatcaatgttttgttgggggatatatagtcagttgcatattcccatttttagtatgctttacagtaaatgttcaaggacttaaaattattgttgctaaatgatttgtccttgaaattcaaggagtaactattagtgtattttgactctggcattttagtagtaagtagtaactgcatttggttcagagtcttaaatacttccaaatgactacaattttttaagtgccaagtagtttggaaaataattgctttgaatatcaattttttaggactcattatctacactatgccacccagacaagagaaaggtgaagtaaaaaaacattgttgatattttggttacattgcaaagtcgtctcaatagtgtttattgatatggagcttttttttttttttttaagtgcaaggactaagatcactgaaagtataaaataatatgccttaaatttgctgttgctattaatcagcttctgttataggaatgctattttgaaggttagtcacaaaaatccacaaaatcagatgcataactcttaaatggatttgaatatactgttgctgttgttcagttgctaacttgtgtccaat

SEQ ID NO: 29499 - DNA, 1204 bp, Bovine  19866881753936
  misc_feature (1)..(1): n is a, c, g, or t
nctgcaggaattatgagtgggaagaacaggtgttctgagagattctacagtgcttcggttgctaaggagaccactttcatcagttcagaaaggctgataacctggacttttgctgccaaattggtacaacaaaggttggaactgatataaacatgcacacacaaataaaaatgacatgggtagtttaaaaaataattcaatgataaggttgcactgtacctggcaaaatacttctatattaaataagaatagttgcataattgctaaatcatttgaggtggactaattggagcacataattccaaaattaaagtataaaaacagaaaaagtttatttatgcccattatctcattaaaaacaatgcaactaatgacatatatgctttagtaattacattaaaaagtttgttatattttaatgtgatgttaattatacaaaatagagaaaagtgagtactagataacttcattagacattaataaatactaattaagtatttcttgggcaagttgaatatgagaagcatttataaacaatgtgatataagtggtattttaatatgcaaatatgattaacattgcactgcccccccaaatattttgatgcaagtaactggtttttaaaagcattacaattatctctgctgagctgttaaactgtttcttaaaggatgttctatcattttttctttataacactaagtaacataaagcatgtacctgagaaatgaggaaatagcaagcaagtattaagaaaaaaaaaaaaaactcccttcctaggtttcattagcacaggactagaaatattcaacatttaatacataagatctttctatatttaatatcacaaaaagtaattaaaatatgatttgaaaactaatgtttagtaaaaactgtatctttcagttagaatacttttgtgattctttttgaaaagtttcaaaatgatgaaaggcactatggtaaatttacctttaaaatatcaaggaatactaccaaaccttaatatttggagtctaatagcaaagtatgatatattctattatataacacagtcactttttaaatttaaacttaatactgaaattttgatcattccattacataaaaataaaacaaattggaggtagagacattgcatttttcactttgccattttcatcataaagtcatttgtttgaaacagttatatattttggcaaag

SEQ ID NO: 29500 - DNA, 1426 bp, Bovine  19866881837022
  misc_feature (1)..(1): n is a, c, g, or t
ncttatttctttcccctaaaaatattcagctgtaaagttggtttctaccagcttcagactttcattttactacaactacctctagcagacttttgtcaaagagaaatgcatgtttttgccaaacaaaatgtacatttcttttaagaaatgtgtttcttagtctgtctatttccctgttgacattgtaagtctgccagaacaaggcaaattcaacattatgtcaggcagtgggtattacttttcaatatgtgtatgtgtctttatctgtatctgtgtaatgtgtgttgatgtttaatcatttggatgttaactaaatgctgtatttctccaaggagtatctgctatagatgttaattatagataaaagagcaatattatactgagaaagaagtcatttttgttgatttaaaatagcatcattgtcatttgtgagaatagcttgctgtttattcctgattaccttgaaatggaaaagctgttatatctgtataattgaatgtttcaggttaatttggctgtaagttgttcaggagtaaattttagtcacgtatcctcagttttgattgttttaagcacatgccactgaattgtagagggattgaattgtaataggggagacccttgcatataaaaagccaacattctctaaatttcactctaagccaaaatcatgaaattatataatttaaaatttacaatgctctctatagaacttatgtagacacagaaggagaaggaagaaaaatggaaacagttctggtaagtcttcaaacctatcttgagaactgggtctacagctatctttgggaaaaccgttagccttcagccgagctaagtcatgagcagaggtcatttccgatgtgaccttcaagcccatgttgcatctcatgggcgtgaagtgagagattcatcttaaggaactaaaaggatccttgggaattgaagtcagaattgcaaatatttagacatcttttgggaaggaagaatttgttatactacactgtgttcatctgatcctaactttggagtgtcagagcttgtgttaagtttttaatgtttaggagattctggaagagtgaagaatgaattaaaatttttataaatggaagggtttacttttcattgctcttattatattgtatgggcttccccgatggctcaagcaataaaatgcccacctgcaatgcatgagatgcaggttcaatcccagggttaaggagatcccctggaggaggaaatgacaacccactccagtattcttgcttggggaatcccatggatagagaagcctggtgggctacagtacatggagtcgcaaagaactgggcatgactgagcacgtgatgggtggatggattatattttatggctttattcattcaaaatacatatgctaaaaagggcatagtttattcttctatcagaa

SEQ ID NO: 29501 - DNA, 1409 bp, Bovine  19866881867392
  misc_feature (1)..(1): n is a, c, g, or t
naaaaaagagtttctgattttcttttccggtcaatgatttttttaaaaataagaaataaatttcctttaaaagaagttaaatggtgaagattacatataagattacatgtttctgaatcctcagtcttgactcaacatatcttatctgagttaaattatgcaaattaaccacaatttctatacttggtttttctcatctctaaaattaggacaaaatagcttttcttcccatataaaattgtggcctggattatagacagtgatacttaagtaaatcatgtataattgtaccaacatgtaggaattaatcactaattagcaatgatgatgataatgatgattctatgaaaatttgattttaaatataaagggaaaagtaagcatcattaagataatctctattgttattaataaaagtgataaattattgatttatggttctagatttcatttgataaatcaaaattaatttggattctatatagactgaaaagattcaagtttacaatttagatactcacctataatttataatctaatttaattcagtcagtagttaaatcatataaattcttgtctttataatggtgctataaactatttatttttatgatttctctgtttctactcatgagaacaaatatgggatattattcagcttttatgtattttatttaattaaaattaaattggcttctttgttactttttaaaagtgtgtaatttaacattaacttgcctcaaaatgttgacatatgcaagttttcatgtcttctttcatcttgaaatgttctcagcttaagtaatgatctcatcctttttactgagtttatgactgattataattccttgaggatttaaaaaaaaggttaacattttttatatccaatatgaagtatgttactttcactttaccattaacataagaaatagctctttaagtcaagaaagataataatttttcactaatctccataggggtaccaagtaagatcaacaaagaacattatgtttcattttacactggagatccttgaaaggtgcatagttaaatgtcatccttttgtaagtaaatcattcacagtttgggaagacagcttagagcttcttaagcatgatttactgccaagacctctacagtttttaaggagtcagaccaaaagcatagtgtattaatacattttatcagtacattcttatactgaaagtttgcaaaaagaatttggagacatataaaatgaaacaaatttttaaaatttgtcctaacgttacctctctgagacacaaatcaatctaattataaacctaacaattacagatgaaaccaaaatgctttatgttcatacaatataaaaattcatattctccattttaaactcatgtaaaatgaattgatttattcttttgaca

SEQ ID NO: 29502 - DNA, 1138 bp, Bovine  19866880423786
  misc_feature (1)..(1): n is a, c, g, or t
ncactggagaaatgaacactgagtcactccccagttctccgttgtaagctggactttagccagggcttcatttattgtaaagagccaataagttctgactttactcaagggccatgataatgccttaatgtcgactcagaccgcagtcctcccagctattctggtgctcctcctacctcagtgcacagtgagctgagtaaatggccatcgctgcctctgagggaagtactgggagaatcattgcagtcctgtaatagctgcaagttccctcttctaggcaccggccactttgttagtcaatgggttccagatttgaaaactggctcagggaaacgagtaagagctcgttactttttattggagcaattgccctcacgcctctgctcctgcatttttgcctctttcggttatagatgttaagcagcacccttcttgacagctcatctgttttgcccccagggatgctatgtctattaaccaaatgtctacagctccctgaggatgacgccccctctgctactctgctgacctcgccttgcaattattgtaattgcagcctcctggcttctggtgattaaacagtgccacctggcttctacgggtggggggcatcgtccccatggaagctaatgagctcagatccacagcagctgcaagtgtcttcagcctcagactgcaaaggtgagctactggtgaacttctcaaggatgctgagcattgtccacagaaggcggtggatctcccctgtcaccagagcaggcctagtgtccttggcaaatggtgtgcccttgtatccctcctctggaacgctgcctcagtgggtctccttgtctttcctgtgtctccattccaccatatccactgacctcagactctttgtttccttctctggcatacattagggttactcgggcatttctccttttctgagcataggcctttgttttctctaggactccaagagagaaccagcgtaatagggagtttgcttcattccttggggctctgtccaggaccagggtgttcagtcttgtgtcataaaagcagtaagtccaagtgcataaattctgatttgtccagccttaccttttagcccccttaagcaagctcccttatattccaaccccaggaatgtttt

SEQ ID NO: 29503 - DNA, 2860 bp, Bovine  19866880443515
  misc_feature (1)..(1): n is a, c, g, or t
nataaaaaaagaacataaaaaaaaacttctgtgtctatgattaaaatggccattattatattttaacaattcatgtatcaacattattggaaacaacccacaatttttgggaaaaaaacataattttttgaaaaaagccccttttcctcctaaattaaatgaacacaaaaggaattttaggaaagtactactttaatgccctgtcgattaaaagttatccattccctctgaacaaattactgtttttagtgattttaaacatgatggaatttagccccaattttcctgtgctataaacaaagtcttgactgttgcaaacatctgacaaaattaagtttaatgctcactttgttttcattattctcactctgtcttgaactctgctaaatgctacaaaagaaagaagcaggaaaagaaaaaaacaaaacaaaaaaaacccctgaacaaatagtttcagttagtcaaatcaaattgctgaaaacagtaaatatatgtattaatgtcaatataaattgaataatacatattgaagtgattcttcctctggtttactaattgtcattttgaacaaaatcgtccagtcatagttcattatcagcaagagtatttaagataaaatggcctgggaaccacagaatatttgtgtgtgtgcgcagaggattataacatggaatgaaaatatggctctgattctgtttttggtgtaattttgttcttccttagatgtcaagcagtcccaatgattcattatcacaacaccttaggaagaaatatagaggatgcctttttatctacagcttctaggtggggaaataaaatgccccagtacaatttagtaatttaattttggccaataaaagaagtaaaaacagtatctctaaatgtctcacgtcctttttttttttcttctcaaaagacatttcccccaaactaattgttatagaaacataaagtacaaagcccgtgctgctttagataattggttatgtggtgaagatgtatcaatagaatagtcattccataaaagataatttagtacagataaaattaggaactagtaaaggcattcctgtgttatcctttcttttctgaagagggatggacaaactatagtcctagggccaaatctggtctactgcctgtttttgtaaataaagttttgctggaacatagccattcctattaatctacatatttactaagctgctaccatgtttcacctgcagaagagttaaggagttacaataaagatcatggggcctacaaaacctaaaatgtttactgtactatctggccctttagagaaaaagttttcaaacctcagttttagaaaataagtctcataccacatcattgattacaaatcatgcttaagcactgtgactgcttaactctatttttacttctttttcagtacctaaattcaaataaaactttaataataatagaattaataattgtctatatttagcacctgacttgtctaataatatactaaaatggggattgattaaagcgtttagtctgtggtaattcattgttgtgttactgtagtgcagttgttaaatcgtgtccgactctttgtgaccccatggaatgacgccaggctcctctgttctccactatctctgggagtttgctcaaattcatgtccattgagttggtgatgctatctagccatcctcatcttctgccaccctcttctccttttgccttctatctttcattattaattcattattgcaatttaaaagtaatgaaataggtatgctagaggtaatggagctacccgagagctaattgaactagaaaaaaatctatatatttagggtgtgacgctacatggctgtctagtttagaactgctttgttattaaccagaggagcatgcaaaggaagttagagattctatcctagcaacatctggttacttgaaggctaatcaaaagttgggtagaactttctggagagtcttcttcctcaatgctctacacctgtgtttacagagaaccttgagacaacttctcttcccatgagatatcagaagcatcatttggatgctgttcatctattttgtaaagagtgttttattcaaaatttcctaagcctgggaaattgtaaactaactaatcatagtgtgagttcagtatttaatgttaattcaaaatctaaggcaaattgcaaaagttcttagttagagccaaatgttgacaatacatcaaaaactgagaacaaaactttctaccaacagcaatttatttaaagaattagtatgcttcctctgtttgtatgttttggaagaaatgagtgtgactgactttaaagtttgtattcagcaacattttactgacatgcacattagaatacacattaaaaactcacaccagataatttggtttatttttctcatctaattacaaataaattttaatttttataataataaacaaaggcacaaattatgggaaagtataagataatagagcctaataaattttgcaagaacaatattataaaatgtcataaatgctaactttttttaggatatgactaacatctcaattttgacagctttttaaaaacttgttttcaatatttgggaaaattaatccatgaatgatatgaaacaatagtattttgttgatatatgatatgaaacaatattattataaatgttttgaagataatttcacttcctattaattgtaattattgatcaatatcttcatgtactattatgaagtcaagattagagactataaggctatatatacaaactttaggagttatttaaacaaaaactttttaaaagggaaattttacttaattattggaaagtaaataaagattatgtgaataaa

SEQ ID NO: 29504 - DNA, 1255 bp, Bovine  19866880446821
  misc_feature (1)..(1): n is a, c, g, or t
ntgtctatggggtcgcagagtcggaccgactgaagcgacttagcaacagcagcattaccattaacgtgctaaatattacactttttgtataagttctgtaactgtgagattgttatttaatagctcagccagaagagcactaaggaaatcacccctcttatgagtcctgagtgaatggatggaagccatctgaaccagccagaatttgtagaatcctggggttattttttatttgacaggcattgaatagaagagtattagggtggattgtggagaaaatcatgtccaaaagaaacaataaaaataatagatttactgagcatgttatttataattattgatttcttctgaatgaaataaaaaaggatggctcagtggtagttgcaggttttatctacagtgagtttcaggagatggcaactcactctagtatttttgcctggagaatcccatggacagaggagcctggcaggctacagtccatgggtcgtaaagaattggacacaatttagtgaataaacaatgatgcagaaaagccataatacattttggagagaagtggtcagagagcagggacgataaaatgtttaataatattcatggcaacatctccgagcaaatttaaaataaataaaaagtaaatagactcatttcctgctactcttacatagatgcagaatttcaaaccatttctccttgaaaaaatattactcaaattgggcttgatagaggttgatattaccaagaatgtgctttatggcattagtggttttgagttaggagtacacaaaacaagagttttgaatattttcttgattagagaattatctttaccatttttgcattattacttgaaaaggtcaattatagggcctaagctatactattttgtggtatcatgagaacatgagcagtttgcatagggaatagtacattgttattttacttttttccccctacttcataatatgaaggacactcttgtaagcatttaggttttcagtttgttcaaagaggttttttttgagtttattgtcttcatgtctttgattgttgaatccatgggctgtcccttagaagtggtgatggggcttcctacccaaggggcacattccatctggcaaagatcttggaactttaatatattgttctgtctaataaatggatctctgttctgtggaaacaaacagttagagctcttgctccaaaatgactactgtgtgatacatgagatacattgcgcatggtgggcata

SEQ ID NO: 29505 - DNA, 881 bp, Bovine  19866880528354
  misc_feature (1)..(1): n is a, c, g, or t
ncccattgatgttgtctagtgaatttcccttagctaaccacagagtttaaatgttctgctgccttttattttagcacagttgagttcagtctcttcccttattgtaatagttttgaataaagtcttctttggttaacttgtttgcccaagttttcctttgacagttccacaggtaattttcattaacattcaaatattataggaaaaacatttctagatactgaagagtaatcttcaaggaattaaatagtcattaacctgcagcagaaagatcccctggaaatgggaatgacagctgactccagtattcttgcctgcgaaatccaatggacagagaatcctggtcgactagtctgtggggtcacaaagagtcagacacaactgagtgactgacacacacatcaaatagatagtgtccttccaccaagacccattactatttctgacctagtattagaagggattggtcttttattttttatttatttttttttgggggggattagtcttttaaatggcttcttcaatgggtggattttgactaagtgaaaactcctatttagtaaacccaatggtagatgcccatatttgtgagatgactggttagggaaagtagtacagtctgtagtaattgctcagaatgatgctaaataaacatatacattagatattactgtaggagtagaatttgtttagaataaaattagaataaattatcagcacccaaactttgccttattatcacataagctcaattattttccatattttcctgaagaagcttactccttttaaaatctttcggcattctattccgtgggagctgctttatccaacatatagcacctcatattgatgtacagatggttgccacaaagctg

SEQ ID NO: 29506 - DNA, 1277 bp, Bovine  19866880541599
  misc_feature (1)..(1): n is a, c, g, or t
natgagtcaactcttcacatgaggtggccaaaatactggtgtttcagctttagcatttttccttccaatgaatacctaggactgatctccttcagaatggactggttggatctccttgcagtccaagggactctcaagagtcttctcccaacaccacggttcaaaagcatcaattctttggtgctcagctttcttcacagtccaactctcacatccaaacatgaccactggaaaaaccatagccttgactagacggacctttgttggcaaagtaatgtctctgcttttgaatatgctatctaggttggtcataacttttcttccaaggagtaagggtcttttaatttcatgactgcagtcaccatctgcagtgattttggagccccccaaaataaagtctgacactgtttccactgtttccccatctatttcccatgtagtgatgggaccacataccatgatcttaattttctgaatgttgagctttaagcccactttttcactctcctctttcactttcatcaagaagctttttagttcctcttcactttctgccataagggtggtgtcatctgcatatctgaggttattgatatttctcccggcaatcttgattccagcttgtgcttcttccagcccatattagtatggccaaatagtcaaagaacaagatattcaatgtagaaaaaataatataaacttcttgctttgagtttactagggtcaatatatgaattatattaatatgtgatatggtaatcacatttatctcaatatagttaatcagaagaagaaataatcattaaatcctgaatcctattcctgatcaggactcaattacttgtgttgaaatctcaaaccatgtaaattccaatataatattttatgtcacctggaaagtttttacaactgttaaccctaatttttttttttaatttagacgagagtaaactaagtgatttctccaggttcttacatcttgtttatttgattataaaaaattgactcattttattcagtttccctcagtatttataactgcttttcttcctgtcaaggataataaaatgtgagacagagtagtattttactggcaagaatagtacagaattctattcatgaaaactataagcaatctttgtgaaaaatactattacactgtactcaggtcaaaatgaaagcttttagttcattatattaactcattttttcaaaagtcattttatatccgaggtctttgcagcagaatgctgttatcagaaatttgattcacttaa

SEQ ID NO: 29507 - DNA, 1110 bp, Bovine  19866880566665
  misc_feature (1)..(1): n is a, c, g, or t
nttgacatatatttatacattactatttaagataaatagattagagtcttcttcaatcaggaggcattaattaagagatataaagctgggaaattcccatttctgttgggttcattagaaaagatcttcagcctacagacccatattccaatgttatcctgctcctgtgcagagtgtaagaggaaacactccccaatggtggtctgtgacctccagaactctgatcagtgttataccgtaatattagaaaaatgacaagtagaatattgagaaaaggatgaaactggtaataaaaaatgatttctgtcagaatcaagtaagagcgtgtatggctattaatcagctaaggattcaacgttcatagtaaattgagtgcatcacctaaaaagaaggtttacttaaactctgtttagcagctacagctgggattgtaggtcctgctacagatcaccatagcaaataccacagatctgctaaagaccaccaagaaagtctttggccttctcttctgagaagcgctgacccatgcagatcatgtgtgagtcaggccagattggctagcaaaacaaaactggacatcaggagaaaaaataatactgctcaaaaaatcctcaaagtctccttagtaatgttctaccgctaatatgtgaagaacaaagattctctttgtgaaaagctagccaactgggatttaccaatctttcatctcttctctgaagaactctttctcaaaaacagacgcactccatccatcacagaatactacacataatttaccataaaatagtgtattaattcataggaattcaagatatcacgtaacatttaggctgtcaaaaggtagaatgtttatattattaaattaatttggtttaaaaaagaatctcttatctttaaattcagaatatttacttcactgcatagaaaaatataattattcagagcacaacaatagatggaagtggcttctgatctttgtcctgaagctgtgtcctaacaatctgtgtctcccacttaaatttaaataaaatatgttttgaaagccaacacggatggatacctattctttctcagtagaacgagacctttcattcataaataccttcaact

SEQ ID NO: 29508 - DNA, 1191 bp, Bovine  19866880614950
  misc_feature (1)..(1): n is a, c, g, or t
ntcggacacgactgaagcaacttagaagcagcagcagcaaagtgtttttaatgttgggaagcacatttataaacataatatgtacagatgtaagtaaaccaaagaattttaaatattcttaatacatctcctattcggaagctaaaaggcttctgaaattccactttttatatatttggactttgaaaaacctaaaacatggaccaataaatatactttctcacatggtaaagtggaattcacacccctacttctagtctatgatgtttttatggtatttttttcagctgtcatgtaattcatcaatgaaaatcattagcatctgaaaccacttagtgttcacaggatttttctgtataatttcaagttattaagatacataaacctaactgtggaacccatctacacaaaacccactcaccacacttcagaattttaaaagattctactttaaaatgaacaatacacaatggagaagaaaatatctagaagtacaaataggataaaatgagcagtgtggctttgaagattttatttcattgaatcccttcaaattctgaatttcctgtgaaaatggctgcatttttaaatactaagttaatgtaaaatatgcaaataaaactgtctaaagtcctcatcgcactatttgaaatattaattagtacttagaaagccaatgggtgggggaggaggactgcaaagcagttcacaggaagaagtgtcaagaaggaatttcatagagaaatgggtacttggagttcatagttcctttctctgaaagccatattctctagtaccagggcacaagtgtaacatgcgagaccttccactctttgggaatagtgtggaaaggagtgagagtccattattccatctgtaaggcataatttaaatccaatatttccctatattttctctagttaccttaaaacaggcttaataaattaggcctttggccatctagaataccttatgtcaaaggaaaaaagtgagctgagattccaaacagttttcctccctaacatttaccactgttctatgaatcagcacttcaaattctcaagggagtttgaaaatgtccttttgatcttattctttaaaagcagtgccatgcagagccatttgggaaggatgtgtgaagaaataagaatattgatcctgtctttatttaaagattttatatactctttg

SEQ ID NO: 29509 - DNA, 2217 bp, Bovine  19866880645757
  misc_feature (1)..(1): n is a, c, g, or t
ntcaacataaccagaaaacacattcttctcaaaatgcacatagaattttcaccaagataggtaatattctgggtggtgaaataaatcttaaatttgaaagaatgaaaggatataaaggtatgctcacagctggtaattaaatttgattacatatcagtggcagaaatattcctgtggtatcagtatctgaaaaattcctggatatttggagactaacaaagtatatttctaattagtatgtagatgaaagaggaaacctcaagggaaataaagatatatatatatatatatatatatatatatacacatacacacacacacacacaaaactgaatgaaaattcagcctatcaaaatatatgggatgcagttaaaatagagcaagaccacagatcaataatcgaagcttccactttaagaactgccttgcttaattttcaaatgtatgaaatcttctaactttcgtttcctcattgaattccatggtgtttagagagcatattctgtgtaatttaagtataatgatttttttgagatttgtgttatgactcagcttacatgcaaatatgttgtaaatctatatgcatttgaaaatagcatttacttttattagatgttctgtctactagatcaagtacattagtcttatttaactatatgcttagtgatttattacctacttgttcttccatttaacaaatggtttattaaatgcctatgattgtatgtttatttcttctttgacactatttttgggtcatccatgctgctaaatgcatgcatttatcccttcaaattcaaagttagacttctgtttttagatagattgtgtgttgttatttagttgctaaatcatgccaactcttttgccaactcctgagctgtaactcaccaggctcctctatccatggaatttctgaggcaagaatacctggtgtgcattgccatttccttctccacggaatcttcctgactctaggatcaaacccatgtctcctgtattggcaggtggtctttaccgctgagccacctgagaagccttagatggatactcacagtttcttttacttgttcctcaaaaccatgatgccttcatgtttttaatttatttacatttttctgtgattaatttttaagtagggaggcagcaacccaaactagttttccatttgtcaggggctagaagccaggtccataggtttcattttaacacatcttctaggaactcattatcaattatgattgtgtacacacacacacacatgcatgtatacacgcatgctttctggtggactcacaagtaaagaattcacctgtacatgcaggagacatggatggatccctgggtcgggaagatcctctagtgaaggaaatggcaaccccactccagtattcttgcttgggaagtcccatggactgaagagcctggtgggctacagtccatggggtcacaaagactcagatacaactgagtgactaaataacagaatatatatacccactcaatataattatatgtacccaaacacacatattagaagtattgacattgagttgtaggtgtattagttgctcttctgacttttttggtacacaaaacttcaactttttaacccatatgtagtgtcctgctgaatgtttttataggaaagctaacaaaatataggactgaattttcaaaggctattacttgaacttgtgattggcccaatgcctttccataagtagatgtttccttgaattgtaaagcggtaattggacactggagagctgttatttgttgggcctctgagtaaattttgttttaatgcaaagccaaagtggagggctggtgaggggtatctggaaatgtggctcagtatatctgaatatagtggttttgtatggaaaacacatttcctttgcagtagggcatagcatctaaaaagttggcaatctgtctaatccttggtatccctggataatgtcataatcagagataaaggcacataagtgcattaacatctccaaagctgtgtaccatttcttacccttttttacttatttttatcatattttattgtacaaaattatactgtaatttaaaacccatatttaagagaagtaatttagggaatatcttactagtcatggactttatgagaacccttttgagacaaactaagctactaactaagtagtttagcatggaaagttttatgtatagtaactgcttccc

SEQ ID NO: 29510 - DNA, 1415 bp, Bovine  19866880656478
  misc_feature (1)..(1): n is a, c, g, or t
naggagcctggtgggctgctgtccatagggtcacacagagttgaacacgactgaagcgacttagcatgcaagcatgcatgtgttgaagaaggaaatggcaacccactccagtattcttgcctggagaatcccagggacagaggagcctggtgggctgctgtctgcacagagtctgacacgactgaagcaacttagcagcagcagcattgtgtttatcaacattaaactttcctgactatgcatgcatgctcatatatagtcatgaacatacttttgtatctggcatagaaaatcccttaaaaggaatataaaacaataaggaacataatactgaattgtccctcaagagtgagaaaagcctagagaagaaaatgaaatagaatctctcaaaaggagggagagctcctagtcataattgctagatttaccaaatacaaatttaattggcttcccaattaaatttgaattacagataaatttcagatattgcatggaatatagctatactgtgaaagtactcattgtttatctaaaattcatgtttaatgaaaacctgtatttgatctggaaaccttcgtataagtaggcacgatttgtggatcattttctcttggcaagtagaaggtaagtggctacttctgagaaggcagattcagggttcagaaattgttgacaatcccaggataaaattcaaggaaatcccatcttcagcctggagaggagtgtgtgtgaggcctagaatcctaagtgtttcctgttgtgacggaattcctctgattctcttgagagataaataaatcagtaggttggagagcagaaaaataggtgattcttagaaatgacctttctaggagagaaagaacaatgacagcaacagcagccaaaaggcagagagttttgagagtaataaccttatgtgaaaaaatgaaggagaaataacaaaagtgcccaggttggttatcactgaatcctcttctttactgtaggtccttccttgaagaaatgagggagattctttgaatgaaactacatttcccaaaacattgtaagtaagagtgaatggaataaaatctggatttattttctttctttttcctaattattttcctttgcattcatgtgtattcatacttaatacatatgtatacccacatagtgaaaagtagtataaattttacttttcacttggtggtttaagaaggtagtaactgtaagattagtgaaaaaatgaagtataaactttaaatggagtgcaggccaatgttttggtcatttttttctctcagttgcatttccttattctcttactctggattctgcaaacataatccatagtaattaatttaaattctcttttgatgttgatcttcatcagctcttggtttaaataccaaacacttcacacaccacacatt

SEQ ID NO: 29511 - DNA, 1072 bp, Bovine  19866880758350
  misc_feature (1)..(1): n is a, c, g, or t
nacacacacacacacacacacacacacacacacacacacacacatacacatatatattttactgttcttgaagagagtaatgctatgaggataaaatgagtttacagtttaaggctaataatatattttactgaggttgaaaacattgaaaatctaaagttcataattcacagttgcactgatgaggttccgccaggtgagtgggaatgaaaaagaagacaaggagttgaaacaatgagataaagaaaggaaaagaaaagaccaatgaatccaatgatgacatgtatgacagaggtctgccagcataggagtcaacaagtaactctcttgttactgtttgtatctgtggtgatagagtggacagagaaatctgcaagaggattttttttttttttttttagagagaaagatgagattggatttagttgctaaattgatgttattatttgaattttcaaatataaatatatcaactcagaagggagtaaatatttgagactcatcatcttgataagtagttatgagataaatgctgcttctgtgatcacctttagagtcctgcagttaaactagtgatgtggattaaatttgaagggataataaaatacaatcagcagttatctcaatctttatacaattcttttgtatcttgcatattgtaagttgtgaaattctaaaaataggttagataatgaattatcctggtaaatatttggtgtgcaggataatttgcttttccttttgtatctctctactgcacttgtattttctaagcaaagaacattagcattataatcaccacttgaggctttaagctgaaaatattttattggttgactgaacttaccacccattaggaatgtccacatctggtcagatggggagctcaatgtttgcattaccctgtccacactgcagagttcagatactttactggctaagttacaaaactttgcttttttatagctactcgatgtacaggcttatatagcatatacctccctggaagcagtttctttctcataccatctggtaatgagagggatcatttacactacataaaaccatggca

SEQ ID NO: 29512 - DNA, 1444 bp, Bovine  19866880824491
  misc_feature (1)..(1): n is a, c, g, or t
nacttttaaataaaatggtaattttaaaaacgatgggcatgacaatcacaaattttgcctattttcttcttttggggatttttcaaaaaaaaataaaaggagtaaaagtcagtactggataaagaaaattaattaagttgggtcaactgatgtattgggacaagtgtgttaaaaaggaagggagagaaagggtaggttgtatgatgtaattcataccttttaagtgaaaagggtttttatttttaaagaatgacattgtcaaacagcaaatacagtaagctacacacaaacctcctggtttctcacctcatcactctctgcataataagccttcatttcagatttcttttaggtaccaacattaccagttcctttggctctaccccatggcccttatctgacccaaaagcccttaagcacttaggattcaaaaacagcatatatttctacagcaagccaaccagcctagagccagtaataggttgttaagatttaacaaggaaaagtaagggacccattagaaggttacaatggcttggctgggaggggagagggtgggagatggaatccaaagtttaaagacactgcaaagagtcatgttaaaactcactttaacaatcaagtttaaaaatatactttattaaaatgctttaaaaagtacactgtggaagcagaaacaaaaaaaatccaaaatcattcattgcttattataaaagtgaaactaatataatttttcatcacctggttaatgcatatttcctcctacttaggcatctatgtgaaaatttgtgtatatatatatatatagaaaataattggttgctcatgtcacagaaatacagcatttaaacagtgtgtaaaattttccacaatgaagattgccagtgttacctcatttgactctttttaaaaatgaagatggatctagatttttggaggaacaagaaaaatacattcaaggaagttaaatcaaaatattccatttatagcccatgctaagttaaactactggtattgttttttccagtgcaattttttcttattgatgtacttgatcttggcattaatttcaaacatatttcttacacaacttaattcaacaaattataaaattaatttgctttactgacaacttcagagatgctcagaacaatgattactctctcagtagtctaaaatatggagagcgactttcttactaagattacatttactacagtaaaactcacccatttgagagcacagttctgtaagttttgacagatgtatgtagggatgctaccagtgcctcaatcaagacatagaacagtttgatcacttccaaacatccctacacttataagaatttaataagagctacttttaaaaagcctgatccatgacaaaaatttaatattttttctttactttggctctgattaatagaagacattcaattatagga

SEQ ID NO: 29513 - DNA, 936 bp, Bovine  19866880850243
  misc_feature (1)..(1): n is a, c, g, or t
ntgaatattttcatttctaacaagacttcaaaccatttttgggagtcatggggaattggaaagtgaggttcaggctaaggactctccaagataaggtttcagaatctgataattaagttctaaaaattaagatccttatcttatttgttaaagatttcctaactggcccagctcacagtgaggtcacttttaaaaatgtattccttaacattactcaataaatacacagtgctttgcagctttctaagaacttgcacatacatgaagtattcttcacagcatacctgaaaggggagtgtcacagataaactcatatccactttatcaaagtggagagcaagaactgtggaacagcagggccaggacccacgtgactcttgctagtgctttcccagcatgctgtaccatgatgtctttaaagagcaggtaatgaaaagctcctcatttctgatcttttccatatgtacataacagtatgtagatggaagcaacccactgtcttggctgtatactggcccttgtcatcacccagttcctcctctaaaaccttaaacatcagtattctacccaagagaaaatctcccatcttgtttccctcccactgctactgctgctgctgctaagtcgctttagtgtccgactctttgagaccctatgactgtggcctgccaggctcctctgtccatgggatttcccaggcaagaatactggagagggttgccatgccctcctccagtggatctttcagaccagggacccaagtggcatctcttacatctcctgcattggcaggcaggttcttacctgggaagctcttcattcccactcagtttggttcagtcgttcagtcgtgttggactctttgcaatcccatgaattgcagcacaccaggccttctgtccatcaccaactcccagagttcactcaaactcaggt

SEQ ID NO: 29514 - DNA, 1062 bp, Bovine  19866880884579
  misc_feature (1)..(1): n is a, c, g, or t
ntggaatctatcaattaacatgagagtaatgagtctttatagtttttaaggtttctaatcctaatgacagatataaaaggaaggcaagagtccagtttgactaaaattaagtttcaattttaaagttgtatatcatgttatattaaagacaaaaatcacagttacaaagcacctctgaggtacatccttactttagtgacaccatttggtgtaactgctacaaaaaaacgaaccagccactatgaagggctaactagagggcatattgttgtgggaagttggcctgttttccagctgtgccaaattacccaccctgctgcttgaatctcaataaaagcctttcgtaccagatacagactttggcaaagttcatgtgacaaggttcccaggaatctttccaagaagtcaaatatgcccagtctttatgaaactcctttcaccatgactgctaagagggacccaggaaacaaagggtagaagctattataactgcagttgaatcaggaggtcactgctacagttcttaagctgtcatgaaaataacagtgaacccaaataatccccaataaagcaaatttaagtgtctgaacaaaaataaagaaaaaagaaaacaaggtagttttagtaaacctgtttgtcaaagaataagatcaaagcgtcaggacttttttatatactacatctctctattgtaaaaattaaaaatacaaatgaatttttctaccgcattaagtcttcaaagagaaaatcctaaccttatctatgatatgagtagcattactcccattttgctgtcttgtgttttttttgaaagataaataataaagttcttaaggcacaaccatgaattgatagagtagaaaacttgtttttaaacaaagtaggctatacaggttctaaaagaaaccttaaaaagacaacaaaacaaatgtatgttattctccaactgtagataaaaatctacccactgaattagtgcacactaggctgaaagaactgggaaagaaaacaaacttatttgtgaaccctaaaatacagaaagaatccacatagagccttttt

SEQ ID NO: 29515 - DNA, 918 bp, Bovine  19866880888531
  misc_feature (1)..(1): n is a, c, g, or t
nttccctctctagaagcttcagcaaatgaacagaaactcttctgacatagccttttctttctgtatttctttggaatgttatcatttttctagaatataccaaaagttaaaataaacatgctggtatgaataaagaagcagacttccaaagtaggattagaagtccagtaaatctcacatttaaaaaatagacattcattatcttcaagcattctctgccttactcacatgtggtacgaggcaatgccttgctggattgtcccatcacgtgtcctccagccttggtggacacacaccaggcacacatgacttttgaatcatagagtaatctgagaggcccatgaggtcattttgagctttctgctgccagggctgcattgttctttagcaaaaagctttaagcctatggcctagttgagactgaaacagttctttctatacagctctatccttcttctcttgggctccctctttatcctaaatgaggttcatgaaatgtttctttttctcattcttcattcttttgagttccttctttgtcattttttttttcttcctacccgttatatggaatttaatctcatccttttgttttctggtgtgtctgaagcttaggcaaaaacaggttgttgttaatttcagcaacgcatctcaggggagtttgcctttgaaatgttccctttgctaggtggtccgagaatctggtctctggggttggtatattgcactaggttgtccttcagggctagttggaagccttctctgagcctgctgtccacctgcacagggctacttggccacattttctccctctgcaagtgtgtctcctggaactactctttggaaaattctggtcatgggtagccaaactaaagctatttgtaaaggggggtcctcttctctgttttcatggtaagt

SEQ ID NO: 29516 - DNA, 2683 bp, Bovine  19866880903771
  misc_feature (1)..(1): n is a, c, g, or t
nccctctgtcttctttatggtccactctcacatccatacatgactactgcaaagactacagccttgaatatatggacctttgtcaacagagtgatatctttgctttttaatatactgtctaggtttgtcataactttcctgccaagaagcaattgtcttctaatttcatggctgcagccacagtccacagtgattttggagcctaaaaaataaaatctgtcactgcttccgcttgaagtgaagtgaaatgaagtcggtcagtcgcgtctgactctttgcgacccctccatccatgagattttccaggcaagaatactggagtgggttgccatttccttctccagaggatcttcccaacccagggatcgaacccaggtctcctgcattgcaggcagatgctttaccatctgagccaccactttaaacccttctattcaccatgaagtgatgggactggatgccatgattcttagtttttttaatattgagttttaagccagctttttaaatctcctctttcacttccatcaagaggctctttaattcctcttcactttctaccattagggtggtataatctgcatatctgaggttgttgatatttctcttggcagccttgattccagcttgtaactcattcagcctagcattttgcataatgtgctctgcatataagttaaataaacagggtgacaacatacagccttgtcatagcgctttctcaattttgaatcagccaattgttccttgtatataaggttctaactgttgcttcttgacccgcatacaggtttcttaggagacaggtatgatagtctggtattcccatctctttaagagttttccagttttttatgatccacacaatcaaaggctttagtatagtcagtgaaacagaagtggatgtttttctggtattctggtttgtaaatctgtcagaatttaaagaatgagatacttctttcatattgaccattgtttccattcttaagagaaaataaaatgcccattctacttgccagtacctatagtagcagtcagttctacatttaattttgatgtattatgtcccactgtatttttatattttttcttttatgttttaatgttatcaccttatgaaaataacatagacatcctattcttgtgtgttctcgaaacttatcttttggtcaaccaatgactcttcaaaaatgttctctgcagtgaagtgttttgaggtcaaacatcttaaaatgacatagaaatgaaagttctgagtttagaccactaatggcttctcttctgtcttttaaaacaaggatctcttagttgagcttgaacttagatatctggttcttgatattttcagttattattctgtgagtttttccctctgcatttcccctctcctcatcccattactccacatttcctgtaagcagcggatggatgtgtaatacctaactcagggaggctgtggcagggcaaactgtccagtctgaacatgtaaagggcttaaatgaatggcagttactgattatgaaataattatcttaaagaatcatgagacagaaatgaattccctctgatctatctttaatattttcttggaggaggagagagggaaaatatgtggccccaagaacacagtagacctgccctgattttttggcagcatatggctagatcttagaaaccagaggcttcatggggcatctaggttggcaaggccataggaaaccttgcaagaactttccaagcatggtagaaatcatcagacttttgatagacatggaaagaccaggctgagaggatcactaagcatcttggtgctaatttgtttgctagttttgctgaagagatactgtagttaacctcagctttccaaccccttagtgctccctagagaatctttaaattttgttatggaccataagtttcccactgtctcatggggatgacagcttgaatgtaacttaagttgctttataaaagtgttgattatttctcacatgcttgagtttgtggcctgatatttatattctttgtatatatggatagtattctcttagtcattactgccataaaaaatagattaaatctcataaaatgaacatcccaaagtcttaaaggacctccctctctgggacactttgcaagagcatcctctctacatattaggtgcttaggtattttactttaggagaaaatagaagctcaccattcctttctttcatgaataacgtccctacaattctggccattgtaagcctagctatggaagcaactacaccacaggaatcatcctcttgaagcatctagggtttgtagaagaaggaaaaagcaagcattatatctaatctaagctatttgggcttctggctttcaggatatgtcatcagggcaactgagaaaaagaatttgttttttaggaaataactttgacccatacattcactagtagaatccacgatctaccaattattttggatgaactggcattttgatgtgtactttctaacatatatatgtgtatattctttatcttaaaagtcgaaatgtgttaaaagtcgaaatgtgtgtgtatatgtgcatagaattttctttctgaatcttcactggtcttttagcttcagtgcaaatagagaaagcataagggaaaaataaagatggagagagacagaaattattggcttctctt

SEQ ID NO: 29517 - DNA, 1969 bp, Bovine  19866881014443
  misc_feature (1)..(1): n is a, c, g, or t
ntacatggattatgttatcatttaataatttaacccatgacagaaatatagtctgctgatgtatttcataatttaagaagtaatgtcaagtagaattagtaggaagctgcctttggacaatcccttgtgttccttgtgtaaataggcattatttaaatttgtttagcaaaatgccactgctgacaaataatgcttgtactttttgagactgtcatcatttgagaagttgaataaccaacagttgcattccagttacatgcagaatgtttcatttgttacttctagtaacaaaatatatccatgtacacccattgactttggttagtggttataaacttgatatattatgcaagtttgttccttttgttggaaaaagaaaagggaagaattatccatctggctcctttcctgaaggttagcccaagaagggggtgatgtagggtgaagacttagaatcctcacaccaaatcagtgtcttgctgacatcgtgaagccgtgtatacttacgaagtgccaaggttctctgcatggtccctgttacccacctctaattctttcacacacaaggtcttccagatgttcctgaggagaatgtgtctctttataataacagttatattagctatcattttccacatattcctatggtacccatttacaagaatttgtagtacattcccaaacatctgcagatagtatctccataattacttttgaaattactagccacctgtcagcgcagggattactactatgaagaatgtcaaatgggaattaaagttttgtattaggtcaccagcattctaccatagacatattgtagatggataagactgtttcagcacacagttttattagatacaataaatttggaggcgacatactctcctgttactgcatatgcatatttatagtgtgcatatttactcagcactaagtgaaaagtgttgaggatagtagtagtaccttggggtttgggttttagattaaaaagagatgtttggcttcttcatttcttgatcaaaatatatttgtttaaagatcaactggagctatttagaaagcatgcttttttgactcatggaagtgttgtggactttaattttgcaaacaaataaatagattgagaggataacttttaggaattagggtgtgaagaaaacagaagaaataggaggctgaagaatgagtttgatggatttggcacaactctggaatatctcataatgcccatgtgagaagtcagagcaagggttattggtttgcctttgatgtcttcctactcttctgggactaatagataatatttgaaggtttgcagtctgacaagtgctgtgttgagtatttaatatgtgatttagtctgcataatacactttgaagtaggaattaatcttatgatcatcatctcatcatgtttaaaaaagaaaaaagtttttccacagtcatggctagtcagtagtgacactctgacttctgtcatcgacactagtatttgaagtcaccaatggtctccatgtgctaaacctcatgggcttttcatcttatttgactcaatagtagaatttgaacaacagaatacatactccttaaagcattttattttctcttggcttcaaggataatatatattccatacttttctccttctggaccccaggtcataggtgatgtttctttattgtcccagggctcagtcctgagcttcgctttcctagttcattcactgacttggtgatttcatctagtttcaaaacctgcaatgccttctgtaagcaaatggttcgttctgtatatcttcaggctagacttcaccagacacaaggcctctttcagacttcccttcttctctcttttcctctatgtgactgatcagagctaaaagtaagatctgagggttccagtttgggctcagaggccttttatgtctatagcataatacattccaaattctaactcactaggatagt

SEQ ID NO: 29518 - DNA, 914 bp, Bovine  19866881033721
  misc_feature (1)..(1): n is a, c, g, or t
nccaccaggctcccctgtccctgggattctccaggcaagaacactggagtgggttgccatttccttctccaatgcatgaaaggaaaagtgaaagtgaagtcgcttagtcatgtctgactcttagagaccccatggactacagcctaccaggctcctccgtccataggattttccaggtgagagtactggagtgagatgccattgccttctccagagcatgtactagagaataaaattcaacagagtttctggaatgctgggaacaccaggaaaaatgtgtgaaacacaacatatcacaacctatcctatattggcccatctctggttgtttgaaattacatgtaattatcttgtaaggatattgttttgaccatctgtgtcaaataattcagtggcctaaaagcactaaaaattatgcaattaataaacaggaatgatattaaactatgaagaacctaagttctgctgtaatgggaaagtagaccaatggagatcaaaacccaaagaaatataaaacagaaacctttatacaaaataaaaacttagccatccaacatcctgtccgataattaaaataaacaaaatatccatttatcatgttgcactgtctggacttcttagtggaatagtttctgacagtgttcagagaaatttcctttgttcactcacactaaataatctcaaaccagatgtatgatgaccagccaggtttaggtggaggaagactttctttctcgttaacctgttaacagatagtatgtcagtaacaccctgtggtgccatttgacttacaggaataaaagaatacattcctccagtttcaataattccttcataaagattatgtattattcttacaacttttgatttaaatacagatatactttcatcaaatatttttcttctagaatcta

SEQ ID NO: 29519 - DNA, 1065 bp, Bovine  19866881100270
  misc_feature (1)..(1): n is a, c, g, or t
nattgagttgatgatgccatccaaccatctcatcctctgttgagcccccagtccacaccctttctctcagtctttcccagcatcagggtcttttccaatgagtcgtctcttcacatcaggtgactaaagtattggagcttcagctttactgtcagtccttccaatgaatattcagtgttgatttcctttaggactgactggtttgatctccttgctgtccaagggactctcaagagtcttctccagcgccacagttcgaaggcatcaattcttcggcactcagccattttcattgtccaattctcatatctgtacacgactacttagaaaaaccatagctttgactatatagacttttgttggcaaagtaatgtctctgttttttaatatgctgtctaggtttgttatagcctttcttccaaggagcaagcatcttttaatttcaaggctacagtcagcatccacagtatgtacatatatgtataactgaatcacttttctatacagcagaaattcacacattattaaccaactattcttaaataaaacatttttgaaaagaagatatgtcttctaagtttttctcttgcaattttctaaaactaattcttgtggcctatatgatatatataggaaacatttatgagttcaactaaaaaaaaaaatgaagatgtcaactaaattttctagcattacagttagatcccaataatactctgaaaggaaactgctttagaaaattttatatcctagtttctgccatcctgcctctaccgtctccaaagttctgcaaattaaagagacacaatctcatttcatctttaaacttgaaacataaggaagcttcatttccttaaaagtaatctccccttctaaaaatctggacacttttcaaaagcaggattgtgaagatttggcttcaaacttctcaacatgttaatcagacttgttcagttagaactgtctaggacttaaagaaaaacaaatgcaggctgtgtctaaattttttacaaaatcatgcattcatgccagaaaacagcacagaactacaaattcaagcaaaat

SEQ ID NO: 29520 - DNA, 845 bp, Bovine  19866881111959
  misc_feature (1)..(1): n is a, c, g, or t
nttttaagactcaaaatttatttacgtttcttttttttccccccccctctgtagtcagggagagggggatgtgaatggcacatcatttttagccctctacaacatggcccatatggaactctttttgtttcacaattcttttgatgctaaattggtaatgattaatctcttttaaattagatgtattattgcatcttgctgtcaaagccctttattttaactttttaaagcttttttcactttttaaaaattttcaatgacttaaaacttacagtgattatgacactgaatttttcacttttttaaagtaaaaatttattaagtaaaaccatttttcagccctgctatgtgtatgtgtcctcagtcgttcaatcatgtctgactctttgctgctcaccagactcctctgtccataaaaatttccaggcaagaatactagaatgggttgccatttcctactctggggatcttcccgactcagggattgaatgcacttgtgcaaaactctcttgtgtctcctgcactggcaggcagattctttaccagtagcaccaccttggaagctctgctgatatcagagaacaattaaataaatgaacataatatattttaattattaaaccagacttagtgactcctctgaagacatcatagtaaaatttcccttagggcaaaaacacactgagttatgttgtaagacaggaggacatttcacctttacctgaaaaatggaatgtattacaggatagattcagtttgaaagactgttgaacttaagtgctgtaattcattatatctttagagagctctgagtagtaatgaatggtaagtagacttttctatag

SEQ ID NO: 29521 - DNA, 1524 bp, Bovine  19866881131737
  misc_feature (1)..(1): n is a, c, g, or t
ncactttcacagcatcatctttaggatttgaaataactcaactggaattccatcacctccaatagctttgttcatagtgacccttcttagggcccacttgacttcacattccaggatgtctggctctaggtgagtgatcataccatcgtgattatttgggtcatgaagatctgttttgtattgttcttctgtatattcttgccaccttgtcttaatatcttctgcttctgtttggtccatatcatttctgtcctttattgagcctgtctttgcatgaaatgtttccttggtatctctaattttttttgaagagatctctattctttcctattctattgttttcctctatttctttgcactgatcacggaggaaggctttcttatctctccttggtattctttggaactctgcatccaaatgggtatatctttccttttctcctttgcttttggcttctcttctttacacagccatttgtaaggcctcctcagacagccattttgctttttttgtatttctttttcttgtggatgatcttgttccctgtctcctgttcaatgtcataaacctcagtccttagttcatcaggcattctgtctatcagatctagtcccttaaatctattgctcactttcactgtataatcattagggatgtgatataggtcatacttgaattgtctagtggttttccccactttcttcaatttaagtctgaatttggcaataagagcttcatgatctgagccacagtcagcgtctcggtcttgtttttgctgactgtatagagcttctccatctttggctgcaaagactataatcaatctgtttggtgttgaccatctggtgatgtccatgtgtagagtcttctcttgtgttgttggaagagggtgtttgctattaatttaatattaattaacttcattattattaattatttaatcactattgacatggccactcctacgcaagaggaaattttgtgcttaggagtttcaagaaaaagtccctaaatgtcctaaactcatccaaagacataaaaatcaaattgaaatgaatatcaaaatagacaagtaaacatatcaagtataactgtaaaaataatactttacagatgacttctcaaaagcatattatgagatggaaggtaaattttcactattttatcacttaggaaaaaaggtatggtatttaagaattggtcaacatgaaaaaagatgcacagaggtaaactgagagaccagagatcaagaggaataagagaaacagaagaaataggaaaaaagagttcatgaaaaaacctggtccatgggtaagtttttctgtaaattggctaaggccactatgctgtctggataccacttgaaagacacagcaggcagctgcagccctcttctcaatttttaaaacaccttagattaacaacagattttaacactcaggtgggggcattgtttctactgcatgttttttcattattattattcactaaaatataatagaaaacgcaaaggagaaggccta

SEQ ID NO: 29522 - DNA, 852 bp, Bovine  19866881143210
  misc_feature (1)..(1): n is a, c, g, or t
nttgcgaccccctcctctgtcctggaattctccggcaagaatactggagtgggtaaccattcccttctctggggaatcttcccaacccagggatcgaacccagggcttcttcattgtgggcagattctttaccgtctgagctacacgggaagactatatatatacatatatgcacacatatgtggataaatttaacaagaattgtgcatgcctatatgaaggaaatggctggattttactaaggggcatagaaaaaatttttgagtaagtgatgagagagaaatttctggagaggaagaagtcaattctctccaagttaacctataaacttcacacatttctaatcaaattcccagtgggacttttttggaacttgtcaaatgattctaaacttcatctggaaaaaaatttaatgatcagccagaacttttatttttaaagaagagcaatgcccccaccagattgtaaaatgtactcttaaaccataaaaataatatacaataggattgtgccagactagacagaaagatctgtgaaacagaagagaaacccagaaacagaacaactatatatgggattttagtgtatgatagagatgacatttcaaactcgtgaggaaagaatggataactgaataaatggtgctggagccaatgggaaacaacctcacaccttttaccaaactgaattccagatcagttaaatatttatatggaaaaactgaacttagaaatctgctggagcaaaatagaagtgagtatttatacactgaaacagagaaaggattttctaagaccctaagattttctaatacagaaagaagaaagatttataaatctgagtacataaaaa

SEQ ID NO: 29523 - DNA, 1024 bp, Bovine  19866881160847
  misc_feature (1)..(1): n is a, c, g, or t
ntaacaacagtgttaatacatttatctgctatatattacacctgtggagcttatttatcttttaaaaagttttattggtgtatagttgatttacagcattgtattagtttcacatgtacagcaaagggaatcagttatacatatacatttatatactcgttttttaaaaagattcttttttcatataggccactagtgagtattgaatagaattccccaggccatacagaagtttccttaaatcagggggtttgactttgtgatacactctctctcagtctccatcactgagaggagggagtggtttagagcatgaatctcagtgttggttactgaatttggatctgtcattcatgagctcttgtgacctcaggcaagttacatgcacttatctaactaagactcagtttcctaacttggagcttgtgaggatcagttaagataatgtaaaagaaagagctgcgttagctgggaaccaatgggagagtcctggagaaggaaatggcaacccactccagtattcttgcctagagaatcctgtggatggaggagccttggtgggctgctccacccacgcatatgtgcaaactcagatcaaaattctacttctattatactgtatatggaatctaataagattcagtagctccattatgcattattttctcagtatctgttagccacaatttctgaactttaaagccttcttcccttgctattaatgtcctgttcatttgcaaattttttttgtaacccagtaaaaccacccttttgcagcccaagtttaagttatttgtttgcttgcctggggctgaccatgcacacaagctgagtggtcaactaaagtgttaggttattctagattcttgattcataataatcatctaaaaacactagatggcacaggagaggtataaatggatcatagagagagcccagtgctcaaactttatgtgtttctaaagaattcttatggttaaaagagcaacattttaagatattcttgtatcacctatatcttgta

SEQ ID NO: 29524 - DNA, 1897 bp, Bovine  19866881208442
  misc_feature (1)..(1): n is a, c, g, or t
nccccatcccccaaacacaaggaaactcaagatcctggttatttatatgataagtttagatgataagccttacttgataagtgtacgaattgaatcaaaatattcagtatatttttggttttatgcatcgactgatactttctgaaagatgagtaatattgatcctcacatttcactattgcctttaggattagtagagggaattgttctcatggtgtcaaactgctttggatgaagctctctctaaaagactaaattgcaattatggaatagagtgtagtgttagcatgaaagaagattggataggccaaagtatcatcattaaatacgatgcacgaaacatactggctcatgttaattagtctttcactgaaaagcaaggcgctccaagtgactgtgggaaagtgacttggtgatttgctactgctggtcagtctcacaaaaggagaattgtctattctgaaaaaaaagaatctgttagaatttggatatggtgatagtaagagcaacgagtcagaggaaatctaaaacctgtgggattgatttcctaagaatataacttgaatttatctgtggggttccaaagaagactagtggttagcagattgacatcatgtgaactgttcttttatactcattcacactattcaggtgaacaaatttaagatttggtggaaaaggaaaggacccacattttagatgttagaatcttttcagtacagcacccaaaaatagaacgtagaacagaatcaaaagaaactaacttgcgatggaaatcctttatttgcttgtaatttctaggtgcggctgttgcctgcacattacttccttggtttggacacatgtagtagttgtaatcttgtaataaaagttaaaattatcctaacaaatagaagccatactcaaataatacattctgacttttagtaatagcacaaaaaagcttagatgaggaaatggaagattggaattcccatactaaggatctgccacagacaaaatgtaggttgatcgcgcaggttttaggttcttagtatagttaacgtccattcaatggctaatgaccaagatataaagaaagaagtagagcacacttttatttgagcaaatatgaatattttcctgtgaagcaaagtattaataatttcttctgtcaattatttttattttatagtgtttatgctccaaacagcttgaaataaatgagttgctgaattcgttgggtcaaattagtccttttcttacccttgtttcctttattctcctctccctcctcctttctttcctttcttccttcatatttattgagcagccaactaatttcaagcgtttgggtaggtgctagtgacataatgattaaaattatttcccaccttcattttttggatgagtataatgcagctggttttagctacaaatctcttagtctaatgggactgtctgcttgggttacaaattttctgagcactgctgacacagaatcatgaagaaacaaacaaacaaaaaaaattcactgcagttgtgaatggacaagccaaatatctctccaacacattgatttgtttcctcttatattatttaaaaaatagcaaattaaaaaaaaatcaaatactatgaaactcttggatataatctataaaacggtttttcttttttttaaaggagaatttgctggggtcatatggtaagctagaagtgcaatcaaacttaatatgttagtgattttgcatttgaagtgcatcaaattacttcattcaagtaagatatctctagtctaggacaaaaagggctgtgggatattaaagagggtgttaggtgatgattcggaaatacattttgtattaagagtagaattgcatctgcctcattcagtgatctaatagactgtgtttcagac

SEQ ID NO: 29525 - DNA, 1557 bp, Bovine  19866881260463
  misc_feature (1)..(1): n is a, c, g, or t
nacttagcagcagcagatcataaatagtattggaaaatagtaaagattgtcttttcagactcagaatatttgtgtctgttttctcttctgcccttaattctcttcattgtttcctcattctcaggtctcctcttaaaagttacttcctcagaggtgccaggaagatataaaatgctttgggcatagactctgtagttaatctgcatgtatttgacatctagctccatcacttactagaggctaacctttagcacattccttacccattctctgccttaattctctcacttgtgaaatagaaacaagaagagacttaccacattagtaagttatttaattcttttgaataatatgtggtacgtagttaagcactctacaggtgctacatatgttgaatgaggggactacagtgagggtaacttattgtatgtctccatcatgaacttcatttcaggtcttactttgaataatcaggaagtaacaccttgtaaagtgcaacaatttataggaccattaaattgatgttagccatcatacattttattctgattgtcataatcttttgatatagtttgggcagatattacctttctcactttataaggacttcattatcttgagtaaaagttccaacaggaagtagctgaactagcacctcagtctatgccttctttctgtatacagtaattattctatatcctgtacaccttggcagattttaatgagctcttaaccatgttcatgttatagtttaattagtgtcccattatatctgagagaaagtaatgaaaataagaattaaaaattactttcattttagccttcaatcttcctttaacactctgggcaaagctgtggtttaattaattaattaattaattaaagtttttttctctgctgaaatgcaccttagaaatctcagcatttagaaaatgatgataattatatagaaaatgcaagtctaaccagcatttctgttcacaacacctaagaaaacgaaggtgactattttgaaggaaactgagatacattctaaaggagatcagccctgagtgttcttcggaaggaatgatgctaaagctgaaactccagtactttggccacctcatgcgaagagttgactcattggaaaagactctgatgctgggagggatttggggcaggaggagaaggggatgacagaggatgagatggctggatggcatcaccgacttcatagacatgagtttgagtgaactccgggagttggtgatggacagggaggcctggcgtgctgcgattcatggggtcgcaaagagtcggacacgactgagtgactgaactgaactgactgagttactatataattgtcccagttttcacttcatcttaaatttgtgtatgctacatagaatcactaaagatttcacaagtattacattagatttaatacatagctatggtgaatgtaattacagcttactttccaggcctatgttattgtcaacagtttacaatattctacatttatgtcagcttttgttaccagatgctttgctatgtttatttgctatcaat

SEQ ID NO: 29526 - DNA, 793 bp, Bovine  19866881266445
  misc_feature (1)..(1): n is a, c, g, or t
ngacctgggtggatctaaagtttatcttagtacaatctgttaaagacaattaataaaatgaatatactaatagtgtaaactatatgagactgcagaggagattggatcaagatggaaaaatgaacacatgcttctatttttcctcccatctcaaatccttaaacagagaaactagatattttaaaataataagtctatagtaacattataaaatagagaatgactataatcaaacatatgaaatcagttgactaaggaaactatagcccttcaagtacacaagagggcagggcaaaatatatgaggaggagtctaggtaatttcttcactttaagaacactggatctcagagatgtctctgagaaaaatcaaagcagttagttgaagcgtgaaactgacacaagctggtgaattgctccacaactgactccagagttccaagcctgatattttttctttggcatagtgtgcataaggatttgggtcagaggagggctggcccttgatggtttgtgatactcaggtagaatagaaagcctgttctcctgtaaaatgatttgctagtactccttggttaggtggtttgtcctagtcctttcccagagtgggaagaccacagtaaatatgcaatcataagcttgtagcctgaaagttatcaggcattaatgacaatgaactgaatgaatataacacctgaaaaaagaaagccagtgaagcatacaggtaaaggctttgaaataagtgtaaataatattcccaaggaataagagaccatatctcatccataaacaag

SEQ ID NO: 29527 - DNA, 816 bp, Bovine  19866881280709
  misc_feature (1)..(1): n is a, c, g, or t
ntatatgtcactatgtacacacctaaccattacaaattgttttaaactgaccaataaatgatgaatcttaatataaagatggttttaaagactgatgttcactcaaaatgtatatcacatgctaattatgaatcaagaatgtattttttatgttgcaatctgtattttaaatggaatttttcaaagttttgcctattgctacaatattcttaaaaagggatggcatgattttaatcatgagactgcataatatagtaaactcatcaaaagaaactgtttttgaaaacacataataaaacacaaggcatacatataaagcagggcatttgaattacattaaaaggcaaatatggaaactcactaatctagaatttatattttacaggaaagcatagacatcttgaaaacctcaagaaggtgcagacaagagcttgattatttggacatttgctgtacactctccaaaattttcttagatagcatcaccaccgaattttctttgtgtatcattgtaaatcttatcttttgccattgctcagaaaaatttggaagctctctaaacacactgtatagaattctaactttaaaaataatatattatgtatgcacactaagtatgagaattcacaataagcaatcaactataggaataaagtcaaatttgccaatattaatggagtttctccttcatatatatagagtagagtacatgtcctcagcttctgtggggacctgtctggcactaaccatggtgtaatggtccaatggaatcatctcaggcattcagtctggcactatagtcaaatccttatatca

SEQ ID NO: 29528 - DNA, 1428 bp, Bovine  19866881367408
  misc_feature (1)..(1): n is a, c, g, or t
ngggtaaaacacctacttgctaatgcaggagattaagagatgcaaatttgatccctgggtcaggaagatcccccggagaatgtatggcaacccactccagtattcttgcttggagaattctgtggacagaggagcctgatgggctatggtccacaaggtcacaaagagtcagacacgactgaagtgacttataatatgtaatacaatgtaaatgctatggaaatagttataaatacaatgtaaatgccatgtaaacacaaattcaagttttgctttttggaattttctggatttttaaaaagattttttgatccaatattggctaaaaccactgatgggaaacctgcagatacagaaggccaattgtacactgtttgaacattctgattaaattagtaggcaagtaaatagcaagaaaattttaggggaaaaaaaaaacccagcatttttcttgataaacagtctcccttctcatcttgggtcaattcagtcaatatggcctcactagctatgcacatagatatgtgtacaatcttgatttttctgtcacagaattgaggaatgtaaagcacaaaaacagcattaaattgtctagctatatttggtaaccacagacttgatgacaaagattttggctgcttgtccaaatcattctgaaattccaagcatgtaagacttttccctggtaatttaatcataatatctttggagaaatttcgagttacttcacagtaactgaaaattttcatgcagataaaattcttaagaaaactttaagaaattaacttgtggataggaatggaatgtgttttgcaggactgcagacgaaaaaacaaaatctaagaactgataggtattatattttattttatgttatatgctctcccttccaaggtcatatttatatggatcataaaatagaattatagaatttttaacagagccaaatttaaattaacaaaataatctgaattattattctaataataatcattactagattacctctagtaatcatcattaatatctgtgtgcaaaaataagcacttttctgccatataactaggtgctagaaggaccaaaagagaaagtttagatgtataactgaagattaaatattccagggatttaaccagagttgatataaaataactgtgtgtgcatttaagtttcaaaattaatgtgtgtaaaaatattttactattgtgtgtttatcctaaccaatgatttttagccctttagtcagaaaaatacatttaaagaaatttttatatgagagtgaaatatatttttttaatgacaagctggaatcacagaaaactaatcaaaatgatcacatggattatatcctgtgtctaactcaatgaaactatgagccaggccgtgtagggccacccaagaaaaatgggtcatgatggagacatctaa

SEQ ID NO: 29529 - DNA, 741 bp, Bovine  19866881391626
  misc_feature (1)..(1): n is a, c, g, or t
nttatatcatattttcgataaacatgtctcctcctacagaccacaaagactagcagagcataaaatgtcctattagagacattctaataggtgcaaatatctaaatgacaaaaattaaatgaaaggcagctatgtcatcacaccattccccagtcctctactacgtgaaaaactaagaatgaaattagctgggagcaaatgtgacactgactagcctattagaattaacccagtgctactataattaatagaattaaaataattaacagaatttaacagacctagttccaaaacatgtggtgggaaacctcttgctgacagaaagatactggagagcattaatctcagcattccactgaactttaaagtaaaaaccacaactcagttgtaacccaaataatatgagaactgaagtgaaatgaaatgaaagtcgctcagttgtgtccaactctttgtgaccccatggactacacagtccatgcaattctccaggtcagaatactggagttgatatcctttcccttgtccaggggatcttcccaacacagggatcgaacccaggtcccatgcactgcaggcggaatcatgagaacaagaagacattaattaccctactttaaaataactgtctgactagaactctttataaggatcacaccctctcacatctagtgcttgataaagaatcacattttttggtctcgcatttagtgcttcttaaagattcacatttttttggtg

SEQ ID NO: 29530 - DNA, 1026 bp, Bovine  19866881393571
  misc_feature (1)..(1): n is a, c, g, or t
nttatcagtgtaaactgaccagtagaagattgtttgcttgagattattgtggttgtttgactttagctaagaatattattaggctctgtaaaatacaggtattgtcaactagaagcacttgtacacatagaggccagatttcagttgtctatgcacaggaagaaatatgaacttcaaaggaagctctcttgttaagaaacaatttgaatacacataaaaataatggattgagaagaccagttttaagaacgaacaataatacaccaccatttcatcttccatgaaggatcttaaagatatatttaaaaaattagaatttgaagttagaatttctgggcacatgactgttgaataaaatttactgcttatagattcctctgtcactgtcataatcggtgcttaacttggatggccgtagatatagccttaacacttacgaaaatataaatacttttaaagcttggcatttttctaataggtccgatagtcagtggaaaatatgtttgtagtactgaactttcaagtcgcttaacttttatgagggagtaactttggtgccgggaggatctggttcacattttcgtttctttttcttgtactgtatgtcaatacagagggtgtggttccccactcaattagacacggtccctccccagtggatttaacactaaaagtaaatgggtttccaatcaggctggtgttgttcattcacaaaaggaaaataatttcaaatcggagcatgtgtctgggcaaactcatactgctgatatgtacaaaaaaagaggtttagttcacacatgttttttattgccacacagggatacaaatgagaaaattaggctataagacttgattaaagtttcagtatatgggcatttttaaaaaagtgtccatggaacagcattctgacgttttcccctggctttgctatcctgttgggtagcaacaagcccctctatagcaagcaagcttgatgctattggtgccaaaatctcttcccacgtggtatagatctgtctcatttct

SEQ ID NO: 29531 - DNA, 1049 bp, Bovine  19866881452460
  misc_feature (1)..(1): n is a, c, g, or t
ntgtatcatattatgttgtatgtttatttacatagataaaaattataagacattttacaaatattaaaagggtttatctctggaaatggcatgtgatgtttttccccaaatatagtgctaaggaatcctaatctaattaaagaaaccaaaatgaagaagtactcctgattgtcatcagatgtaggggttggtttagataaaggaacatactgatcaaaaggagcggaccccttgagatgcatttgacctggacaattccttcaataatctggtctagcaggctcaatttctccacattccctctagtccagtcccattaaatcattctaaaggggttaaataacagacatcccaacccagatgccaaaaagcatttgatgatgggttagatctgccaagcaatcattgctattcatcggtaaaattagatgtccatatgaatgtgcgtatagaaggaaatttcagtatgtattgtaactgtgtgtggcagtctgttgccatggaatgctcacttctctgatatttactgtcagacttcattcacagatatttcacaggcagatggtttctttcactggctcaggagccacttcaaagtgttttgattcctgaccaagtcgtatattatacttcctttaggaagattttcttcccagctgccgactttaaaataaaatcaagaataatcaaaaggttgcacaaccctttcagcttaactatcttcaaagagcagacagcaaaatcttctttaccatagcgatgtattggaaattaaataatatctaacacttctttaaaggcaacattagcatcatgggagaggctcttattaagacaactgacagaaaatgtaacaggaaaatccacagagatttgtgtttgtcatttccattactttcaaactaaaactgaaggcgttgaatatactgttttttctcttaatttgcattcagccaacccattcagccctgaattctttcagcattagaacattctcccctgctgatcagaatcggaagttgtaagatatattaactttttataatata

SEQ ID NO: 29532 - DNA, 2366 bp, Bovine  19866881494563
  misc_feature (1)..(1): n is a, c, g, or t
ntgcgtgtgtgtgtgtggttgccgctcagttatgtgtgactcttggcaatgccatagactagcccaccaagctcctctgtccatggggattctccaggcaagaatactggagtgggttgccatgtccttctccagggatatgtcctttatcccacggataaaactcaggtctcccgcattatggcggtttctttactgtctgagccaccagggaagcacaaatatttacatatgtcatattatatattgtattaaaaaaacattcaaggagaagaaagcaacaataaacatcttattgcacaaattttcaaagacaaatattaaaagttgttcgaaagagtatttttactttaaataattattagaccatttttgaatgtctgcaatcttttcaaaggaaaaacagctatggcaaatttgtctatggatacattacttagataaatatgagcagatggcttggtaaagctagccaaatctccatccaagttatatgctttgtgtgggtaaattttacataatgattagatgagttgagaggtcgatattgaaatgaaagtagaaaagcatttctaaatcaggtatatgatatgttagaattaagtcagtgcatgatattgagtgcaatatgtcacagtatttccactcatttaattaggcataattatggtgaaattgtaaagtgtgcaaaatgcagagtatcacacagcatatctttagctataaaaatgtacatacactttataaagagttctctgttaaggtaaccatggaggacttttaattctatatctttctcatgtagataaattaatgttgctgtgggaattttaacttcggaatttcctgactctcacatgcttaatttctcagtgttaatgttccaataccagatctgaatgactacacatcatggatatttctatctgctcaagatgtttctagaatgtaatgtttaacctttaaaacaaatatttgagagggcagaggcaaaaaaaaaaaaaacagaaacaatgagaatctgttcagctgattagctaaaaaacctctttatttacagttgaatgagggcatgaaaaggaatgaactcccacagtagagacataaggtggagaaataacagaaaagtaatgattataagtgtaaaatgtgtgggaaaaaaaccctcagactggaggaaatgtccaaattatacaacttaataatcaatacttgagattaaaaacatagaacttcatcttaataagtttcactgagttaaacaatacaaagcaaaaagaacattttgagataatttactaatatatgctcacaaagataacttagaatgagatgtgatgctgatggttggcaccgtagggagattttgaaatattagtatgcctccctcaggaaggatttggcataatcaaccatgtatggaggtgctctcctgtgtatacagatactgctggtattctgcttaattgtttaagccaggaaagtgggcagaaagaaatgtatcattatgatctgtcatatttataacagaacctcatgcttggagactatagtggctaactggacacaccacatttttaacaaacgaggctcataagcctgccttccatatgatccggtgcttggaggattcctggcacctgtctcacagacatctgtgagaatgacaccatttagagagttggatgataccagtgagagcaccctgactcttacttggtcaactcctcctctaatgggacaccatttctccttccctccagttctgttcgatatgtacatgtgatttctatctcattcctaatcatcattcactgattgggaaaagttgaataggtatctcaaagcaagggatatgtgtgttaggattagtatcccaaagtttttgctgtgataggaaaatcttcatttctaaaatttattcatcatttaaaaattttaaacactttgtaacgcttttcatatcgcctatttcctgactttaatacaggtagaatttgtattgcatttttaaatgagaaacaaaaaagtgtctttctgtgtgtgcatgttgcattacaatgaattaaaatgaggtttaaaaaaaataaatgaagttttaaatgctggaaaacgtctgacagtaagttctcacaaggaactttagaaactaatttgttcaagtgaaacagataagcactgagtcttatcaccaaataacctaaccaccaaaaaaagaagtgccttgattaaaaaaaaaaaaaaaacattatttttatatcattagtaccatgtaagtatttattatatagcccctgggtttgcaaaatacaagctgactgccttggtcctataaacgtaaatcatcctagggaaaaaactacaga

SEQ ID NO: 29533 - DNA, 2017 bp, Bovine  19866881517416
  misc_feature (1)..(1): n is a, c, g, or t
naactagatgaactacatttcttttaaatatgtcctgagtaattattcaaagaataaaagggagcttttaagagaaataactatagctcttcaaccacaaaacaatagtatatgtctccagactatttgtttatgaataattcagcttttatcaccaaacatgcttgatcatttcaagtgtgaagcccatgaaatgtcatttcaattcattcttcaagtgtcttcttggcagtcagaggagagaattataggattaagaggtctggctatatataaaacaaggcagaaacattaaaagctcttcttcaaatgcaagactgatgtaatgattttaatgagttgcatagtattgttcttcattcttaggaatggattatatttctggaaactgacttgcctgattaggtttcatccagtctctctggattttgctgctgaatacagtcatttctatcacatgaacagcaggatccaggcatctgcctctttattgtggcttccatggtattattgttgaatgtgtgagccagtaggctcttgctgaatgaagtgcacaattcaaatcataaagtttttcatacaccagagaacactttggaggcaacccaatggtgaaatacaatttctatcccaaggagctatttgctacagacccataaggcacaaaaagaataagctttaagaacagtgttctcaaagtgaagtctggggaccaactccttcagaatcatctacaatgatgaataaaaggagattcttgggtatctctttagatacatgcaatcgtattctttataggcaaatcccaagcatgtacacaagtttgcccgatgatcctaaaaatttaaaagccactgtttttaaacctatgcctgccctaaaaaataaagtcttaatttttaacgttattccaactttttctcagttctaaagtctcttttaaaattttatttatttatttatttttgactgtaccgggtccttgttgctgtgcaggcttttctctagttatggagcatggggctaccctctcattgtggtgtgcaggcttcacaatggatggcttagggcatgtgggctcagtagttgtgatttccgggctctggagaacaggctcaatagttgtggcatacaagcttagttctcccatggcatgtgggatgttcctgggaccagggatctaatctgtgcctcctccatcgacaggctgattctttaccactgaggaaacagggaaaccctgttttaaagttttgagtccacacaactctcagtttgcagtgacggtcccctgaagaagacttatgtagcacttttttgaataggaccagtatcttactacaggctgtcatgtaactcaaatgagtagggtataacaatgctggggaaatgtcccagtaaggatgccagacataagacttgaatgaaataggttaattcttatggcatcaagagaaatcatggcatagagcttttcaaaaatattatacaacatataatatgaatttcagtattcttattgacatttctttcccaaactagattgtagtgccaatggcacagttgagacataccacacacagcatatgttagaaaaacagttgcttttctgcaatatccacacttgccacacatcctggaacttattaaaattctgttgaagtggtcagactgttcttagcatgcttgttttttcttggggaaatccattgacctttcaatgaggaaacattcagttaccacgctattcctggtttaaaaataatctgcaaactctgccttgtaaacacttacagatagaccacagaagtccccagagctaccttggaagcagaccaaatttatctcaaacatatcttgttcatgtaaaataaatattgaaaccattattccagagaaactatttttctaaaccagttgcttttccaactgaaagtcaaagcatcatcatggaggttggaaacacaaatgaacatgtttgggaaattgccagcacagaagagggaggaaggcacag

SEQ ID NO: 29534 - DNA, 985 bp, Bovine  19866881611647
  misc_feature (1)..(1): n is a, c, g, or t
ncccatgaggaagccttggacataagctgtacagttcattctgattgctaccaagtaattctttgcagacctatacatcaaaactatggctgattttcagcagtatgccgtcatgttttagaaattggctaattaaaactttatgagtggacaattaaaagcaaagttatttgagaatcaaattaattgtacatacaagaacacagttgtttttttttaaccatagtgcatatatatttttaaaaattacttggaataattgctttacattgttgtcttggtttctgctgtacaacaatgcaaaccagtcataactatatatatatgtgtgtgtgtgtgtgtatatatatgtacatcctccttcttgacatacgtattttaaatatactttttttttaaatttgtgagagggggaaatgattagtaatataatgaaatgattatttttatttgacccttaaatcttcttaaagtttcatttggacttgcaccctataaagaaatctgctctattctttcaattatgctatggtatgctgtgccatattttcctgccctgattctctaaatttaagtgaaataaacatggatatcgagggcagaaacacttcagtagtatttctgctgctataaactcttacaaagagtttagggggaacattttttttttcctttttaaaatgtgttcctaacaaaaagggaaagataaacatttcaagagaagaaaagggtcagaaacttagaaaggttttttgttgttgttgtttttttcttaagttcgatgtttgactgatatcactgagacaacttaaaacatttgcttgatggttaattaatgataagcctagtatcagttgcagtgtatttatttgagtatcctggtgggcgttcagtttagattttcatttacaaagctgtttcaaatatcaacaaaaagagtcatgaaataaacaaagcagcagggcagtatttatagtgtgcttta

SEQ ID NO: 29535 - DNA, 1981 bp, Bovine  19866881668141
  misc_feature (1)..(1): n is a, c, g, or t
ntacttgacttaatacctctcagaggacaaccatttttactgttttgtaagttattggggagggggtgtctgactattaaccacatgaaccaccaacaccaacttgtcaggatcaagacctgtggcccacccatactggccccataaagaccgcacagcatattagctcagtcacatcttgatattccatctgggccaggcattatttaagtgtgtctatcagaagacctggccctaaaacgtcagtaaattaaataatccaaagtcaaaggtggtgtactttccctccactctctaatttataggttccttgaggacaaaaataaaggtgaaagcgagtggttggactgagctggtttagggagtgtgaaggtggcctctttcagagcagggggtcagacagtagtctggaatctaggctttaaccataaagccgccatttcactgagcctcgggggtcactttataggtgttctataaacattttatagctagactctggctgttccttttttataactgcccatcgcatcccttctggagatgctgacccagcagggggtgaagtaatagccagttatgaagatcagaatggattgctttcttcacccactcacctttcacctactgtttaatgaccacccagccattccctgcacaaccaagagaaatcagcaggagcagctctgaaaggacaaacaaagaggagtttaggcctgaagttctcactgctgccactgcgtgaataaatggcccattctgttgtgctttcttgaccactggcaggattgtattttattcattaaaaaaatcaactgaatctgatataggaagaaccatgggaaggtacagaagaattggtaaggcttcctcccttgtcattctgagagaaaagcaaaattatttttttctaaaaatgaagtatagttgattaatgcatagcactcacataacagttaaggggaaactcagtgctcatacaaaattttgagattgtgtataagtctttgctatggagggaaaaatatttaaacttataagcttgtcttaaaatatcacagaatatttactttctttcaagtatagttctgctgtattttaatgtcattgtagataaaatgctgtagataaaaatgaagaataaaaagtgatattttggttactggggtggtaagtctttttttaattttcaattttatattagagtatggttgacttacaatgttgtgttagtgtcaattgtatagcaaagtgattcagttacacatatacatctatccctttacagattcttttccatataaaccacattgatataacttttcatacagtatattattataatcatgctattttattagttattgctgttaatctactgtgtctccttcataaattaaactttatcatatgtatgtataggaagaaacaaggtatataggggttggtactattcatgttttcaggcacctactggggtgtaagaatatatccactatggataaggggggactaatgtattgtgattttcttctttttgtcacagtatcaattttcttgcattcctctgttttggaatgctgaggccagatcaggaaaggactgccgctgaaaacacagtttgttactcagagtccccaagaggaggtgcaccccaagccatgcaaggccattgaaatgtgcttatagaaggtagggccagatgaaatactaagaagatttaaaaaacaaataaaattgtaatttggatgtatgaattacattatctcctcttctttgcttccctggagaagtgccaggatcgtcaagagggagaggaaccaagggaagatgtgttgaagttttggagggaaggaacaggtggggcaaagtaggtagctgagtagtttgaatagccttagcacctcccagggtatgggagctggccttaggtgcctggtacctgatcctgggatgattagggcaggagaatattggctca

SEQ ID NO: 29536 - DNA, 777 bp, Bovine  19866882055158
  misc_feature (1)..(1): n is a, c, g, or t
naaataagctaaagagatcctacctccttcacttgatttcctcccagtggttacactcttgaatatatacttgtataatactactatcactaaccaggaaattaacattgatataattcactcagcctgatttagatccatgggttttttgtggactcacctgtatgcatgtatgtgtctgtgtatctagctctattcagttttattacatatgcagagtcatgtgatgcagaacaattgcatcatcatgagtatccctgctgctagttattagttcttgatgggagaataaatcaaaagatttattaccaattaaatagcttctctaaggctatgttctacctaaaatagctttgaaagtatgctaagtgactaagaagacagaagtatttaaccttcacactcattctaagcaataggctgaagctgtgtgagctggtctccctgtggagttctctggaaatataaacaacaaatgaccatgctgctttagaaaggagaaattgctgagcagagtggaggaagattttaatgatatgcacagcagaataaggcagggctttaaggacacaggttaataggtcttttgcacagttttaaaaaaaggaagttaaaaattacagtcttacattcttttgtgtaaaaaagaaaaaagcaatgtcagcaagaattaaaaagaattgttgctggtctgtgctgtttgaaaagagttttctccccctgggaaaacaataaaaaattatttgcctctgtatcaagtttaggaccacttaccaa

SEQ ID NO: 29537 - DNA, 805 bp, Bovine  19866880473176
  misc_feature (1)..(1): n is a, c, g, or t
nattgcttgatagagaagctgctgctttattgtgctttatcaggattctaaggctacaatccatgccttgattgattagcaatgtctgtaatggatatgggaagggatgatggcagtgtgcccataatgcatttgccaatcctattttacagtcttttttattcttgtgcagacaataaccttttttaaggtacaaaatagcagactgaatggtttagaggagcttttcttagaaaagtgataaaacataaactaaagagatactcatccctacctaagcagagtgttttatgatttcaaattggaggattcattgttatgtgtgcaagatggattttcttggtgcttatgtctacatgcaatgaaaaggaaaaattgtgtgtttaaatgtgcataatcaatgtcctagcttttacctctgtctgctaaagttaaggtttatacacttcaagttttcaatcaagtttttactttccttggggggtgtttgcaacagtcttctctcccatagtgggacacatccatttctcctttttctctccttaccctcatctatgctgatgtctgggaagccacttgatggtgtcgtgctgctccaggtacccatggaaaaagtttgatgtcagtgccaaggatgccatcttcagatgctctgaaaccataaatctttgcgggcttgtggcagttgctattcagtggggagatggacacattttgcattctgggcactaaggcagcagcatttcatgtggtgaatatacaacttctgcactgcagcccttgtctgcagagggctcacatggca

SEQ ID NO: 29538 - DNA, 1559 bp, Bovine  19866880521764
  misc_feature (1)..(1): n is a, c, g, or t
nataaggtcctgcacatcacaagatcaagtatagacatacagaactgtggaaaggcttaggagaaacttaactggaaagaatatgagtgttgtagttgagtggactttaggagatatagacatatttgtggaatgcatcatttttataatcatttctatttgtgattcaaattcaaggaagcaagaaagttgaaaaaagtattgacctccctgtatcactaattctcaggctttccatttatgtggggatttatttccaataatgatgtagtttagatgtaagctgattcatgctttcttagtaacagctggagtggcatgggctttttttctatcagcccaaatatttcttaaaaagttcacatacatcattgtatcataaagaattcggtattagccctgaccttaaatatattggcatagctatttattcagtcctgagaattgtcagacatgttgatggtgctccgctgagacgcactgtggctctcaccacacagcagagctgagtttgttgggattggtgccggatcatctctgccacaaaggacagcttctctcgttcccttttgactttgccttttatccttgtaattaagacttctttgattttgtttggcaactcaccatccatggaaaaggatggcaagcctaggaaactgacgctttcataatttcacagggtccttgattaaactctgttcaattctgagagtcttaatcaaggtaattgtctgactgagggtgtctgcatgtgcatgcactcctctggtgggttcctccaacagctggaaggtgctttggatgtggcggctctccataatgggcccactgtggaggagcggtgtgcctggatcagtggctctttttagcgtagtcctgagtgtatgtcttatattgatttgtttttaaaaccttccaaatgtgtgcaaagcaggctgcttattttgtgccagaagactagattaggtaatttgtgataatgctacattcaaccctttaatatatttcaccataattctcacaccagagtgcactagttacttatctagcacactcactactttccccaaaatacaacaggaaattcaatccagagaaaggacagagggcatcagtcattttgtgccattacaggtttaccaaatgctacatgttttaactttgttaattagccaacagtgcagaaaacacaaattaaaataaattgtaatgttagaaacgttgctgtcaaggaaatataaatttctgttggtcaaaatagttttgggatctagtattgcatacaactactgaacttagcagtctgttttgttatagtgttttgtccaagaaagttcatctggagttgggggtctaaagattttcttagaaataatccagtcttttccctttgatttatacctcatacatgaatctgtctaaccagagctattatctatttctgttttccatttctttccatcaaggccttcagtttgtggatggaggctagatgagaatcctttagtcatgacatttcagaagaggaaggctttggagagcctccaaaccagaat

SEQ ID NO: 29539 - DNA, 1616 bp, Bovine  19866880566454
  misc_feature (1)..(1): n is a, c, g, or t
naccccaccatgaagagtgctctttctgagtttgctattacttaagctttgcaagcctaaaagggtattctcatggtatatgaagaaataatctgatttctccctcttctttgttttacgtctatgaatatggtttttttcattatatataatcagaaaactcgatgtctgaggtgaggctggaaattaacaacagccaagtattgattgatttgtttttcattttgtaaccatttgctaggttattcctacttttttttaaggtaacttgaagaaatgcttttacagcagccagctacaacagaagtcagtttctttttaagcaaactagctctgcttgatgcttttttttatgttaaagctgaaaagaaattcacacctagtcacaggatatataaattgtagttaataaaccattactctctgtgaacattatattctggattcctactattatatattccttaaattaaaaaaaatttttaaatctctttccattcaatgcaagtaaaataggcttaacagtaattgctgattatttttgccagatttttttttattagaattgcatggtaactatcaaaatgggtttgcattttcttcaagaacattaattttcagattaaataaaatacatggtcttattttaaagcagactcactttatacaacagaccaattttttaaatgagctaccctacacttaatgtcattagtaaacaatgcatttattcacataggaataccaggctcatacatttaaaacactttagcatcttgttatgccagctgaacccctacacagtgatataacctaacaatagatacttatataatcaaatgagcataggagaccagattttccagcacagatgctgcctcttatctaacctgtctaggctaatgtcaaaatagtgatcattatctctatatgttgaatctctatttggtatttttctggaaagagtaaaaaaatggattgtcatccacatattttcacagaattccatggaaagtctaccaagttaaatttcccagaagaaaatatctctagggattatatcataagagctatggtatgttacactgcttttgcatggaggtaacagtctaccatgttaacatcattctttattacagctaacaattattaagcacttatagggaaacgtgctaaatccttcatatgtttaatctcattaaatacaaaagccctatggtagatactatttccccactttccagttaaagaagctgagattccaaacagatacacagtgctagaagatggcaaacgcaggattcgactaagtctatttaactcaaagcagaaaatcacctcagacaactttctgactttctaaaatagtgacttttttttggtcttactttatgctttctgtttttctttaaaataaaagcactagcatttgctggtaaacagaaagctttgacattaacttcaacacagttcaaatacccatataagttatttgcaggtaaatgactttctttattttaaacaactgtcatattgtgatgcttctaagagataaaataataaaaattagtagacgctcaaaagttgcattaaattcaatttcttacttgctatta

SEQ ID NO: 29540 - DNA, 1201 bp, Bovine  19866880590059
  misc_feature (1)..(1): n is a, c, g, or t
naaagtatttcaatattttagaaactggtagggccatgaaggtggtacagcagtgtgatatcagccctggagatgttcccagtaacgtgactggactgaacattttaacactcaacaagagtatattgatcagacgagggaggtggttagtcacagagtcaaatgccagtatccaggcccattctgatgctgatttaatttctctaatctaaagagattttggtccattcagcaagactaatcaacggtggaaactgacccagcttgctctctgcacctgtatctattaaacactcaagctacataacattctatttccatatctgttttaaaatgttttgtttgaacttctctgctgcttttgctctgttaaacagctaagatgaaaatctttttatacagtcaagtgcgtgttgagctaacgtgaaagaagtaggaataccatctctgctttcagcacccttccccaatcaagtttaagcccaataactgacacagatcttgggcgaggggatattcccaggaaaagcttgattttgccatgcctcatatgtttaatctggtgagtcttgaaagaactgttagggtgacaccagccaagtcttacattaaatttgagttataaggaaaaataaaaaaagacaagtggaattatttccttagcgttggtaatgctgaaaatgttaacaggttcaaggaaggtttgatgaggccaaggatgtcaaatctgagcagattagtgtcttctcaagtcctttgacatttacgtgatagagagatactgtctttcagaaagacggtgctatcaagggggattactgggctggctgaagaataagatgccaaatcctaaccaccaggccaccaaggagcacattaaaggaggaaattggacccatctgatgacatgctatgggaccatggaagctgtagtcaaactagctaacagaaccaagcccataccccagcgtctaaacttccaacattttaagtgttccagacacgaagggtttgaatccagagattcggaggcttgcactgtcactgaacaggctcataccaagcaggaccctgcggagctccaggccacagaagggcttctgtgttcccccacttcttgattacaggaaataggcttcatttagcctccaagtccttccctagggtccaagagcaggttcaaatagttgctaattaggga

SEQ ID NO: 29541 - DNA, 1291 bp, Bovine  19866880615357
  misc_feature (1)..(1): n is a, c, g, or t
ntttctagaccaatttctatccacaattatagcaattcttttttaatcgcaattcttgattctgatttttctatagatttagagctcaaactggtgccctgctttaatttttacctagagaacgactctagggctatccgaaacttcaaattgttaagtctgtctttgtggttcttcaaagaccaaaataacactccatggagaagagccacgagatggttttgttttatggctatttctgtattagaaatacttcaataggatgaacctccagcatatgttccaggagggtcaaaacagcttcttccttcaccaaatgcaaggtgttcttcaatctgcaatcactggattaagagataggtttggggttttacatttcactgccatttaaacaggtgaatatttaatgcctgaggagcaaggttatgaaatgtcaaaactactaagtgaaggatctaatttaagaggcagccagagagtctgcaatttaaatatttaaagatgatacagaaagtacaacactgaacaccaatctactccaaagatagcattttatatctcaggtttattctggaattcctcacaagtgtacaagtgatattataaacaaagacaagcaatgctgaaattacttgaagggaaaggaagggagatagaagtaccaggcaataaatgctctagtcaatggcttctcaagctgttcttcacaaaagagacctgactggacaaaatagaggtaaaaatagatttatcaaagtaatcaggtcctgaaaatggaatagtttgagacacagcatattccttgtaattaaaaactcacttcttcatcagcacgcacagtcactcaatcatgtgagactctttgtaaccccatggactgcagcctgccaggctcctctgtcaatgggattttccaggccagaaagcggagtgggtagccattcccttctccaggggatcttgccaacccagggattgaacccaggtctcctacattgaaagcagattgtttatcatctgagcaatcttcatcagcaaataaaactaattatacattaaacattcaaggaaaagtaacacatacactatgaacgggctgtcaaaatacaagttaataaaaatacacagaactaaaaggaatgaaaatatggacaagaactggtactttattacaggtacataataaagtttaaaatccctgcacatcactttaacagaagtatgtctaaatgcttctgtccaaaagtacaactgctctcaattctctccacttcaccaacagaaagatcag

SEQ ID NO: 29542 - DNA, 1418 bp, Bovine  19866880628938
  misc_feature (1)..(1): n is a, c, g, or t
nagataaatatgatgctatttccattctatggataagaaaattgaggctcagaggtttcaagtaactttgtcctaggtttcaagacaacaaagtgacagagttaggaaagtgaaaaataaagtgaaagtgtgtctagctcttctgtaaccccatggactgcagcccaccaggctcctctttgcatagaattctccaggcaagaatactgcagtaggttgccattcccttctccaagggagtgtccctaaccagggactggacctaggtctcctgcattgaaggcagattctttactgtctaagccaccagggaaacccgacgggagtcaggactctaacccaaaaccactgcctctcagtgctcttaaccagggctatatcccaactcccaaattgtttgtttaattgtttaatcacctaatgaggcaataacatgaggatccctggagttaggatgatggtcccctaacactgagatacaagtctgtgttcagcaagcctagaaaggacaaattctgatgtgcgtgtgtgagttaaagcaggtttctcagctgccagcgaaggctgttaaatactgaaatgagttaataaaggttatagaatctctttcaagggaaggatttcttcccccaacgggggatagattctcatctgtctgagatggttgaaatataatcctctgtgaaggtcaataaattgggctcaccaagtcctttccagattccatatgatactcagatacatgagcttaatgtggctcagagtggggcctaaaattgggaggggcctgatcctccagccggacataatctcttcttcctttaaatgctctcagccttctgacttgaccttctttatgacatatgtagtgatttttctatgttgttgtgctttccgaaagagaaacacaattaaaagatgaaatgtgtgtggttcattttcatatctcccacagcgcctctgttcagtgttacatttaaaaattttttattttctcttctttcctgttctgaaagaatcatacagtcccaaactgaaaataagcccctgattttcatccaaaatccattatcaaaactcagcaattcacaccatggggcaaagttttctaaaatatgcttttggtccagtcattaccggatacattttttttctttctccttgcatcattttgaaatatggtcattcagatgtaaattcctttcaggtaaaatgtctgaaaaataaaccagcatttcagccaataagaaagcaatctggctagattactaataaaagataacacattcacatatctaagtgttccacaattcccagttagattcaccaccaactcaaaataattacaatggaaaaattttttccataattgtcactccacagaagcataatttttcatgataataggtacaataaga

SEQ ID NO: 29543 - DNA, 3069 bp, Bovine  19866880705603
  misc_feature (1)..(1): n is a, c, g, or t
ngcatgagttctaaataatgttccagatattattattctccagctatattagtaagaccactgaaattcagagatattgcatctgaccaaagtcacactgctatcaagaggcagactgttgttcagtcactaagtcatgtccaactctgtgtcccagtagactgtagcctgccaggctcctctgtcctccactatctcctggtgcttagtcgctcagtcatgtccgactctttgtgatcccatggactctagcccaccaggcttctctgtccatggggtttctccaggaaagaatactggcatgggttgtcaggccctcctccaggggatcttcccaactcaggaattgaacccagatctcctgcattgcaggcagattctttaccatctgagccaccagggaagcccactctctatctcctggagtttgctcaaattcatgtccaagcaagaggcagaggggacatgcaaacttagggttttctgacttacaggaccacactagatatggtggaagctctctcagtagatctactttcaaacaccctaatgcagtaatcgatatccttcatcacttctgtaaactgtgcagactggtactgacttcattttcagtactcatgcctagtgggctactttctagtatacttacatatttctgctcctgatagtttagttgtgtgtttacagttgtatagtttctaaacctgtttatgccagttgaccatgttatatagttattttaatgactacgtaaaccaatgaaaatgaatgtggaaatagaattattatttctatgaaaactaaagtggatggaaagacttaataagggaagttgaaaacaattttttttttacctaaattaggtgtgaatgattccattataaagaattggggaaaaataataaagtattggataaaatttttactaacagttgctttgcaattgtgcttaaattttcactttcactttaaataaattctaggctttcaaagaaaaagctttgttctaaatcaaaagattgaccattgagtggatatttatacatgtcagagtaaaataaaatatttaatatgcacttatcattttatgattacataataatgcccaataagagcatttcttatctattattatcctttttacagctgagaaactgaggtgcagggtcaataacctagatcctatcatctggtataacggcagagctaagacaaagttgcaaaggcagacataggatataacactatggttctccatggcctatgctttgccctttactgtcttgctaagatgataaatttgagggttacgaaacatatgccaggaaaccccatggaaagttattggactaaggctgaccttgaaaggtccccactatattccctgctctcagaaagaacttcccttttctcagatagatattaacctgtttgatttttcaaaaactccagggaaaaatgtttcattgtatcacgtagtgattatcattgttataagaattttattttccttagagactctaccaatatacactacttctaagatatagagcttttaagcagtaggaaagaacggaaataacttataatgacatgacagtattactgaagatgtaagtcccagaacttctctacttcataatgtcttcctccaactacttacttgacactttctgaattattcataagtgaaaaaaaagacgctgttttagacttgattattaaaatcatttgaaaaataattcattaaactagtatctatttgttgaattagtagaaatatcagctttcctggaagatttactagagagtaatctatgaccacattttctggagaattgaggcagggttatgatgaacaggggggtcattgctatatatactcccttgcctcaggatttgccagtataatggccaggttctttgtattatttgctatgactgcataaaaaatcacctcataacctagtggcttgcggtagtaatataacacttatttactatttcccatggtttctgttggtcaaggtttctgtggcttacctgggagattttagctaagggattttcaatgaggttccagtcagatgttgaatggggctacaagcatttgaggggtggactcagtttggaggatccacttacaagttaactccctcacatgattggccatttggtgctggttgtgggttggaggccccagttcctctgtacatgagcctctctgtgagacttcttgagtctgctcatggcattgtggctgctttctgtcagaatgatgatccaagaaaccaaaaggtagaagctgcaataccttggcctgtccatactctgttggggtcacacagggttgtaaagggcaaggatcataaggggccattttagaggctgattaacacgttctctagaaaaaatccttctagaatgatggcagtaatcaaaatctgctgttgttgtaatgaaggctttctctctttcagaatgtaagttcctttgctgcctatattctgccatttcttttctttttttttagtgtatagattttaagaagtcttttctttttgacccttgtctatcccttcacccttggtctgaatttggaggctgtattgttactgcagaacaaaccataccaaacctagtggtttaaaataacaaacattaaaaaaaaactttttattttgttttgaggtatagctgattaacaaacaatgttgtgatagtttcaggtgaatggcgaaggaattcagccatacatacacatgtatacattctgccccaagttcttctcccctccaggcgctatataacattgagcagagttctatgtgccatatggtaggtccttgttaattatccattttaaatatagcagtgtgttgtacccatccatcctaaactccctaactatcctttcctcccaatcttcccccagactcttggcaaccggaagtttgttctctaagactgtgagtctctttctgttttgcaagtaagctcatttgtatcattttttttttttttttagattccacatataagggatatcagaatatttctccttct

SEQ ID NO: 29544 - DNA, 1792 bp, Bovine  19866880718088
  misc_feature (1)..(1): n is a, c, g, or t
nccttaccttggttgcagcccagtcacggactgatggaaaaaccaagctaaagttttctttccgtagatgtatttttatgaattacttaactgggctttgtccctgcctttgttaattgcactcaccggaaagaactatggagtgctggcattaagaaccctttaaaagacaaagcagttgattattcttatcatcaaagtaggtactcacatcagcacaccaagtactgcatagaaatagcttgttggtagaattatactctcaagggcagatatcttcaagccatccttaactctccagcagaaaggcaaccacatacaatgctgaggagtagggaaaatgttgaagtgaaggtagaaggatctcatgtgaaattacgagtggcctttaatgatggctgtcagagaagagtcacagtgcttcacttttctttccagtgttggaactgctatcctcaggaaagcccagttcgcttcctggcacaggtattagctaatggtttgaatgaacataatcttttcacctacttgccttcatatgcactatttcctctctgaggaaagcctacccctcattccccagccctacccccacctcacttctagagaatttcctacatgtggccttccttacctaagtaataacaatactagtattcttgcctggagaatcccagggatggcggagcctggtgggctgccatctatggggtcgcacagagtcggacaagactgaagcgacttagcagcagcagcaacagcagcagcagctagcctttatatagtagttactatgcatctggtagtgtagagggttgaatggtgtggcagtgggaacacctgcttcagatcttgctgataaggagttgcattgtctacagagaattaaaaaacatattaaaaacaaaaaatggattctgcttttttctgaccaacctattttggcagtcctaaacaacatcagtaataaaacactcctccccatgggggcagacttctcagccccctttatccttggtacccactccgtgtgcccagcaccttcctaagcttttatatatattaacttccataatttgtccccattttacagctgagggaactgaagcacagagatcatgtgcggtttggtcatactgcctaatccagcagtattgcatgatttcacctaaatatctgccttgtgaaatatctaatacacaatataaatacatatgtctgtgaagacaccctgatccacccaggaggtaattaatagctccctacgtgtgttcctcaccccctgtttatatttctgtcatagtatcgctgtgctgcagggaggagacggagctccctaagcctagtccagtggctgccttgtaatagatgttgaaagaatgactgaatgcagtctttggttgcagagctaggggatctgcatatatttatgtatattacatgtatttcatggcagattggtagaaggctctagattttggtttgcattcaagaacagctttcagttctgactctgttactaattatctgtgaaactcagaatcaggaattgaatacatgtgaatatttgtttcctagtctgtgaagtaggaggtaggatagtctatcagtgatttttcagtagtgataacccacctttaaactaaactcaagtggatttctttttttttttcccatccccttgttaacagtcatttttgtaggaaaaaaccttttcatttatgtgtaatatactacagaaagcacacaaactagaagtgtacagcttaatcaattatcacagggtcagcac

SEQ ID NO: 29545 - DNA, 1795 bp, Bovine  19866880733854
  misc_feature (1)..(1): n is a, c, g, or t
ntaataaagtaagacttttttctattgatttcagtttgttttgctttggccaaagccaataagagccagaaagggaggctattgcatcattctcaggaaatggtaatgaaagtataaatgggactagccaagaggaaaatcaaggagagacaacagaggtgagaggtatttcagatacattatactagacttagcaaataactggatgtgagaaataggagagggagacaccagagattgtcttaacccattgtagtgaacaacagaaaatgaaatgctgaacagagagctggagcaagaatgtagagagttaagactaggagaagatggaaaacacaaaaattagttagagaaggtgattgtgcaggtgatcagagagaagcttagaaaagagagactggagagaaaaaaagttgaaaagaaagcaaaataccatatataattgaacatatgacatatgacagacacagaagtgaaataaaaataaaacttcacaatttactagcatttctttacctctggtgaaggcaccacaatccttcatctagaggtaaatggttgcctgcagataaagatgccttccagctccagcaaaaggaatcatactccctttcctttttcctctctcttcctaaattctgaatgcaaacccatggtgtgtgaatggcagaaccaatccctcaattcagccatattcattttcctctggcaagattttaaagctgaaaatagaagttttcaatggaacatggaataaaaagctaatctttacagcatcttgtgaacatgacacccagactatattatggtcatgaaagactttttcatacagaacaacgatgtgttttttcagccacactcattgtgacatcctgagactgcatgttacaagaatattttttggtagagcctaatcattttctaacagctgtgtgctctatacagtttttgaaggttagtacctgaaagaaaagttttcacttaaatctggtaaatgttacatcttagcaaagatgtctttaaatgtacataaccatttattctggcttaccctgtaataatcttttctcagactaggtgccattccttaaagaactgaataatgtttattaagttttagttaaatgtatgacctggtcaggtagagttattttggcaatataaatgtggagaaagagagagaatggaaaactggcagaaagcaatgatctgttctgacatgtgactttatcaagtttatatgagtcatcgtcatcattcacatgttttgtgaagagatggtttgttatttcaggagactgattattaattgaaaaagcttttgatgaactggtagaaaagagaatttacagaaaaaggaagggagcacacacagaggtatttgaacaaacctacaaattgaaccttgaaatccaagtgcttaattgccatttagtctacttgaatacagattgaggggatgcaatcaccaaatgtaattctagcttaaagaaactgtctatccaaatgttaaacatatactcccacttctttgtattttgtacactagcattttgcttcaacaaaataatttgagtagaaagattaaaattatttctcctttttgatcaaaaataacaagtcttgtttttcctgtattactagtacgcactaagtaagtactacagacaggtttaaaaaaactacttgtcctaggctttgtgagttgaaagttaattcagcatttgtatttactaaaaaatgttaccattacaggaattttataattcggtaaaaagtacccaaaattccaccc

SEQ ID NO: 29546 - DNA, 1800 bp, Bovine  19866880744559
  misc_feature (1)..(1): n is a, c, g, or t
ntttctgagctaaatgaagacaagataaattagccccttccacaagtactaattttttttttctattgctatggtaacaattctccattttaggagagggaaaagagtggaccataaaatctgagcttaaaacttgtcaatgatgtatcgaaaaatacttcagtgtcttttatcatatgactgctaggaaattttccaagagaaatagtctgatatatgtgcaaatatgtacatataagagacttacgatagcaccttattaaacagtaaaattggaaaaaatatttaagtgttcagcaattaagtaaactatggtacactggtacagaggaatattaaagagtaattttgagttagtatgtagatacatattgacttacatgggtgtgtgggatccagacatgtatttacttacattgtgtacctggaagtcagtacctaagtgacaggatactatctagcatttgactatgttatataaactttccagggaaaaatttctgaagattatttacatcaaaattctaacagcagcagctatttctagtgagagaaactcagggtgactggagatgtttgccatgtgcccttctgtattatctatgatgattttcatcatttgtgtaattaaaaataggggaaaatgtgaccacagttgactgtattattgattaaaaaatatgtgctgccccaaaggagctctttgctggtgcctcttcttgtgagaggaatataattctcatccccacagacacgaggcttaactatgtgatctgcttgactaacacaataaagtaaaataaaacagccataggacatgtgcaactccaagcagaagagctagcatgtgccttatctttcctccaccctgagacaaggctgttctagacagagctgctccttctgcctgaccacgaaatacagaagctatgaagcagatctgagctgacttgttaatagtcataatatgagtgagaataagtcttgggttatcataagccactgagattttggagctgtttgcttcaatagcataataaattctaagcagactgatgcatgaatttttactatcacttccaaacaaggccaaactaagatttaaataaaagagccccttagctacctatctctgattagctctaaaatattatgttcagtacaaaccttccaattaacagcattttaaaactgttatctgtggcagagttgactgcatccagacttccatttttcctttctgcgtccacagtctcttgagtcaagttgattatttctgtctttcatgactgtttctttcaggtcccactattctgcctctggtctaagtcttgctcatgtcacacctacacgtggaggtcatggtcaataccgtgctctgtgagttcagtcgctaagtcatgtccgactctttgcaagaatactggagtgggttgcccctctaggggatcttcccaacccagggatcaaagccatgtctcctgcattggcaggcagattctttaccactgaaataccaaggaagccccatggtcaatgccacagtgcatcaatcctcttcatacactgttgtgagatgtcttccttaaatactgtcttgtgacctaccatcactagttcaaggcttcctgagcctttagtctcgaattcaggccactgtttaattcttcaagctcgctaccctcctaacacaaaccttcatcaccaaccaaagtagctcattcattattccctgtgcacacttcacatattcccagaatcagggactccctgaccaaggttatagcaatgatgtcagta

SEQ ID NO: 29547 - DNA, 1419 bp, Bovine  19866880761639
  misc_feature (1)..(1): n is a, c, g, or t
ntacccaataatcctctgttaatacatatttctagtagtttgaatcacagggcaaagaaggctgtgggacctcacgggtatgtgccttgctcagctgagtttcaggagaattcaaaacggctggtggtaagcctggggaggactctggagaggccaagacaagggtggcctccccttcagagagctggctggcagctcctggtgggccatgttcaccgaagcctaaaatctgggccgagcagccgtggactcgtgggcctgagtgccacagggcgcagtgcagctgacctggaagaccttaccacagaggcactttaactggcaggaaatgcatcgaaagacttaaagataaagtgtgttccctcctatcacctgcaactcgctgtttatttgtggagatgaggaatcagactctgtcgtcaaggctgccattgctggtggagaggttactccacgcccacacatccctgcatgggaagagaggacaaccggagactgaccggcgatgtctgaattccttgttgtctcaggactccacacacctcacagctgttgtcttgaatgattccagtgactgcctctctgtgagaaacacatttgcctgtttgtgattctatctgagcaagctggtttcaaccaacaaaatctctgcatttgagtcttagccttatttatttatctattcttggaagtttgttttcactgggacacaggggatgggttgtgagacatctccacgggcctgatctgtcagtgaaacatccattctagtcttcctgggacagcttttaggaactttctcatccctgggagctgatgctcttgctggcagcaacctcttcaggtccactggttacagttcctccctgggggagaatctccccctttttcttggggacactcttgtttcctgactcttcacggtcactaactggttcctctattgggaaagatatcttcctctgggaagacttccaccgccagctgtctctttaagatcactactaaccagctcctccttggaagaggatttctttttcttgggtttggagaaagatacagatgactcttccattctatcctcccgatgggcctcctgaggcttccactttcttcttttcggtcttgcactcgtctcctggcactcctcctgagcactgctgtagttttccaaagatgtgaagggaactgcaaccagcctttctttttcttcttcaagcatttcttctcctgtttctccagcttcctagtaatctcagcgtcggcttcctctgcctgaacaattatctctatcacaacatccagattcctgcagggcacctcttcagtctcatagaaggacagctgttcctcagcttgctcttcaagtttttccacaaatatagctgagggcacctcagagaagcaatcagtttataa

SEQ ID NO: 29548 - DNA, 1272 bp, Bovine  19866880763744
  misc_feature (1)..(1): n is a, c, g, or t
natatacatgtggaatctaggaaaatggtactgatgaaccgatttgcagggaaggaatggagatgcagatgtagagcacggacttgtggacacagtggggacacagtgagtaggacggatggaaaaagttgcatcaacatgtatacattatcatatgcagaatggaccgtcggtgagaagctgctgcataacacagggagcccagtctggaggtctgcgatgacccagaggggtgggttgggggaagggagggaggctcaagagggaggggaatataatatatattatggctgatatgtgttgtatggaagaaaccaacaaaacattgtaaaaattaaaaaacaaatcagaactagtcagaaacattctaaggttctggtagctgagagaaacttatttgcagactttctaagagagagacttcagctgacccttaaaactcaatggttcccaaattatgaaaagaagaatctggaagaaatgatgctctttgcaaaatgccacactctgctgaatgccttaaaatatcaccagcgtgaactccatcaggcgaagtaccaataattttcctaggagaaaaattctatatgtagaactgggaacccgcatgtccacaaagaaacaagctgtcaaaccaagcattatcaactgtctcagaatttttccattaatattcatttgctgcttgttcatttctttggtcgtctgctagtgcttgctaccagacaagtgggagcaggcatcaaagtttaagaataacttttgggataaatttgagagaaaatgatcttctttaaaatgacagggtattttccccctgcaaattttgaaaggattcccactatcctggactaaccccatgccactccagctcagtgttcccctgggccgtttgttataatgcagtggatttgggtcaaccacctgaaagagtattaaagtgctggcctgaaaaatattttacaggcaaaacaatggtagtatcttgtcacccaattaccccaataaaccgttcctaaagaagtaacattgaaaggtgggaatctttacagatttttccaagcctaataagattccatgaactgcacatctctacaagtcccatgctaaaaagctcttataagtggctccaaatcatggaaatcttctgaactagcagacaaatgtcaccaaccctacataagaaacccacagtgagggaagttagaaaagagtcttcgaccagaaaagcagaataagcatagacactgagaactaagagagggagagaga

SEQ ID NO: 29549 - DNA, 1077 bp, Bovine  19866880776053
  misc_feature (1)..(1): n is a, c, g, or t
ncttttttttcttttcttttcatataattcccccaaaagtttcaaaatcaacttggaagataaccctatgccttaaaaagtgaaactgcctcacacttgctgaacaattaacatggaaatgtaaatctgtagaaaaaaatgaaaccttcctttttggttgtttgtgaatgtaatgttttatataagtctagacttagacaattggcttctaaaacatggctctctaaagttttagaggagagatccgtttcagaatatttcatttaaccagagagaattgctttctcccagctggaagcttgaacagctgttgacttgacacttttctgttcctctgggtgagagttcatggaccctcctcatgccattaggaggacagtcagcaatgtatgtggtcagaaatacgtcccacgccagcccatttccaaggctacccttctatcctctccctaggactagggcacagataactcagagccctgggtcacctagcggaaatagtctctcagttgaggaaaaccaacctccacaaaaatctgctttctgacccatggttaggtctcaggcttatgtgaccataaagattccttgaaggacttttgatattgaccagtctcagaatttggcttttttttttttttacactttataggaaatttcccttttatttaggtgtatttctgagtgcttcttaatgaattgtttgttgttgtttaggtactcagtcatgtccaaatctttgtgaccccacggactgtagcccaccaggctcctctaatgatgggattttttaggcaagaatactggagtggattgccatttccttctccagggtatcttcccaacccagggcttgaacctgcgtctcttgcattggcaggttctctttaccactgagccacctgggagccccagtatttctgttgctgctgctgctaagtcgcttcagtcgtgtccgactctgtgcaaccccgtagtcggcagcccaccatgctccaacgtccctaggatttctccaggcaagaacactagagtgggttgccatttccttctccaatggatactaaataataactc

SEQ ID NO: 29550 - DNA, 1622 bp, Bovine  19866880830504
  misc_feature (1)..(1): n is a, c, g, or t
nccctgtgttccttggggcacagaggttgctgggagtggggtgatcgtcacttgctggctctttagtgggaactaaaacgtcctggttgtattaggactagaagctggcctcccattgggctgaagtgtagcgtccttatgtttcctttctcatgcccacccacccacagctccctgttgcttttccatgtggctaattcatacccagtgccatgcaagtttcactcggcacatcacagacattcagatacttgttccatgtatagtgaattgatacaaataaagtaccaaaatacaggaaactacctaccatcaacaagcccctccacatacacaccattaagttgttactgattgatctagattctgtttcctggaaacaagaaagactttccaaggttgaaaatggattttctttaaagaaaataaaaaagaaaagcaactctacaacaaaaaaaggaattttaacatgtgttgaattaaaaatatcatctatgccatatgttatagagtgaaaggtcacaggttgcttgcttgtgttgttcgttattacttttctttattttgataattttgggtctgcacttcaactcctaaactgatggcagaggcaggggaagcagcccgcccaggaaaggctttaatatctgactggtagtaggagaagcagaagggagatggcacgacgagtcaatgtaacagtgctatttgcacaggcgggtgcaggtgtggatggctgacctttaatccaaaagacagtctcactgaggacggaaaatagatcagtctggcaggaaggtttcagacagttgtgccaatggaaggagaaaggctggcactaaattgtataggaagctgctgaccagaaaaacatggcctccaagaaaagggaacaaaaccatcaggtctccaaataaacttcctgccacagggctggacattggaatggtagatgtcgggagagatctacatggtcaaaaatttaaggacacagatctagcaacgtatggaaatttatatgccttaacttagtacagtttgcttttctgccccaagataaattacagtattatcattaaaaagaataacctgaatataaaaaaatttgaagtccaaaaattactgcataccaggcctcttgcaaggaacctgccttcattatctaattctcagagcactactgaaagcaaattaacatcatactcattttataagacaaaaacacaatggtttaggtaagcaacttaaagaacatccctgttccccaaaaggaaaaattgaaacctaaagccttcatatgacaaagccaatgctctttcaattataagaaaagaagactacaggataaaataaatttgaatttgcttccagctctattgcttactgggtgactgaccttgagcaagtctgttctgtagtcgcactaccttattccgtaaaatggaactattagattctcccattagcagattcaatgaggttaaattgagataatttatcttaaacactctgcaaattaactggtcatagtattcaataaaacactagacaaaaacgtctttctttctcataagcaatctcaagaagtataaatattttatcattttaatgtgacttttaat

SEQ ID NO: 29551 - DNA, 1133 bp, Bovine  19866880843214
  misc_feature (1)..(1): n is a, c, g, or t
nacctactaaaaagcaacaaggagaaagacatcgtctttttgaaaaaacgttctttcgtctctttctttgttccttcgtttgtttttcttgcccctttttgtttagttgaaaggcaataggagggtagtctctccgtctttttaaactctcttttttaagtttcccctcccctttcatatttttttttcgccatttcttttagcgttggactttggggtcgaaagcatttctttttatttgcttcttttaagccgagcacagtttaggtttcgtgctgtcttaagagaactatccagcagcttcttgctcatccttattgggagaactgcaccgttactttaaaaacacacatacacaaaaaccttaagggagaaaggtaagtttcggtttggtttctttaatcattagttgcagcgatgcgctggcaaacccagaaaacctgtaagtgagcggaatacagaataagaagttaattgcacatgtttgtctcatttcaaagctactgctctgctttttaattctagagagctagactaaaagacagtggacgcatgcttgacgtattgaatattcgcaaatgtcaggggcaaaaacttaagtggtaaatgtggccagtgtataacaggggtacagcgggagtctagatgatcagtgaactgggattgaggttggaagttcatttcgtgggaagagagggataacttgggtttaagggaggatgcatgcctctactttcgcgaagcaaccgaaggaccgtagaggctttagaaccattaaggggaatcagaagcctggacttggagattagaccagcgaaaaccccatacttaattgcattaaccagataacatgtgctggggagataggattgccagatggaatttagatgctgcaccaggcagcgagttgtagttgactgaaaaaaagtacatgccgcccgagggctggggctggggctgggctggggtgggtagaagctgtcaaaactcatcattgcgaggtatacggactctaaatcacggtcgccaattatcgtgcttctgttttaaaagaagatagccaatttagggccgaattcttaagcctgtaccggatatgagattccctttgttcagaaaagcgtaaataagat

SEQ ID NO: 29552 - DNA, 1334 bp, Bovine  19866880856441
  misc_feature (1)..(1): n is a, c, g, or t
nttagcacagtttgattacagagtaggtggccggatatgaaagacctgatcaggatgctgctttgaatggattgatcacctgtaactaccattgtaattccacagttcattgcctgtaagccgactgtcctcccttgccttgaacaaaccttagatttgttgtcttggcttgatcttttagataatgagccaatattgttagaggcaacctaaacactgcatcgggtaaataaaaatgcagactagctacgatactacttggcatgcattagttgctcagttatgtggaaagaaagtagtagggaactcaagctcagtccttcttgggccaatcattcagccagaatcctcactgtgttctgaagctcaacctggttgtaataacagatttgttttccttaacttgtgcttcttatgtaaacacttttcatgctatttgtatatttctatatgtatctccatcagagggcttctctggtggttcagggataaagaatccacctgcaaatgtaggagacacaggttccagaagatcccctggggaaaggactggcaacctactccagtattctttcctgggtaatcccatggacagaggagcctggcaagctgtagcccatgaggtcacaaaagagctggacatgacagcgactaaaacaacaaacaacaacaatctccatcagaaagtaactaccttgcagcaaggaactatgtattcagtacttctttcacctgccataggaccaagctacagttttatacacactgagcactcaaacatgtagaaaaagaggtagtaatgagtacagaatggaaaaatgaatagatctaatccctcaggtgcttgataacatacaatgtcacataaaagcttataacaaccatcactcttaatagcacagcaaaaggaacagagagataaaaatcaaagagaacatctgaatcaaaagtgagaggaagagatgagaagcttagccataagaacgttgtataactgaattgccaaactcaagggaaaggtttagaaaaatatgataagctccacttacagggaacttggttttcttagcaaatggattcggtaattggaatttttgttccttcttttcctctgggagcatgtggatgagagttaattaatgtggtaagattgtgcagtatctttgaaaattgtaacttgttaataaagacccaaattgcactacagctgtgtaatttgggtgatgatatgggaatggctaaagatccagacctaccaaagctattcccactgagatttcagggcccagacttaagattatatataacggagaagaaataaaaggaggaagaca

SEQ ID NO: 29553 - DNA, 716 bp, Bovine  19866880897090
  misc_feature (1)..(1): n is a, c, g, or t
ntggcacaaacttttgcaatctctaaaactggtcacttaaaagtgtcagaaattttctactatcttttctatcacatgtatacactcttcactatttcccattttctaggaggatattcagagaaggcaatggcaccccactccagtactcttgcctggaaaatcccatggacggaggagcctggtaggctgcagtccgtggggtcgcgaagagtcggacacgactgagcgactccactttcacttttcactctcatgcattggacaaggaaatgacaacccgctccagtgttcttgcctggagaatcccagggacgggggagcctggtgggctgccgtctatggagtcacacagagtcggacacgactgaagcgacttagcagcagcagcaggaggatattttgcacaaacaatctaaaacatagtgtcacattacagaaaagtacaggatgatgaaagtgctgcaaaatgctccctggcattattactcgtatttcccacttggatgagatttggggcaatgctcgtacagaccccttctccaaaacacaggacggtttgaagaaagtatgaatgaacaaaacgaggggctgcatggtgtgactgccacatctgtcagcagcgcatttgggaagccttctcctgtcactatatatattcagaaataatgacatagaaatgtagtttctccaggcaaacgaaaggaggtgcaaat

SEQ ID NO: 29554 - DNA, 1998 bp, Bovine  19866880920011
  misc_feature (1)..(1): n is a, c, g, or t
nacactactgcccagaaaaagaaaaaatataactgcccctgtttcttacccagacatacagacacacacacatatttatgaaacaaacccttctctacacttctttaccctgcttcctgccgtaggagtggcaaagaaaagtcatctagcccaacatacaaaacacaaacgaacagcatcatcttgactaaaagtctccatgcattttctggaatgtatattgtatatttattgcttcagacttttaaagttgttctgagtcttcacagtgacaaaattgcataagtttacatactttttatctctctcacacacattttgtcatggaaaggatccatacatttgatttcttcataaaccagtgtagaggtagtgtatggttaggccattctcttctcttgctctgtgtacattccctgctcaatccggcccttcttcactcacatcactacctaattctcttgattactaggcttagttagtccttggtaactgatgagcccacctgacatcaattccctataaatagtaacctccttctctctcagcaaacaaagactgctgctgtgtcctacccaccgcctgctgcacagggtgaggtgtcactccaggactctttgtgttaagagtcccctgtcgagtaaccaactgaggtctctgtggctgtcttcaggctcttcggtctcaaggctgggcaactataaggcttgcaagcctgcagggtgcagcccaacagtaaggtaagaggcaaattgcccacatcaccccaaatgagtgttctgtaaaattgtgtgtatgtgtgaaggagaggagatgctaccctggaattttgttctttgtctgtacaaaggacaatcctgtcctctttcctcctgcctccattgacctttcctcatgccttaacgtcctactccatactgaaatatgactgttctggaaagtgacagtatcaattttgattccctacaccctgaaaacatctttttcagtggtctctttttaaaacttgccttgcattatcctaatttgagcataccatctgtttcctgctggaaccgtgactgataaaagcaccatctccccttcttctaagcccacagaaataataaagtataaaatgataaaaagtgaaatgaaatattggtgtccaaataggaagataagcactgctatggtctcacaagtgaaagagggacgcaaagagtaataatctgtccccaaaagcagacctatggaacctcaggcttgaaagtgaggtctattcctttggataatgagggttaaaggtttttcacctgagggcaaggcagactgggtctaggtctcttacatgaaaagtgtggttgcagctttccttctctacctactaaaggaggcaaaaataacctctcaaacttgccctgaattgtgactgcttacatgaagctgagagtttccctggtggcccagtggtaaagaatccacctgccaagcaggatacctgggttcagtccctgggttgggaagatcctctggataaggaaatggcaacccattcttgcctggaaaatcccacggacagaggatcctggtggactacagtccatggcatcgcactagagttggatgcatcttagcgaccaaaaaacaacatgaagctgaaaactcaggagagaaggtagtgggacatatcctggcaggtaaagacttgagacaagctagtatctctcagtggctgcagtgttccaaattatcacctcatcaagaactttgagctatgaaggtgtgattgcatctggattgggacccctagggagacaggtagaaacatttacaaaatttgtagacattgcagtgtttgagaaaagaaggaagagcaagagaatgtaggtttccttgttgatgagcaattcaaaacacatgagtaaaactaactgcaagtgaagcaataaaatcaaccagctgaattctccctggaaaaactgaaaaccatagaacaatcaaaaatgacttttaaat

SEQ ID NO: 29555 - DNA, 952 bp, Bovine  19866880935278
  misc_feature (1)..(1): n is a, c, g, or t
ntatctttttagaaaggttgctaaaacttaaaatataaatgctgcctggaaaatgtactttgtcctctcatacttgcacactctcaaaaatgcacaccagtgaatttgcaaactattcaacaaaatagagaacaagatacagtgcagagtcatcagtgagtcaagacaacaaggtcactggctatattctggttcttttacatttgaaacttttttgccaaacatttatttaaataatgcatagaatttcatgtcccatatccataaagcagaagtgtgtagatgtaaagtgtgctgagagaatcaggtgatgtccaaatacctatgtggaatttcttgagttccgaaacaacccatagtgattatctgggtaaagagggtggcggtgggatgaaatagaactcttattcttgtaagtagctaaagcagattcgtttctgtggttgacgacttctttggctattctaaaagccaccctggaatctctcctgtgaccccatcacttcaacaaaaaggtcaggtttacctccgtttatggtacgtacactcctctgtatctggttaatctacttttcttacaacaaaaggaaaatttgggagcccatttggaatcagagagcttccgattctaatactggagtcagagagcttcctctgtcctacgctctgaaaaagacggaatcctgtttttttaatctgattggtttaaattggcccttaatctgtatttacatcaaacttcacacaactttattttgttctaattgtttctacatcgtaactatgactaggaattatgactaagatgttgtgtccctttgcaacttttccttacagcttcctctccccaaataatttttaaaaccggtggacttctctcaccgctcccctccccccattaaaaaaatagatcccgttccgggcgccccctctctgcctgccgaaagcatta

SEQ ID NO: 29556 - DNA, 745 bp, Bovine  19866880962904
  misc_feature (1)..(1): n is a, c, g, or t
ntcttttgaggtttgacagaaaacacaaaattctgtaaagcaattatccttcaataaaaaataaataatttttaaaagcaaaaaataaaataaaatggcaattctaactggaaagtcactgggtaggatgaagtattggagacaatttgcaaattagatagattcaaggaaggctcctactggggcttggcttagaataaatcctgcctgagtaccctgaaattctgagtttaaataatcaattgctattgatttttcacttgtgttctgccaaatttggttattccctagtcacattgccttgtcatttgagccaaattcagtaaagaatttattcattcattagaatcagtagaggtagaatgtaatgctgaaaaattgcatttaagattttctacagtaagtatcagtcatcttgtgtgaatattaatttgctcacatataaaaaatcatgaagtaatgtcattatcttctttattattcttaaaagcatcagatacaaatagagcattgtggtctggcttctattggccaagtccacttcagtgataagctgtggctaagggcatagaagagacacaaaaggcaagggagaaagggaaaaatataccaactaatgcatagttccagaaaatcaggaggagagataagaaacccttcttaaatgaacagtgcaaagaaatagaggaaaacgggaacatttcaagcaaggatggatgtaatataggacagaagtgataaggac

SEQ ID NO: 29557 - DNA, 825 bp, Bovine  19866881005027
  misc_feature (1)..(1): n is a, c, g, or t
ncacttactctacaaagtaacagataaccagatctattactgcaaatgaaaaaatacaaattctagttgaactggagtggagactggggatagatacaggacttgtgagctatataaactcccccttcaaaatcaaagtgttatgtagaaaacagagtttcaacaaaaagtacaatgatgaggaaagaactcattaagagctaaaaataaactctaattcacaatatgcataaggatttaacaaaaaaaggaaaacaagatgtaaaattgcatctgctaagttaaccatgccctcatggaaatcgccacccctcatttacacaaactggaatctgtaaagtctgtgatgactgaataaggcaatgctttaaatattttcaatgactatttcaacaaaagaaaatcaagggacagcgattttttttccctaagtcctctgatctcctaacactacaggaacactgggcttcttaacatccaaacacacagatcccttcatttctcttcttcaaaatcttacttgatgaaatcagaatatatagtactggtatttatgatttacattacaggggtattaatcttaaggaagaagctatcagtaacagtgaaaacaagcctcagttagttttcatctgatacctcatggctcaatttaacaacgtgctgaccttccaggccagttaacagtccactggggggaagcttggctgagagtaccttcatattttaagtcaagctaattcattctgaataacagttacacaataccacacagagcaataactctacactccagtgctccagttcacagaggctggtgtaatg

SEQ ID NO: 29558 - DNA, 1678 bp, Bovine  19866881094365
  misc_feature (1)..(1): n is a, c, g, or t
nacctctttgaaacttgagatttttatcttttaataaagtaataatatctatctcacaaaattgaagaaaagattaaataagataatatatgtaaaggacttagtacaatgcttggcctgtatagagaggacccaataattgaataagtgataattattatagtaattcttattatagctatgattaccattttctgttacaaaagttagaagatgggccttttactcctcacagggaaactcatggaggacagtttgatgtctcagagggtatactgtggtctgttgcaaagaaaccagaggacacggactgaagttctcaaaatgcatggcaggcttccaggtccctcttgggaggctctacaacactgagattgactttgctgctataggaaccaagaattacctcctccttcgttgctctctctctgctccccacagctgttgtcataatagaggtatcattgtctttcttccctatatgtgcaacaactttatttgcattatttttaatcactattaaaaatgtgatctgtaatctagatgttacccagtttacagctgtataaaaatcactagctggtgggtagcagaaccaaggattcaacctgggtctttctggccactgaacctgccctttttccattgtcctctggcctcgtttaccactttagcactatctccaactctaatcttaacaaaggtctctaaaaacatttataaagaaatatccttgaggataatttttttctcaacttgagatgtgtttttcttcctcccctagagagtacaaaattatgagaatccacacatatgcatacttgtgaaactgtagtgcgagtcactactcttgagtgatattacatgtagtttggctgcaagaaaattaaaccctgtcaagaaatagttcccaagaccagtaacttctgtggggaaagaaaggaagaaagaaagtgaagtcgctcagttgtgtctgactttttgagaccccatggactgtagcctatgagactcctctggccatggaattttccagtcaagagtactggagtgggttgccatttcctttgtggggaggggatgtataaaaacagatgcccaaaaaacgagtgaagaagaaaaaagcctcccaaccccagagaataaataagtatagtatatataatatttagttcagtgttctgaaaaggttgagacatactcaaggtcagtcatacagtaaattagtaatggaatcatatccagcctttggacattcattccagtactttttcctgattctactttttcctctgcagcttctcaggtatcgggagagaaaaactttttaatgaaaatgaatggtggaggaaaaagtgtttaagacactccaggaatagtgttaactgtagagggagggtcttgtaagttttgagcccttttgaggttgcccacatgcttgaatccatgtatccgtgcatacgtatcgtgcttacacagcatctttcgctccaggcctcctctcagtgctgagcgtatatctatggacgtgttgcaaggaccattcgttccaaagaaagacctgcaggggcaacttgcgacggagcaaaatgtgttctctgtcaacatccccctttccctctcatgccctctaactccttttgatatacgtacgagccctcttacagccctccaaatc

SEQ ID NO: 29559 - DNA, 1642 bp, Bovine  19866881106872
  misc_feature (1)..(1): n is a, c, g, or t
ntgatatactgaatgctgatctattttcgaatttggttgttttgtatactaatacagagattgccataagtaaacataccaaccaatatacttagctctcataacatttaaaaaaataactattgtaatcttttggaatctatcaatagtacaaagatatcatggtttgattatttgcctgtttctgtcctaagagttttctaccttaaggtagaaagcacttaatataattgacaacctaagattatcactatgaacacaagctttgtcttctgaaaaaacataggtttaatatttgttttcatataagtgtatgactttagacctattgctaatgtctctgactttcaatcttatcacttataaaatagcaactgtaatatatacctcatagagttatactgaagattgaatgacacaatgtatgtaaagctctttcttcaataaatggtacctattattatttaaaattgaagctggtactttagatataatttcagtggaggaaattagtaggtggtatggtttattcattgacagaaatttaatatcctcccacctctttcatttggttagtttgaaatttttcattctgatttttctgctgtggtttttggagggatctcatttatgtattttaattccaaagcacaagagagtcccccttcttatggtatccccataaattgcacttatctgcttttaccaaagggccaagaaaagtgctagaggttactatctatctagattgagcagtcagttgagcagaagtaggcttaacacttcatataacataataattttaggcatataacttggcatgccaagataaacacagatgttttacagaatgttatctatcttttgttgttgtttagttactcagttgtgtctgactctttgagacccccatggacagtagtccactagactcctctgtccatgggatttttcaggtaagattactggaataggtgggaatttccttcttgaggagatctttcttacccaggtattgaacctgcatctctgtgtctcctgtattgcatgtgaattctttacctctgatgcaccagggaagccccatatctatcttattagttaagtaaatataaccagtcctagatgacaatagcatccaaatgtcaaaatattacttcctgatattttccaatatcagattatgcccttcccagtgtgtgtgtgcttcagttgctcagttgtgtctgaccctttgggacaccatggactatagcctgccagacgcctctgtccatgacattttccaggcaggaatactggagttgggtaccatttcctactccaggggattttcctgacccagggatcaaacccatgtctcttgtgtctcctgcattggtagtcagattcttacccagtagcaggtactaaattaatccaatagataaaatgaaaagatactactttcataattttcagttactattgtcatttaatcattcagttgtgttgaactgtttgagatcccatggactgcaggatgccaggcttccctgtccttcactatcttttgcagtttgctcaaattcatgtccgttgagtctatgatgccatccaaccatctcattactctgtcacccacttctcctcctgccctcaa

SEQ ID NO: 29560 - DNA, 1009 bp, Bovine  19866881167306
  misc_feature (1)..(1): n is a, c, g, or t
nctcctcagtccatgggattttccaggcaagagtactggagtggggtgccattgccttctctgtctttcttcactagtaattaataaaatttgatgggagtatcacagttaattctgtttgaaaaatatggcttagaaaacgatcgtgaaatgttatttctagtctctcctccccaccagctagccctcattcttgccttattgtcagtctatgttttagcactgtttaccccaaggaaaatttggttttctccaagtcattgtcttttcctggtattgggctgagaggaaagagacttaatccccactgcctatgacctattaatagattactgttataaaaactaaagcaatggtcatcactcatgaaattagcagctcacatcctcctgggatgcatgagtaagagatgggcaagaggccaagagcattactctaggaaggcccacacagaacaggagaaatgaagaactggcatttagttctcataaataagtatttgactattaactccagagatctaccattttatcaaaaatcttcaatttataaggcatatcaggatattattatgaacatgtccactatagctcatagttgcagaacaagcgctattcatttgtcttcgggagaggcggcatgctttctaacctgttgacatctgtctgcggaagtggtgaaaagaactgagcaagagcagggaagctagaattgtttagtgtggagaatagcaggctggaaaaaaattgtataatgatggctctttgcaagaaccttaagagctatcatatgaaagaggcacttaatttattgtgtgtaactagaaaaggcagaaataagggcaacatgatagaaggttcagggaagtaggcttaaattcgctaaaggattattttttaataggaactgaaaaaatgaaaagggcacacttgcaaaatatgcatcttgtatcatttgtatgtgggcagagactgggtaaatcaggaaagctagagggagaagatatggt

SEQ ID NO: 29561 - DNA, 489 bp, Bovine  19866881223125
  misc_feature (1)..(1): n is a, c, g, or t
ntattccataccctaccccataaacaggtttgttatctaagtctgtgaatctgttttataaataagttcatttgtaaaaagatagatttttaatataactgatagtgaaagcaagtaaaataggcatatgagcaaaatcaaagagacttcttggtttttatatttctttcaaaatgggcaaattcaaaatggataaaacctaacccaaggacattgtagtgaacagttgacagacaacaggattcagaggaaagaagataattaacagggaggttttaatggtcaagggaagcctttgaaaggtccagaacatgagatacaacaggaagatcctaaagtttctgtgggtggcaagagatgactgatcaatgacatgacgatcccaaaatgagtttttccttctctaccatttattctcaggcagtctctaacctctgtgtgcattaatctgctttgacaaagcaaaaagaaaataaatccgatgatgca

SEQ ID NO: 29562 - DNA, 1147 bp, Bovine  19866881251742
  misc_feature (1)..(1): n is a, c, g, or t
naataggctgaaatttggatatgctactgcttccaaggacaaagaagtaaccatctgtaacacacaactttatttagcaatgaagaacttgctcctaagaggaaaacacctcttgagctaaagcaaatagacccctccactagaagaggggatttggcctctcacttgactccccagaagtggatttcacaagtctacacgcaacccagaattgagccacattatctactcacaataaaaaaatgtgggccttaagtacccaatttttatttcttcatgttgcctgatagagctcctattgatgagccaaataattgaggaaaatgtggatgacctatggctgcttccttgtcacaaaaaaaaaaaaagaaaaagaaaagaaacggtctccaattatacacattagccttaattttggcctttggatgatcagataatgtttctacccatgaaatgaattcttgtggtgagcccgtgcttttcagtgtcaaaaataaaagcttccaattaactgtcaaaagcttttccagcatctggagacaggagtaaattggagtcttttatattggtagctttttgacattatattaaacagtcttctagggttgtcacagtccattctcctttgtatctatccccattggtttgtgtttaccaattgttttattaagcaatctaattttttagctcaatttctacatttcttacactggggtgaaatcaagggacacttctgctactgtgtaatctttgcatcctgttttcaagagaataaggctgtggctatctcttggagtgcatggtgattttttctttttctccccttaaaagtcactcctacaggggttatgtgcagcagtggcaaccctagagggtgctatgtagacaactaatcggatattgtaggttggtgtaatcttttccacaagaaaaggtaaatatcagagctattgatccatgcttatgcacttctcttcaactctaagagattttctttttaaaatagaaaatgctgcgtggaaacattttccatttctgcatactttctctacactcaaggattttctttgttttacattttgaaaaggtaatcaagtcatataagtgagctaaggattttcttttgctcttaactctaaaacttaag

SEQ ID NO: 29563 - DNA, 805 bp, Bovine  19866881281118
  misc_feature (1)..(1): n is a, c, g, or t
ntttatcatgtatacattaaaaattttagtacttaaatcctatctttggctacatcttcaaaatccttactttggctacattttcctttttaaataaataatgaattctacaccattttattcaaatttagattatattaagaaatttttaaactcctgctcccggtatactcttgtcttattattcaatatataaaaatctatcactttcaacactgaaagtgttgagtttccaacactggaaactcagattccatatcagccctttagggctatcattaaaccagcaaaacactcattaatctctacctggattaagaccagcatctatagaattcttgataaaatgaccccctcttatcagttctctgatacaacttgataccatatagattgccccaaatgtctcagataaataaagaagacatagtatctttctacagaaattaacatccaattgctcagaacttcctgccaatgttaaacttgatagaaatttatttatttaaataatcctagaattctgcatgaaatcactaacttccaagtgaccaatttattttcaaaacagtgaaaggagatgttcagtttaatcgagaagattaaacagcaaattttaaataaaataaaatgccaaattgagtttgctctttctcaaattactcacttaaataattttagtgaatgtaggcaacttaaaaatgtatatacctcattgtttctcaaatctgagcatgcttaagaatcaccaggagaatttgtaaaaatacagattcctacattcctcccacagagattctaaacg

SEQ ID NO: 29564 - DNA, 1319 bp, Bovine  19866881310142
  misc_feature (1)..(1): n is a, c, g, or t
nttgtcactaccgttttttccccccatactgctctcattcttggcccacgtaggaaatcagaagataatttaaaattcaatgatgagggctcggagcttaacacatttagaagaagagaggaaagaaaagtgtcacatctggacaggactgggagtgatgttggaaagctcgccaaggaggcccggaaggactgttggcaggtggcctcatggtgctctgtgtgaccacagcagacccccaagacgttatcttttctcaggccatgggatcgtgactgaagtcatgggagcataggagagaagttgagagagattttatgttaggaaaattaggttgaatctttgatttactaattactattttgtaatagtaatccttctaaggatttcttcaatccttctaagcatttctctctgtacgtataacagtatcctcatagaatatgagaagtaaattatttatatgtacaaacacacatatgcatatatataattcttagcatataaaaagttctttataagtaataatggtatagattattcttataataggatacaaaggcaaaggcagctctttgtttatctttgctttcacttgcccctatgtggtgacacacaaatcagtgaaaacggccttctattttccttcaagattctcggttagaagtaaaaagaacataggtgtcagaatctcacaaatcagaattaaaatttgtattctgccacttatgaactatggaacctggggagttatagaacctgggacgtgttaccttgttggtttcagagttcacatctgataatgtcattacttattgtttcacaacatgactgggaaatttaatgaagggaaaagtatgtaatactgctgagtccattgcctggtatataacatatacgaaatcagaggttggcagagatcttctttcaagggccagattgttaatattttaggctttttggcccaactgctcaagttagtcatcattgcatgaaaacatccagggtcagtgagtgtggaagggaataaggatagctgttttccaataaaactttatttaaaaagacaagtgggccagctttggcctctgatctgtactttgctaatcctagctcctaaccaatattagtttcttcctcttctccaatctgtcatctttgaaatttagcttttttttttttcaggtatataatgttgaaaaagcatctacctaaagtttagtttatttattgaatatctgttgtgtgcaaaggactgagttaagtggaatgaagagcagtgtgaatataattttcttctacttttagaggtctaaagg

SEQ ID NO: 29565 - DNA, 1285 bp, Bovine  19866881390934
  misc_feature (1)..(1): n is a, c, g, or t
nattctataaatataaaaatactgcagaaaggttatctaatagcgagaaggatatagaagatccaagaagggtccaaaatcataaatttaagactactgggttcaatccctgggttgggatgatcccctggagaagggaaaggctacccactccagtattctggcctggagaattccatggactgtctagtccatggggccataaagggtcagacacgactaagcgaatttcacttttacataataaatcatggaaataagtaagaatgtgtgtattgataccttcaattggttacattcaaagaggtttctaggtagaaatcaacaaatgactcttaaatgtctgaaaaaacaattattagatgacatgatgaaacagaacctcaataacttaccaaaatattcttagtaatatttgccatcttcatatacttagaaagaacaaatttgatattattattggaagtgattgatagagctatagttttctgcttattgaaaagcactttggtgtttttggtattttgcataaaaattaaagagaatacttagagcaaatgtaataaataagaaatggataaacttttcctagttattcaagatattttcacaggcactagttgtaaccagaagacaaagtgggaactatgatactttgatattgctatagaaatctttacttctatacccttattgttgttcagtccagcgctttatgactccaagtactgcagaacaccaggctccgttgtcctccgctatctcctggaatttgctcaaattcatttctattgagttagtgatgctatctaaccatttcattctctgtcgcccctcttctctttttgccttcaatctttctcagcatcagtcttttcctatttcttcttatcaggtggcaaaagtcttggggctttggcttcagcatcagtccttccaagattattcagggttgatttcctttagaattgactgatctccttgcagtccaaggaactttcaagagtgctctctggcaccacaattcaaaagcatcagttcttccatgctcagccttctttatggtccaagtctcacatacaaacacgactactggaaaaaccatagctttgactatatggacctttgttggcaaagtgatgtctctgcttttcaatgtgctgtctaggtttgctatagctttccttccaaggagcaacaatcttttaattgcatggctttgttcaccgtccacagtgattttagagcccaagaaaataaagtctgtcattgtttcatgtttttc

SEQ ID NO: 29566 - DNA, 1365 bp, Bovine  19866881527957
  misc_feature (1)..(1): n is a, c, g, or t
nctatgacacttagcactggcatgaagtcagtttttaataaatgtgtctcagactggaatgctcttcccttggagatgcactccttcacttccttcatgtttctgctttaaatatcatcagagaaggctttcctgtaagtggcatcacctgctttaccacctcaacattatgccgtacgtcatttgatttttcttcatagcacttctcatgatctgacatctttttatttttttattttgtatctttctggacttaaaccttggtctgtttttttcatgtccacattcctaatgcctgggatagtaccaggtatataacataataaatattggctgaataaatgaattgctgaagcagtgaaggaatggatgaataagtttctttttccttcattgcctcttttggcaaatgggagtgatgcagctgtcctcatctgctgataggactaaataagaatgtgcatgggtggcacttaatatagtgctgtgagcttggtgatatttgatcaatgtttctttgataaacctgaatctaaccgaatgtgaaaagaaaatggaaattcatatgagggtactggggggctaatgataacttttgtgccagagttttccagtaccacaaagagaatgctaggtatcatgatgccatttattgagtagtaattttataaacagaatactaatgaaacaagagtcacacgccttctctgaaatagagtgtatgtttaatcagagactgagataatggttttttatcctacagttcatcctcttataggacagtttcatgagacgaccttaggtatttagacactagcatccgagcttgaattctggctctgccatttagtgaaagtaggtgatttcagagaagtcacttaccctctttttgagccttagcttcttcattggtaggagagtgttgttataaatagccgtgtctcagatttgacgtaagaattgcgtgtgctcattttatacaacagtgagtgttgctgctgctcttactactgctattaccatgatcgccaccgccactgctaccaacgctaccatgactactgagcagcatccaccaggaatttccaagccgagctgtaagggaaaaatgttacccactatttatatctctcataaacttttatcaggtctcaaagtccaaagggaagctggaaccaagaccagttgcagtcactgatcgtatatactgacagaacctggaggctgctattgccagcggtaagccgcccttcagggcctgtaactctgatctccatgcccccttaggactctgctgctttctcagggaggtcccagcacagtctgactgtcttttggaccatgccccttagcgagcaagaaggt

SEQ ID NO: 29567 - DNA, 1457 bp, Bovine  19866881553425
  misc_feature (1)..(1): n is a, c, g, or t
ntttagtattccctgcaatgagtacaatcttacggataaacagcaataccacctcctgcctatactgtttggctaacttgtccccttccctttgttgataatacaattgctgtttctcttctccttatcatttgcctaggcaactgcaatgttctattaactaatccagatccccaagtcctttcctcatagtgatgattcaaatcctgtctgaagtgttttcacttgttatacttttgataataccaacatgactgaggcattcaaaaaagagtagttgctttatttttgcatctttattttaaatagagtaaatatgtgttttgggcagcgggagaggcgtgctgggggtatggtatggaaagcatcattgaaagcagcaaaattccagaagaaacaaaatagcattaagaaaacacctttaaaaacattttttttttttattgccctgaaaatttggagaagaaagcatcacttatcttttactataactgatataattgtgcagtcacatttgggaatagatcttaattgatagctgtatggaaggtggtaaaagctccatatttaagataaacccattttgtcattttagtttgtagcattgtatatgtttcatgacagtgggtgatatttagttttctccatcttagaagatttgaagatgtttttggcttaagcataaattcaatttgcatcttattaaatagtaaacaaaaaaaatctgctaatatgtatattatggggatcttttcatgtgctttcaatgtacaactagcttctgtcatacacagatagcaattatctgctaatttatgcagtttaaaactcatttggaaattaaaatgaccccataacacacatctcaatgttattcatggtggtcactttgtgagagtgaagataaataatattttataaatttcttagcattctcctttctaggtcagatctctttaaaacaattatgtgactttcttttaaacaaactatttctactattacacttaatagtagaatttaatacttaatattcaattttattttttaatgaaaacatctatttctttaaaacattcacataattttccataatgattccaaaatacaaataatgctagtattttatgactaaagattggattcatgattttggaaaattctgaatataattttagaatcaatgaaataggatattaaaaagcatgactaagaaaattcaagatgcatgtttcattgcttgatacaaatctacaaatgcacttctaatttctgtttcttaaattttcagagtaagcaagtttttttcataatatatgttacttcatcatatgttacagatctgctaatattaaccaatataagagtttcaaataataatattaaattttatttacaaacagaatcacctgtgtatatatatatagcactgcataataatattatattcattatta

SEQ ID NO: 29568 - DNA, 2137 bp, Bovine  19866881609897
  misc_feature (1)..(1): n is a, c, g, or t
ntcaaaacggaagggcagtttacagaatttccagaagagatttttagatttttaccatagactcagtcttctccctttagccaaaataattaaagcaagcagtccccaaccctacaaacagtatttcttccttcacaaagataacacaggagcaaagtctgcaactgaacaatacagctgtagtttcctgtgtctatactctatatgccaacactttatatatattaataacacacatatatatgttatgcaacatacatacacatatacagttgacacccgaaccacccaagtctgaactgcatgggtccacttacaaagattcttttttcactaaatttgaacaaacagtactaactgaggatggttgaatctgtgggcacagaattgcacatcaagagggcagactgtaaagttacaggaagacttttgaccgcatggggattaccatcctcagccctccatgttcttcaagggtcaaatgtatgtgggtgtatatatacatatgtttatgtatatgacttcacccttgtaacaaccctagagatacctgttatgtctattttgcaggagaaaagatctgaagggcttaaaggacctgaatcattaacccgaagtcacacagctcttaagtgtcagaccctacatgatatccagagttggactccagagcctgggttcttagccactaaaccatcctgccatcctcaagcctaggcagtattcagagattgcacaaaagctggctacaagtatctctggtcgactcagggatctgaataatatatcatgaataatatatcagaacggtattaattccaagtgattttggaaattagcttggagaacaaaatgagctctgaatgtgcttaactctgcaaagttgattttggtttggtttggttggttgttgtctgagcctagtgtgtatccaactatttttcagatttttagtaattatgaaaaaacatacacttcctagggtttttttcataggcaatactatttcactcctatctatttttccactcaacagagagcaggtgcaacaatcctcagtacattctgaactccaaaagaccaagatttggggctatggcagcctggcctcccaaacatgcagccaggtcggggtcagcctctcggcagcactgctgtggtctccatacctcagccgcaaacacttgacccagtcaaatatcttccacatgcccaggggctgacctgtcagcttgaactccatgagcaaaaaagcataaaaacacaggatgaatatggaagggagacccaggtggcagattccacatgttatttttagtcagaccgccaaaatcttttcacccttataaatagaacgtatctggactcagccttattcctttggagaagctgattaaataagaaaggagttttgctgctaataggcaatgcccaacaaaacgaggctctcgtggctcatctcaaaaggaaaagctacaagaaagccctgaatttgcaaagaagtgaacctcataaattgtgtacaaaaaggttttgaagattcagatgaaaagctcagttccaacatgaccatctgttatttccccctaaaagaagagagctagtagtttataaaagcaataaaacccttccagagctcaaaagcaagagcaaggacttgcagttacaaaccagggaacatacagactgataggcagctgagcacgcttctcctacccctcacctcctggccaaacagaaacacagatttttctaataactgacatctgatctactctttttttcctccctcaataaggttaggagtggtcaaacttactttcccccttttttattctatgttcatcacttcttaaattttttatcttttctgcacacatgtatcttctttgaccccttcctcatcagtatgtccctgtccctttcaattctcatctagttctcttagaagattctctaagtggtaaaccatgaatggaatcaaaccctgactggttggaaggaaacattaataatatacaggcatttggcttcagcagtaaagaatcctcctgccaatgcagaacaggcagggttcgatccctgggttggggaagatcatctggagaagggaatagcaacctactccatattcttg

SEQ ID NO: 29569 - DNA, 821 bp, Bovine  19866881642686
  misc_feature (1)..(1): n is a, c, g, or t
nccatgagcaagtcattccatcttctttcacagagataaatgtcataatagatcagtgctctgcctctattttatatatttaatgtatattttttcctcctctattctttggggttgaaattactttagagaatagttggagaaaattgagagtgttttggaatatgtaggaataacaggttcagactgtactgaaacctttaataacttgtgaattatgtcatctgtgaaataacaatagatgacaaactcagctatgaggagaagaaatgtatccttttctttaaaaaagaaaaaggacagtttcattctggaatcacatcagctttagaatttcaacaatctttgtgtagttttggtgccccataaagtatgtcataagtataataaagatatcatcattcatacagtctggggttcaagacccagtttctgaagtgttaaattttggtggtatatggcaacccacttcagtattcttgcctggagaatcccatggacaggggagcctcgtggactgcagtccatggggtcgcaaagagttggacacgactgagcaactaaaacaacaaccacatgttaggaaggaatttagattgtctatacctagattgttttactaatttactaattgattatctctgccatatgtgaactagattttctgataaagaggtttcttattagaaattcatcaggtaatattacaaatactacccacttgatattatttcctgtcacttgattgataaacatctcatacttgaaatctccaaaacagatctatttacaatccaaatcagctggcagcagaattcagg

SEQ ID NO: 29570 - DNA, 1218 bp, Bovine  19866881772837
  misc_feature (1)..(1): n is a, c, g, or t
nattttaatagttgaacaagcactggcatgtccgtagcccctcacaagatgtagtcttctagatagcctgtgctatacttattttagtcatgcatgatttttcaaccccctctgtcattaaattagaatatgattacctcccacagccaaaatagctccctttggtactaagtaatataatttatttcataaataggatcaaaacacctttattagatggtggtgactggggaaaaacagcattttattaacattttagtattgactctattttattatgtttaatcagagtgggattttgacagctactgggagatgtattctaaactttcatctgtgcttcagctaccttacttgaaagatgcttgttttctcttttaacacagaaaccagactgttggtgacagattcttttcaaaaccacaagggctgcatgttgagtttgtctgggatctgggtccctatggctttctttctcttggtaggttcacgtgaacagggtcacagagagcatgatgtgcggagctctggggagaggacccctgaagatacttctccccacttcccttcttcccgttcttttctgttttccacaaatatttatttaacacctgagtatccagcagtcaacaaaacagacatcttcccttgtgggtctggaatataggagatagacaataaaaataaagacacaggggctgtgccgtggggcgcgtccctcgttcagcccaggtgttctggatccggtttctgggtgagtgctgcgtgaggcaccacctacagctttccccgcgtggtggccggcagccatgtttagttgttctgtcacagttttccctggggatgacaaaaatagaatatcacttcatttctagttgacggcatactgtgaaacctagaggagacattaaaggtcattaaaaaaaacccaaaaagaaccactgccactatccagaaagatgatcttggccatgttattgggcttctgcatctcagttttttctactgtaaaatgatgacagtacctgcctccacgggttgtcatgagggttaaataagtagttatttttgatagacttccagtaatgctgctagcatgcagtaggtaacatccacacggtagtgttttggtctcatctccagtacgaagcttgagctttttgtctctgttgggtggtggccggtttctgctaaacagctctgctataaagtcagggc

SEQ ID NO: 29571 - DNA, 1820 bp, Bovine  19866880220533
  misc_feature (1)..(1): n is a, c, g, or t
ntactggagtttcagctttagcatcattccttccaaagaaatcccagggctgatctccttcagaatggactggttggatctccttgcagtccaagggactctcatgagtcttctcccaacactacagttcaaaagcatcaattctttggcgctcagctttcttcacagtccaactgtcacatcccaacatgaccacaggaaaaaccatagccttgactagacgaacctttgttggcaaagtaatgtctctgcttttgaatatgctatctaggttggtcataactttccttccaaggagtaagcgtcttttaatttcatggctgcagtcaccatctgcagtgattttggagcccagaaaaataaggtctgacactgtttccactgtttccccatctatttcccatgaagtgatgggactggatgccatgatcttcgttttctgaatgttgagctttaagccaactttttcactctcctctttcactttcatcaagaggctttttagttcctcttcatctataagattaaaaaaaaaaaaaaaaaaaaaacaagcacagttctctctgtgctagacttttcatatggtgaatagaatggaaattttcacaaaatttattcaaattatcatttgaattattttaaaaaatatatgtttatacatatatcgatatacacacatatgtgtacatatttttgccttatttgcctaaaatattgttttgagatcaacacgcttactttttctcaatttctaaatttttctaaattcttcataaaactttaaaaaataaactgtttaaccctgtttcagttttccctaacatgttgtttctctgcaagccatagaatatttcaattaaacttctgttccactgatacatactctattgtaattgatatttctttaaaagtgccttacattttttcctctaacatgttctaagcatctaaaggcactgtactttattttcctagctttgtacatatccttaacatctctggagatatttgccactaaagcaagtgagtgtttatatactgtttgtttattcatgacaactcctaaatgtttggaaagtaataaaaaatgtcaatagtcctatggtcattgaaatgctcccctaatttcaacttcagttttatttatattctcaacattttatgaacactcacagcaactgaaacatcatctcctttaaaaataacctgggaacactgttgtcacaaccactgttctttaaacagcaggtatatcagtgagacagtggtcctctggctagcaccaattcagaattacagacattcctatatccatgtcatctttcttcctccctaaaatacaatcatgcacacatatacagatgcactccatgttttcattattattccatgacacatattccttttctatatgttttcatatatcagctttgtaaatatacctcagaggcaatcaattcaagatcatgtcaaaataaaagttattttaataatggcttgttgtgaaagaagtggatagattaatcaactagtcttttctcattgttgtcttagcaaagttcttcaattatacaatcactgatattagtttcctgaggctgtataaacaaatcactacagtcttggcttaaaacaacagaaattcaccttctcaaagttctggagaggcctgaagtctgaattaatgtgtcaacagtgttgtcctttctctaaagactctagcgaagaatgtgttatttgtcttcagcttttaatggccattggcattcactgacttgtggccattactctgcctccatagtcactttacggccttctct

SEQ ID NO: 29572 - DNA, 1625 bp, Bovine  19866880413136
  misc_feature (1)..(1): n is a, c, g, or t
nttagttaaacatttaaaaaaaaaattcttcatgcacaattaattagaaggaaatttataacaataagaaattgtcaaactccttaggggtagaggttggcagagaaacggtagtgaagacctcaaaactgcttttgaatgtacacgcactaagtttttattagtcattttattctgatagctatccaggaggttcaaatgcctaaccactggagaccatcataaatacgcaagacagcaaaattttcacataatgagcataaatatcctttcaagaaaaaaaatcataatctagctcgctgtaatcaagtcggtattgttgcatgaagaatgctaagcagctgagtataggaaaatgttgttgaaagaaaaccagagagaaattactttgaaatgtttttcaaaaaatattttaatcccttgttattcagctaaaagtaattatgatataatttataatgagaacagagtctgtattcttactaataaaattctgaaataaattttaaaataactagaaatgtatcttctttatagtcaatgttttataggatttttgtttgtcttagaatgtatttataaatctgaacttccaaaagtattaattagtgggtatttttaaaatttagaatttttaatattaatttatgattagtataaaattaaacatatttaatctgaagtaggctttttttcctaaaataaataagcattgtgatcatatttcctattttaaaatatctagttgcatatgttttcaggaacaccagaaacaatctgaatagcacttgaaaatgagaaatgatgctatcaggttcctagatacattttatagaattttatttgtaaacctggccatttagatattgtaaaaatatccttcccatagtaaaatcctctttggacttattttcttttatataaatcaaaatttgaattctataatatttagatatatattaacataagcttttttagataagattgaggcctttttaaataaaggaataaacagaaagctttaggttttgtaccttaaaaaatgaaagtgaaagtcgctcagtaatgtctgactctttgtgactccatggactatacaatcattgggattctccagccagtatactggagtgggtagctgttactttctccaagggatctttccaatccagggattgaaaccagatttcctgcattgtgggaaaattctttaccaactgagccaccaggcaagcccaagaatactggagtgggtagcctatcccttctccagtggatcttcctgacccaagaatcaaacctggatctcctgcattgcaggtggattctttaccagctgagctaccaaggattacatccctattcttcttgtcaagtacctttcaaagaaacagtatcactaacatttatcctgtttagttgataagttaaatgagacacatggatattttattttgtcatacatatttaataattcagaatatttgagtttaggtatccacctatattcaataaagtaaataagaacaaaatttaagatacaacagagtcaaatcagatgttttctttagaggagacattggtaaggcttattcaaatatgccataatgtaacttcttatagta

SEQ ID NO: 29573 - DNA, 1161 bp, Bovine  19866880616270
  misc_feature (1)..(1): n is a, c, g, or t
nctaaagagaatctaatctttaacttgttaccaggtgaatttactgagcatgcctatgtagaattcaaatacgaccagagagaagggaaattatctgaggtgggcttgaaggtaaacagctgttggtgaaactatgaatcatctcaaaggaacattagctgaactcattttaaaaaagaaaattgtttttcatgttcaaaggaataacctcaaggactctgcactcattcttaatttgctatttaacttatagcttccttggggaagcaatatgatagactatttttgtttatttatttatttattaatctatttatttatttttaaataagttttctattttatggatacccaaatgaatttggagaggaaaactgaaatgtccttccacctagaaaggtagaaaaacatccatactcctgtgactaaatactgacctaggtttaatggcttaaaactgttctgctgattatgttttgtttattcttatttttcaaagtgaaatattccaggaaatttaggctactatacatgacacattattttatactttaaaaatcaatattattttatattttaaaagtcagttgtgtctgtgttaatgtaaacaatgaattatgcttctcttttgttctttctttgaatccacggagagtgagacagtctgattcactcaggtggacagttcaaattaaaaatgcttttctaacattgtgtcttatacttttaaaatacaatttggttaaacaaatggcaggaggaagtttattcagataagctgtaacaaaaataaaacaacatcaaacggttaatgcagctgcggaaatttaagactccaatgggttacacatttatactagatgcatttaagcatgtgtgtttgttattgctactttaaaatattccaaattaaattgaattagaatcaaacactatgacattgaagcatttctgaggaaacctaaatttctacaaaacacatttgcaaaatgctgccttaaatattgaagagctgtgaacataggttaattagataattaatttatcaaaggcaatgtgaaattataccaaaacatagtttaatcttttttaaaaaatgatatgtcaagagcaacatgatttcataatttcagttcagttcagtcgctcagttatgtccga

SEQ ID NO: 29574 - DNA, 2368 bp, Bovine  19866880824388
  misc_feature (1)..(1): n is a, c, g, or t
nttccaaagttaatctataaaatctttccctaaattaaactttattggtataatatttcaaataccccctttatccaaaattttgaattctaaaactttctgaaaaaaaaaaaaaaagacttatttttcttctttttttctgatatatcaggcagggagtagaaggccctttcctgaatttaatttggtggcaaaatgcaatcagaagggttttgaggctttaatgtttaagttcattaaaactatgaatctttagttcatagttttaatgtgaacatgtatattttactgatatttactttgtttacagggtattagacacaatgccctagatttgctgggtaacaagcttcaaaacgaccacaaatatattgaccagtatgtatatatggaggatgacatattcaccagataactggagggatttgaaatattcatatcacatttgacaaaaggatgaataacttcaaatacagaaattatgtaaacatgtagtctagaattaactacagataatagacatcttatagaagaatgagaattaataaacatttatttgcttaaaacttattatgctaatagtttatttattcttagttttttgaagtctgaatatgtctgctaaaggaagaatagatgttttgtttagacttgaaccaaaagtgttggtgacacatttatactcctttattcatcttaatgatttcaaagaaaatttaaaagttaatatcaatattcaaaagtttaactctctggttatcaccttaccatttttctgttcatgtgtatgtatctctttctgtgtacatgaagttaggaatacatatgtttgtgtatgtgtgtatatatgtctgtgtgtgtgaaagtattagtcagtcttgtccaactttttgtgaacacatggactgtagaccccaggctcctctgtccatgggacttcccagatgagaataatggagtgggttgccatttccttctccaggggatcttcctgacccagggatcaaacgtgggtctcctccattgcaggtagattctttgctgtttgagtcatctctgaatatataataaacatattagaaacataagcatagagaaaataatttaaatgtgatgagctattactagttcagtataattaagctataaaatataatttatttcacagcctattgatttttagggctgaattttatgaatgttcttcttgaatatgataaaatgaaaaggggaaggaaacccctatatatcagtaaacatcttttttctgccacagcttgtatgtaacaataagctcactgaagttttcattagttttaggctttgtgacaatataatgcaatttcatttaacagaaattgtttctgaattatttcatatgattgaattatatggaaaaacaacacattaagaaactcctattaattgatgtattatcactaattagattatattaggtaaaaataaaattaatatcaatgtattttgatagctcagatcatatttgttacataaaattatatagtctaaccagtaagagttaatattttttttcatattgctccatttctcaaatatgtagaaatatgaactgattgaatcaagttgaaaaaaacagaggttgaagaaggacaagtacttaacttttaatatttgggtaaccttcagtgaatggtatgtcaaaatttcttatatatttgctccttctgaatctaaaattatataaaattaaatagataacataattttctgctgaattccattcacagtggctagccttcctatatagttggtaatcttgctttatgaagtaatatatcaattttctttatggaaccccagcatgtctattttagaatatgatttattcatagagaatttatctatttcttctgctgctgaggctgctggcaggtggaaggaggttcctgcttttgctctcagttgggatgactcactttggcttccctggtggctcagatggtaaagaaccggccctgcaatgcaggagaccaggattcaatccctgggtcaggaagaccccttgcagaagggaatggcaacccattccagtattcttgcctggagaattcaatggacagaggagcctggtgggctattgtctatggggtcacaaagagtcagacgtgactgagcaacaaacatacacattccacaggatgatgactcagaggcctggctagagctacgaaactctgttgacttcttgcctcatgctcagatttttattgcttgttgtttgtttgtttatctgggagatggggaggaaagttcactggcagtctcctttcattgagaccagcaacccttcagagcatatcttatatgtagacacatcttggagaag

SEQ ID NO: 29575 - DNA, 3503 bp, Bovine  19866881006948
  misc_feature (1)..(1): n is a, c, g, or t
ntttttatgatatctcaattagttttacttttgttttattacctggtgattttaactgaacttctctaaaagagtggtttgtacaatactccatggtatttactctgctgctaatggaatataatactcaaggccagaaaattgatgtggaattgaaaactccagctagattcttaaatttaatatttactcaaatctcaaaatgtatattaacttgagcaagtacttaataggttattcaataacagataagctgattgagttattgaaataaatctatcactctaggagtttgaaagtattttaacaataaactgtacagacttttcatttctaatataagtatattggtatccagtaccctcacagttataatgaaataatagaaataaggttgccataatacatatattgtgacagtcaaatgaaattcctatattcatactcactcttgaaacagactattgtagcaactctctattcgtattcatttatttgtaatcatgtcccaaagcatggtagctgaaaatgatcatgtatacagttgactttaagaatgttagaattatgaaatattgattaattttaaaaggaccacgttgaccctattttagacatattgttcacatatatacatttggaaatatcattgatactgtacagttcaaggcaccatctgttctataagctcatagattttcatcttacaaaccaacaccaattgctttaaattggtaccaaaaatcaatttaaattgtttttaatattttgcctgtaagaaatattaaatacagaaaacataaatgcagtattaaaatcaccaagaacagatataaattctccaagctttatagttgcctgctagtgtaagtgacattatacagataatatctcgcagagcagcaaacatattagtatgtgtaatgaggggtgacagaggatgagacgatgggatggtatcattgacacaatagacatgaatttgagtaaactcagagataatgcagaacactgaagcctggcatgctgcagtttatggggtctcaaagagttgggcatgacttagggactgatcaaccacaatgaaagtacattattgattttcagtgtttatcttcatttgacagaaatgtatgttaaaaaaaaagccatgaaaaaaaagaaaaaaataaacattgggtcttatttgcagttttcgtttatatcctcaagtaaattgtcagaattgttcatggtagtttcaagttaaagtattttttgaaaaactttctgaaagcagtagcatgttctgattggatcacaaaattccactcctttaagtagactagcctcattcctcaagaagttatattatgagctttgtgatcattcaaacttagaaaagatgtgtgatagcaagtcactgtctgctgatatatagataaataaaagatgcgtaaataattgaagagtttgggacagctgggtgtctgtagcaattgaagcagagaaagtcacactgtgaagctttgaactaaatcatcttgttcacataaactgatggggtaattgagagaacaaaaaagggacaatacatatattacaggaaatgcttgtctctgacatatgactcactatgctatgctatgctaagtcacttcagtggtgtccgactctgtgcgaccccatagacggcagcccaccaggctcccccgtccctgggattctccaggcaagaacactggaagtgggctgccatttccttctccaatgcatgaaagtgaaaatgaaagtgaagtcgctcagtcgtgtccaactcttagcgaccccatggattgcagcttaacaggcccctccatccatgggattttccaagcaagagtactggagtggggtaccattgccttcactaagtaggaatttattattaatacttatattatttatgtggattgtttttaagttccttataagtctaccacaaacaatttagaaaaattcacagtatgcctggagagggaatagcactatcatacccatcattttgggcttccctggtagctcagctggtaaagaatctgcctgcaatgcaggagacccaagtttgattcctgggtcaggaagatcccctggagaagtgataggctacccactacagtattcttgggcttacctggtggctcagctggtaaagaatccgcctgcaatgcaggagacctgggttcaatccctgggtcaagaacatcccctggagaagggaatggctacccactacagtagtctggcctggagaatttccatgaactatccatggagttgcaaagagtcaaacatgactgagtgactttcacttcacattcacacatcattttaaaagcctttgactgttgttaagtattaagttttctgatactcttttttgtacatcttttctccacagaaagaggaaataggaatagaaatttaaatcatttgtccttcagtcatataataatattgtgattctcattctgcaatagacttaatagggtatcactgagggagaatgcttctgattagtcatattccattatttcagacattcattttctttcacctcacaaaaatcatatcataaatgcatttttaatgtacctgtaaaaattgaattatttatccagtgctttgtatcattctgataaattagatcatcaagaaataatttttatttccaaggcaggaagtcatatgaagaacaattccaggactcaaaaagtctgtgtatacctatgtctgtataagttaggtagcatgcaaaatatgcttataagcttttaaattatttacatatgttgtgtccatatttgtgtttgagtctcattctcatatatatatattatattttcttgtatatatgcatgcacacattatatattaatatatgtattcttaaatgtatacatgaatgtatagatttattatattcctcaaaagaatcactccaagtatcaaagattcctatgaattttcattaataactgatactaaattttaaagaatatattgcatgcatgatttatcaaatacaatataaaatatcatagaaattgctctttagaatatattttatgataaaaaccacataaaattaaactgtaaatgataatagaggcaatgggcatattgatgttcattataaaattacattacctactttgagtgtctgcaaatctttataatgaaatgttttgaaagaagtacaataaaaataagtgtatagtatggtgcatttttacaaaatattgcactattataaccagctcccaaatcaggacataaaacatcaccagaatcaaataaaagccccctctattcactttaagtaactgatttcctcagtctcaacttcttattacaaaaccagttttttcggtctaaattttatatagatagacttgcacatattttactctttgaagtttatctcaatattatatttgtgaggaccatacctattacattctcctgttagtgaatttttttct

SEQ ID NO: 29576 - DNA, 925 bp, Bovine  19866881055022
  misc_feature (1)..(1): n is a, c, g, or t
nacctttgatttttagatatatataccacctagtaagtttcatgtactaaacaataaaaagtaattatatcctgattctatttattttttaaataaattacaaaattaagaaaatatacatcactgcacagtgtggcataagaaaaataggtacatatgtaggcaatgcctaaaaatatgcttctattccacaatatgataaaacaatacattaatttatattactaagactaagatgatccaagaatggatcacagaaaattattaagtgaacaaaaacaaaataatatttgaatattacagtatatatattatcaatgataatggcttttaaaatgttttcaataatttgtgttttagttaacataattttacattgaactgttacttaaataattcaataatttatgtttttaagaacactacaaactgcattactttatcaatacatttattatgttgaatatcatcttacctgattactcttttaatatgtacacttttggtaattttcccttatgtatgtagtcttaacataaattatatttagctgtcttgaataaagaatactaatcccccaaatcccaatatataaaagacttctacgatatgaagttaaatttttttatcttagaatatataattttaaactatcctaatattgagctattgtggatatatttcaacagttattaacattcctctttcaggttcatatcaagtcatcaaaaatttgaagtactcctgaccttttcctgaatgtgtaaattagtaatctaatggcaatattcagacaggcaaatatagaccaagctccctttgatgaaaacaacatgaggtaaggcttccctactgagaatcatcttagtttgtgaaatagtaatttggaacggccctatctgctaagtatatgaaagaaagaaaa

SEQ ID NO: 29577 - DNA, 545 bp, Bovine  19866881328171
  misc_feature (1)..(1): n is a, c, g, or t
nattgaacactatatattttaaatctcaacatatgtattgaggttgtcctttatttgctctatgtgtttatcttaacttttactaagctattcaaataattacagtaaaaaacaatattgctatttaacacagttgacaggttcatctttggcacataaaaatgccatggctgtagttcaatattctgcaaattgtatgaatattgctcccacattactagaaggaacatgtctaaaattaaagctttgtataaggtattggaggataaaaacatttataaaaaactcaataattatcaaaatacaaaacaatcaatagaaataatacaatttttaaaacgatgagctttgtaaaagcatgatggagaaagatgggaaaagtttatctctagctaagtacaaattatagatgagtaagacaaatgtaagaacctaggaaatgatttccatagtttaatcacttgacttctatagctctgttgcaatatgaatgttgattactaagtccatatgggttataaaaagtatcactaaaaacccaattg

SEQ ID NO: 29578 - DNA, 835 bp, Bovine  19866881348553
  misc_feature (1)..(1): n is a, c, g, or t
nctagaaaattaagattaatgtattattttattatatatgttattactaatgcatatgaaactcatgatgatgagaagattaagtgaatatagaaagaaatctacaagatggaaataatttacttaactctttgacagaatattaaaaatgcatctcctaggtagatttattgaaagaaatataattactaattataacaggaaagattagaagatgagagcatagttaataattgcatacaaattgcttcactgcatttaggatttgcataaatgtttcttaagaaatcaccattatgctattgttcactgaaaatttcctatgtcttctttcttggccaaaaatgcaatatgttattttatagaaaactaatacctgagatttctgataatctccaactgaaggcaaaactttaattagagatatgtaggtatagtatcaaagtgcctggatttatagggctcagaagtctcagatctcagaggtattgtggattctaattgtctccttattgttcattcttcttaatatgctctctctacatctcttctccaatccttctcttctttatttttatccaggtttaaaatctttgtgggaaaaatcttatggtgaaatatgaaatgatactatggaatctgaaagtattaataagtaagactaaaaatgacctgatgcctgaaaactcggccttaattcttcactgaaaatgaatcacagtcagggatactatctcaaaaccttgtgatatttagcataaacaatcgttaaaaatgaatcacggatataaaaataagaaaatagtatatacttattttttcacaattaagtttg

SEQ ID NO: 29579 - DNA, 2412 bp, Bovine  19866881465092
  misc_feature (1)..(1): n is a, c, g, or t
ntttctcctgattatttgattttattcatagaaaatagagtttctgtgcactgttcatatacagtagtataatatagaatgctagtttaaatgctttaatgaaaaataaggatactctgccttcttttcttactgcttaaactgtctagtgaaattttatgtcttaatcacgttaggtctcacaggcacaataatatttgaatttcaccatttattagggaaagtggagcttcattttaagttgaattcccttcagaggcaaatgataggctatggttttgtatttgtaaaagcgtatgctgtttgagtgccaccactgttcatcattatgaatagggcatggttaagcagacaccctgtcacagctgaaatacatgatcatcctttttttttctttatgtacttctggatttgtgtttcatcgtatccaattactagattatatcttgccatagaatcattcaccattcttgtctttggttctttaggtgaggtgacaaccaaagacactgctattgtaaaagtcagtcatggaagaaagtgtagaaaagttcaataagatttttgaaataaaatgagatattcttgaaacttagtgaggcagaggttttttaaagccatttttttttttgccctttaaagtgttcacattgtgatttaaccacattattactaggcgagataggggaatctcatttgatacacttcattgtattttatattaaaattcagggattctgaggcttttaatgcatagaaatgtagcagaatttacatcttctactttagtaatcagccatgttattgtctgttaccctttgctgattccagtgtcagaaacaatacttctatctatgtttcaaactgaattcatatatgacctagggtacaaatgaaattttgcacaatcttactttagtcaggaataaaacaaaacccaaacaaaaaagcaattaactgaatataatttaataatatcagtaacttttctccacacaattttgacatcattatggcaaaataaaatatatttgaagtttatgtcaacctatatctcggtatatatcatctctttatatagaaacctatatgtattttattcctgaaaaaattaggataaaccttttatttttaaaaaaaatcactgtattttatagttaaaaatgttcatttcttggaacaaggtagaaacttttagatgtagttttttttaattgaatttgaataataaaaaccataaaatgacagtgtaggtccagaaagctgtacctgaaagtaaattcagttttgatttttcagaattaaagcatctctcagagtaggatgaagatcttcaaataggttctttgtggggaaatgggatataaacattgttaatttttatctcttttttacatttaaggaataaatattttaagcacaatgccacactttttatgtaatttagaaagttgatttgaaaattcttctgtaaaaatgtcattggcaaattgctttgaaaaaatggaaacagtgttgcatgcgctatttgataccaaaacactataaatcagtcagaattaacacacactgggattggtcaggaacacacaaacgcatggggaaacaaatagataacccagggatagactcaaagagcaaaactggcctacaagtatttaacagtttacggagaaagtgtacactttagtaaatacttgtaggctattttgatatctattttgggaaaaatcaaagtccttacctaacattatgttcaaactgaactaatgtcatttctcttgtaaatgtttaaaaacactttaaaataattatagaaaaaccaggagactattttaaaattcatttaagtacatataatatgaaactcaaaagatactgtaaaacaagtaaaacactcaagtggcagtctggctacataacattttcaacatatgtaaccaaagagttcttaagataataaaattacaagtaggaaaataagttaaaaaaatatatgaataaaatctgacacatatacacaagaactacaaattgttagttaacatataaaataattagctttactagcagttagggatatgaaacctgtaaaaataaaaccctatccttcccatttgacaagcctttaaaaaacttaaaaatctaaaactgtagaaagtgtgggctaaagacattctcttccaatagtagcgggattgtgaattgatggctaaattaagttttcagacacagatttgtttttaccattaattttaaaaatctataaactcaaccaagcagttatcatctaaaaaaaactagcatatgtgcatagatgattactataaaagattgattattgtaaaaacaaattgctaaaatgaccttaatgtccatcaaaattgagggatttatttaaacacggcacat

SEQ ID NO: 29580 - DNA, 1698 bp, Bovine  19866881730382
  misc_feature (1)..(1): n is a, c, g, or t
nttactctgtagttcttcttgattaggttctcagaattgtatttaagcttttcttttctttcattttgtgaaagaaaaaagagggggaaaaaaagcataggctaactggcttctttgagttctgctaaatgatttgtttcatttgggattctcaaattatcaaccccatttgcaagagaacaatctgatcatagctgtgctgctctgcagtttaaattagaattttggaaatctgaggatttaaattaaagctcatacctaagataacagaaaactctccgctctacactcatagagagagtaattatatatgaaaacctgaaattagaagctgaaattagagctatattcactcagtcccaaagaacagctattttttcagacctcataatgaaatgattccaggtaagataatatacatgccagggccattctgtgccacgtttgctcagcccttattttcttctctcaagtatatcgaatccctttaactgcctttgttggtaaaaaatgctttaaactatttatagattacaatatttgacaaagggtttttcttaaatttagaaaaagaggtaaaaacgggccatgtttaaataaattttcttttgggttttatttaatattcctattagcaaatactaataagaattaacgggtgtctccagtatagttcatccagtgataaggaacatgatgcttttatttcaatatatacataatgtttcagttaatgataaatgattttatgataaagaatatgcagagaatataaaaatactattaagaaaataataagtagcacttgctgagcccttgttctaaatcagacagtatgctaagtatttcaccagtatatctcataaagtcttgacagaagctgtgatatgtatatttatatatatacatataagcatttatatatatatatagcaagtttttacaataccatacatacacacacacatacacacacacacacatatacccacttattggacataaaatgatgactttctttaaatcacaaagatagatttccagagctcagattcttcacctaatatagtaaaatgtgtcactatttatttagttttctgaacacagaaaaatcattttattaaaattatattggtctatttctagtacattgatttcatgttttatgtgatgctgcttttatattagcatgcaaacacatatacaatagtatatatatacacacatatacacatatgcaaaagtatatagtataaataaaaactgaagaaatgcaaattattaaattgagtatgagaccaaatttaaacagatcaactacaaccatatttggcaagacagcaactgctaaaaactagcacaatcttgaagaagtaatattttggtatcatcaatagtgataaaacctattgatgatttttatcatggatgaatctgtttgtctaatctgccttaactaatccagtgggttatcaaagatcacaatgtgtgtaaagattcactgacatctttatacacacacacacacacacacacacatatatatatatatatatatatatatattataattccagtggaatcagtcatgtctatataaaagtttcatactttggtattgccatacactttcttgagcaagaaagggggtttgattatatagctactgcccattaaattagatataggggtatagaa

SEQ ID NO: 29581 - DNA, 2448 bp, Bovine  19866880124101
  misc_feature (1)..(1): n is a, c, g, or t
nagttgcactgtgaagaaagctgagcgccgaagaattgatgcttttgaactgtgatgctggagaagactcttgtgagtcacttggactgcaaggagatccaaccagtccatcctaaaggaaaccagtcctgggtgttcattggaaggactgatgctgaggctgaaactccaatactttggctacctcatgcaaagagttgactgattggaaaagaccctgatgctgggagggactgggggcaggaggagaaggggacgacagaggatgagatggctggatggcatcactgacctgatggacctgagtttgagtgaactccgggagttggtgatggacagggaggcctgacgtgctgcgattcataggatcgcaaagagtcggacacgactgagcaactgaactgaactgaataagagcaaagaaattctgaagaatgaaaatataactcagatggccttatgctgacaaaataagcattgtgatggatgaaatccacaacattcatctgagaaccttgttccattgatctagagagttgggaggtgtctattctactgagtgggacataggccatgaatattcatttccatgttgtgtagcaaggtgggaaaaagaaaacatctgtttatcatagtgttttcaaatatttgataatgaaaggtgttcataaatatatatacaaatgtttaatgaatgcatataccttagtgcatatgtatagttttcaaatgtggttttcaaatatgaaagtaagtctttattgaaaaacttgcattttcttctgaaattaaaaaaaaaatgggttttgagaatgttttttttttaaaaccacaacttagagaaaagtaaaatacattcatcttcattacagagaaagttaaggtcactctgtccttaggaagtaagatgtcattcaggaccaccagggttggatgaatcttcattccctagcaagatttctctctggtaaatctaaccaccattttcatctaattcacaaatcctttttccatttttctctttaacatttgtgttcctatgtggtctaaaagttaagagcctagagatcatgctaatgaataccacaattctgctttgagaatatgtcctggaaaggaattcctaaattttcaacattaaaaatagagaaatcctaatagcatctgtttctaataatacactctaaaccaagcatgctgcaaatggtctattttggttatagttactaaaaaaagaacacaaacacttttctatagaacttgcattaaatcagccagcgtttttagaaactgatgggcaaactgaggtgcagaaaggttatataatttgctaaagctaacacagctagtgacaaagtcagactgaaaaccaaagtcttctggctgtcatgatgagaaaaaacttagtcaaatgagagtgttagagtatgtaaactagaaaactaattgcttgaataattaagtattaggttcatacaaaagtaacagtggtttttgcattgctgaaatttgccatttgatattggaatacattcttaaataaatgtgattatgttatacatcattttaatgtgcatgtatcactcttttttgctaatgaattattacttgcttattctatatttattttagactatggaaatgataatagacaaaaagaaaatttgaacgattttcttattcaaattcaaaatgggttgtaaagcagagacaacttgcaacatcaacaacacatgtgaccaggtactgctaaccaacttacaatgtactggtggttaaagaagctttgcaaaggagacaagagccttgaagatgaggaatgcagtggccagccatcagaatttgacaactaattgagggaatcacggaagctgatccttttacactaaatgagaagttgctcaagaactcaacgttgaccattctacagtggtaaggtattttaagaaaattggaaaggtgaaaacagctcattaagtgggtgcctcatgagctgactgcaaatcaaaaaaaaaaaaaaaaacaaaacacgttttttgaagtgttgtcttattttatgcaacaacaaacatgtctctttggattgtgacatgcaacaataagtggaatttatatgacaactggcaatgaccagctcagtggttgaaccaagaaggaactccaaagcatttcccaaagtcaaacttgcaccaaaaaaaggtcatggtcactgtttggtgatctgctgcccatctgatccactacagctttctgaatcccagcgacatcattacatctgagaactatgttcagcaaatcaatgagatgcaccaaaaactgcaatgcctgtagcaagaactgatcaacagaaagaatccaattcctctccagaataacaccttaccacacatcgcacagctaatgcttcaaaagtgaacaaattgggctggaagtttgcctcatctgcca

SEQ ID NO: 29582 - DNA, 938 bp, Bovine  19866880378777
  misc_feature (1)..(1): n is a, c, g, or t
natgtgccctacctgaggttgaaatttgagctccatagatgtgaatccgatatcgtttataaacaattgtatccttaattaagtactttttaagggaaagtgaccacagattttaaattcacaaatggtcaggaaaattaaatagtttaagaattagtgatccatgctactttttcaggcatgaaggaacagtatgtcctcaggggaaaacaaggtaaacatgtcaggcaggaaaagctaccttttcaggagagtgaagagatgagagtctcttgaaagcagatgtcttcctaaatttctttccaatcctaaatctcacagtaggtaggcccactgaattccatctctgctgctatgaaaagcctttacctgagtaaatacgtggggcctgaaagatgtaagaaaaatgcagctttctttgtttttttctttttctcctttgctatcacctcctttattgtagacataaatggaagcaaacgaactctctatgaagacagagtatgcatggcttctttttgaaactttggtttcttttaaggatgaaattattttatggacactgagaatacattaagcacataaaaagcacagcacaatttcatgaaaatgcagacatgtataatttataaatcatcaactttgtgtcgtgattcaaaattctcatctttttatgagcacaggtcttggaaaagatctctgatgataaaaactagaggaattaaagccctatttttggtttatcttgacataatagttttactactatgaaaaattaagttccatattgactggacagccacttacaggcacctcttgaaatcatttccaaatgaatacacttttgtgtacaggtaaaacaatgcccaatatttgcttgccttcaatggactttcatttgtttcctctgtaaggagcaagggctctgataaaaagca

SEQ ID NO: 29583 - DNA, 1068 bp, Bovine  19866880385787
  misc_feature (1)..(1): n is a, c, g, or t
ncgccgccagagcgatgttcccgcagagccggcacccggtgaggcgcggtggtggcggagtggggggaagggaggtggcggagtggtagttgttctttctgtgcggtgaggagatgggtggctgctacaatctgaccgagccccctggcctccaagggtacaagacttgggaggtcccgggccctctcctcctgtgtgggaagggggctgaaactctcaattcaacccctttgctctaggctccctcctacttgacgtctagactgggcgggcggggcgcttggggagactggggtttctcccgcggccgtatcctctcccttccccaggcgggtagtgcgcccccgctttgtttctcgtctcgcctatttacatatcaatgaggccccggttccggcgcgcctggaggtggccccggcgactctgggaacggggaacatcagggagttttctcctctggtcccccgggtcattatcgccccctgagggaggaggcggcgtcgtcgacgacagtctggccaggtcctccacggccgccgccgggaacccttgtcccttcaaccaggtgacccaggcgcacttaccgcgtcccgccctggaggctggaagaggctgcgagcgtcatttgaggaccttcggatctgggaaggtccaccttccctctccccaagtgaagcgctaattggagttcgggactccgtttggtgccacttctaactttatttttcgtttatgtcccacccactctttgatactccgactgctttatccaaccgcccgcatccccgtcgctcggtccccctcgctggtcgcccttagacgccgcaccaggctgcaggccagcccttcaagttcactatcccggaatccctggaccggattaaagaggaatttcagttcctgcaggcgcagtatcacaggtgcgtgtcgcgccgcgcccggggaagtgggtcgcccgggcagcgctgtgccccgggtcgcccatcctggtggtggcggcagctgtacttagtacttgcgtccaggcggtggcgcgtggagtcacagttaagacctgtcattcacgtt

SEQ ID NO: 29584 - DNA, 3816 bp, Bovine  19866880388877
  misc_feature (1)..(1): n is a, c, g, or t
ntaattctgtggccctgggttgggttatttagagagttttggatctctgcaggagaacagagttccccaatgcttgatcatgagttacattctcaagtcaggcatcacttgaccaagccttcctttgtgctaagctggtcagggcagcagtgctgagcctctgagagcctccagagcagaggctgaagtctgagttttcaggacccaaagtcctatctgagggacacagatgttgactgttagcctcagatgctatgccctccttgggcaggtgacttctgactgagactatcaagggtgggcttcagagacaaaagtctttctttgggttttttaaagaaaaaaaagttgaaaacattttaaacctttaaaattggcaaaaggaaggaacacaaagattagagtcatattattcctggataatgaatatctgagttttctagagaggactgagagaaatgagccccagcacttcattcttttcgttttcagtgtcagagcagaaccaggaggagaaggaaaggtgtcacactgaaaggtaaggctctgcctgtttcaccggatctctccaagggtgacccttcctgccttttccatgagatcccaggtccgtgacctctgacgatgtcagtggctagataccatttctctcagaaaccagaggtatctgggaggaggctcatggggaggcagtccgagtctgagacacttcttggattctctgtttttctcatggctcggcatgaagccatgatggacctgggcaatgggtgtttctccacaggtggccatgtgagatgtcaagagtcagaacgtctgtgtcctgactttgtataagtcctctgacttcctggataatcagattgctctctgaggccacactgatctctgtgtttcacatggtggttttgagcatcacaggagatataaagcatgtgaaagtactacaagtgaagcaacatacatataaagtaattgaccatttgatctcatctgctaattcttgggtctttcagagtctagaatcctaagggtttcccataaggggactcttacattatacctatgcttataccttccttacatgtaacccactctcctggtttcgcaggttggagatttcaccagatagaaacagaggaaaaaacgaagctgatttctattctgaaaaggtgactagtctttccccttctttcctgatccctccttagtatgttctctgcaattcctgggattcagtgcaacctactgtagtcatgggagggggtagcataggaatgagtatgtgatgaaggccttaaggtgagggttattgagcatgttgtgaagtcagggatgtagagcaatataaagtggcagcaggctccagcccacccctgccaggccagcaggtcgccctttccttattctggtcctggttgcatctttgtacttcctgtctcctgcagccacctgggccagcatgatgataccatccgctttcgtcagctcttatgtccagatcccttctgtgaggtgtgtaataatgcaactgctgaagtcaattggttgctgttcccggagaccctggaagattctgcttcctctatgtcccctttggcttccacagctcctgtggccgattcatcattgactctgtcccctgccttctcagcagtctctccaggagatctactaccagcctctctgcctgagccttccccgttgcccccctccattctttcacctagctccatgacccctttagctgactttttgtcaccctcaccactgggtcacactctggcattagagccttttacttctttggattccgaattcccagtagattattcctcaccccaaccccttgcctttccccctctcctaccacatgacatgcagacagcagatcctgttctcccaccagaggccactttgtctctgaataccatcttttcccttgaccccaccctttcccatgatatcaaccgcttatcagatttgtcccaagcaatgaagcccgctgattcttttgcaccaccaactctgtctgttttaccacagccagactgcactttaactgtcactcagtctaaatcaattgccatcttactgacacctgttcctgagaatttgcctaccgaaagccctggcatgttgtccacttacgtcccaacactcacaggcattgatcattcaagcctgtcaatttcagacttctcctggtggcaagctcatgccaaagacttaatcccttccacgttggcacaatgtgatttcaatcaagagtttctcgccctccactcttcagaggcctcttttggcggagaccctgcagccaacctcatagagcctggtaatctctcatgtctcagccctgatgtcctggcactcctggagagacaagtacaaaagaggagcgatttcctgatgtggaaagaaaaggaaaagaaaaaagattcttttccagaacaattgaggccagactatcaactaaattcctcagggataaagttagagtcagttgctgataagcctgtgcatcaacaacccccatatcctaagaccttggaggaccaattacagcaaaaacctacccagctcttctggggtctcccatctctacacagtgagtccttgccctctgctgttgatatctccagtgacaattcctcaaactttattttcaatagaaactcaaatgcctctacaggccaagaatccccaggacttccccatctccaacctctgtccttgcctgagattcagcctgaatccttgcctcaaaccctgcctcagtctcagcccctacctctcactcaggtccagtcccaagctgacccaaaatccccactcctggtcacaccacctggtcctctaccccagattaggatctgtggagtgtatttccatagacctcagaatgaatcagaatctctctcctcatctgaaattcaacagctggaatggaacgtgttgcagaaacaacaggaaagtttgtggggtttaccctctgtgatccaaagatctcaggaagacttctgtccattagctcctaacacttctcaccaccagcaccctcaggcccatgtttcagtctccattcttcctggggagtttgttctcagtgatgaacttcggaagaaactagagcatcaccttcgaaagaggctcattcaacaccggtggggcctgccccggagaatcaaagagtctgtgtcactgatgttgcctccaactggttttttagaggcatctaagtcagaaagcagtgatggagtctcactgatctctgtgtttaagggtcagagtagcaaacatgtaaatgttgaattgattcaacccggaagcttccatgagagaagctcggaaatgctccagctagagaaagatgtggggaaagatcaggaacatagccaagagaatggacaggaagatcacctgttgaaagacccaaacagctcttcagataaggatctggggtatgactctgagaaaaacataaacagtcagatcgtgagtctctcagagaaaaatttaagggtgtcagcagagagtctacaacttgaaaatgtcctaaaagtacatttgagtaagaagtttgaggaaataaatgagggtcgactccctgggactgtgcatagttcatggcatgccatcaagcaaacattgattctttctgcgaaatcccacaccaaaataaaagagagaagtttgacatcatcagtgggtgagtcctattccttgaataccttccaggacctgacttttgttgatcccagtgcacagcagatgcggaagcacatattaaaaggtttcgtataggatgttgtg

SEQ ID NO: 29585 - DNA, 1343 bp, Bovine  19866880451285
  misc_feature (1)..(1): n is a, c, g, or t
ncatgcacacacacacacacacacacacacacacacataacatcatatcacacagaaacaggagctattctaaaataagacagttgagattccttcagaattcacatgaattatttggctttagtgccatcccacatgtttaaaaccatgtaagtcatttcagtaaaccagaaagagttgtgaaagtcatgatttcatctccaataaaatgtgaactgcatgtacctcttcaatttacaactatgcccattgtaagcaactttttcaagttagagccctagagaaagagcacaaagaaaaatctcagctcttaccaccaagccaggactcttggacccaacaagcatactacttcacagccaagggtacccctgggtgaatttctacccccttcttcctctagaactgggtaaagtaaagtgaaagggcaactaggcatttaaacaaatggcttatcttagaaaaagaccattttaaaaccacagattttgacttttctgtttgaagaaaatgttgaaggcctctttttaagtcttcatcatcaaataatgacaatgtctctttcttacatactttcaggcttatagagagttttccagatccttttttcttccttatttgtttgactttatggcgtctacccaagcctagtaggtagtgttatctcttcatctacaatgagccatctgaacctcagatattttagttgatttgtcaaaatacaccaggctggactggaacctgggatgtctgtctctaatccagggcttggtagagaccattttttctatatatgcataagtatatatttgcttgctgcaactgttaaatgctatttagaaataaaatgctcccagcactaactatgtcttcagggcccacggctattcatattcctccctaagcacctaatttacctctctgagtggcttggaccagagggagtgtctgggtcactgatgattagggcactgtgcactccccagtcactgggtttaatgttccctattttatgacccagactcagtcccacctctctgctggattgcattgtcctgaaatatgtctatatgcacccagggactccagtaatggacccataaaaaattcagtaaggaaatgttttaatcaaaagacgctgtctgacatcacagaatcaccggaattctcatttaaaattggagcgcatcactgaaaaacgttgattgctgttgtaacctcactggtttctaaatgcattctgttcatgctctgctgttgatggaactggctactgatgtgtatccgtagtatcctttgtataatgaataaaaatttcaaaatatatgaaaagggcctaccct

SEQ ID NO: 29586 - DNA, 1199 bp, Bovine  19866880535234
  misc_feature (1)..(1): n is a, c, g, or t
naggataaactgacatgtcctacaatgtcacacattgctctctgcgtgaactagatatcccgaaggatgtggacctccttggcagctcatgggtttttcagtttccatgaaaaccttacaaagtgagtccatgtgggtatttactcagtatatttctcaattagagtccgacatggacctcatgcaaatataattaatctgtccatgctgaataaaacagttgtagtatcacctatgcgatttttatataagaagttaaacatgggagaaacaaaattacaaaaatgatgactgtttcaattataggtttgttgagtcagttactagataaactcattgacagataatattatgcagttagcaatatatttatttgagcatatctatagtggattatggaaaattaataccttccttctagaaacaaccacagtggcccataaagggcagagagatggtggcaatatcaatctggcttcccatttgagtgacatggacaagcttggtacctgaaagtctgctatgaagtcaggggataattttcacaaagggcaagacagacaggccaccctctaggcaggtttctgtgctgctcctatcaaaaccaccactggaatgagtgacaaataagactgtctcaggaaatgaacctcacacacaccctgtcttgaaccagctttatccaaatagctagggaggttctctaagatactgatccctaagctccacctcaaaatctagggtaggccctgaaatctggactttttaaagttctgctggtgactctgatggacagcctagggtggaaaccagtaagttccacctggttccttaggtgacctaagtccttactatgcaatggaaaatagatggggaaccagtggaaacagtggctgactttatttttgagggctccaaaatcactgcagatgatgactgcagccatgaaattaaaagacgcttgctccttggaagaaaagctatgaccaacctagacagcatattaaaaagcagagacattactttgccaacaaagttccatctagtcaaagctatggtttttccaggagtcatgtatggatgtgagagttggactataaagaaaactgagcgctgaagaagtgatgcttttgaactgtggtgttggagaatactcttgagagctcctggactgcaaggagatccaactagtccatcct

SEQ ID NO: 29587 - DNA, 3504 bp, Bovine  19866880592095
  misc_feature (1)..(1): n is a, c, g, or t
ntgcatactttgtctacactttctttgtgaagggcaatgagatgtttgtggttgtattttgtgacttgtaaagtttaatataaatgatgttattatgtgagaaaatatgaagcctagatcaggaatgagaaggtgctacaccaggtccaaatgtgaccttcacagaatctctctgaagcccaaatctgacttctaggtgaggggtcagtgcagggaagtgccagaagaactaaactgaatctggagatctaagtcttagccttggatcacaactaatagagctatgtgactttggatgaaccactaagcctctccaagtttagatttgctgttctgtaaaatggggtttgaaagggggccctctatgtgaatttcagcattaaaattctatgaggtcagccaccttgatttcagaagacattgtgtgctttgtctgaatatacaatacagatttctgctgtggtgaagagatggttaaatgtatctttgacaacaaagtcaaataacactcagtaatgaaactccctgatttcattttctccctcctggatgtgatggtgtacctgcgttctctctccttgtctagctgcttctcagaagtgatgtccagacagaatggcctctagacagtgaacttccctcacacagcagagttttggggcctcctgcggcatgtctgcccacctcatctccccacagcactcactagagcagagaagattaactttccgaaaatgaaaaggacagagagaagacgagctgcttatcaaatatgcacatttcagatggaacttcacactcagtagaaagatgttagattgctgttagctctctggagcgctcctgacaatgtgttatcaggtcatgtttgcatgacagaggcagcccaagcaggaaacattaagtcatatgacttctaagacggaatcaatcaagtgagcagtacagctcctgaaaactaatttcaccttcataaggtctggttatctgtgcagcagacatgaggtttgtcagccccatttcagtctgaccaggttcagcactgcatcaagaattttaatgaaccgacactgtaatatgtatgaaagatgacactgagatgaattcatgaaaaaccaagtccccatgaaatatgaacaattacttgcgggcttctccacctacttagctcatttgaaatgtccatttcaaaggcctttgtctttctggggttcatttgcaagtttgtgcacagattttcatcatatttaaccagattaaaaatcaaaggagctacttacaatcaaacagttcagtgaactctagtttgatgggggcagagccaaggctgatcagagcttaaatcttcatttggctgcagaagcacagatttccttgtatggggagaaaggggcctgaaaagactggatccttatgcccactccattctaggctttcagtgtggccctaaaaaaggtcctaagttctcatcctaatgacagcataccctctctggtagtagtaagatttatagttttcagcttcaagatagcactaccagggttagccttattttagaaactcttaaaatttgttagtagatacatgttgaaattacaaatagctgaagattatggttttctcttggtacgtggcatcccaatccattctccagatcttgtatcccttttatgaataccgctgccatggacatgcattttatttgctgatctgtataatttagcatgtttcatatactgttaaccacaattcttagcttattctcagaggttacgggccatatattactgtcctcatttagccgcactttcactgtaagctccttatccttcagcggaccttgcttcccacattacagacacactttcatcacctagctcgaggacatgatatatatctctcttctatctttctttaccttatttctttatcttaaatgtaaaatatttcaaatatacagaaaatacagagatattttaaaaacaatattcatgtatttactattcaagcaaccttagccagttttactattttgttgtatttggctcagatcttttatctaaataagcaaaaacctccatgataaggacagtggaagaccccaatattctctgcaattttttcttgccgcctccaacaaaggtaattactatcctggacctggcaaatacattccccatacatgctttattatgaagaaaatgtttatgtgttccattaaacaatatgtggcactgtttccatgttatacaagtgttatcatgctggatacacacttttgtaaattgatttttctcttactattatactaatgataattcatattatttcatatggttttatttcattcatctctattattgtatagtattccataataataattttataaataactagttccgtttggaaggaaattaagtgttttatgtcaagtattgataaaagacaagtgaaagtgttagtcactcagttgtgtccgactctttgcaacctgtgggctatagcctgccaggctcctctgttcatgcaattctctaggcaggaatactgcagtgggtagccattctcttttgcaagttacaatgaatattcttcaacatatgaggaagaagacatctagggtgtatggtataattagaagtgtatactaggttaaatggcatgcacaattcaactacattagattattctctaatgtaattaaaccaatttttagatcactttttatttatttttcagctcagttcagttcagtcactcagtcatgtctgattctttgtgaccccatgggttgcagcacaccaggcctccctgtccatcaccaactcccggtgtttacccaaactcatatccattgagtaggtgatgccatccagctatctcatcttctgtcatccccttctcctgccttcaatctttcccaacattagtgtcttttcaaatgagtcagctcttcacatcaggtggccaaagtattggagtttcagcttcaacatcagtccttccaatgaacacccagaactgatttcctttaggatggactggttggatcaccttgtagtccaagggactctcaagagtcttctccaacaccacagttcaaaagcatcaattctttggtgctcagctttctttatagttcaactctcacatccatacatgaaatccatattcactggtatggagtgaatgagatggagtgaatctatctcacatccaaagtactggaaaaaccacagccttgactagacagacctttgttgacaaagcgatgtctctgctttttaatatgctctctaggttggtcataactttccttccaaggagtaagcgtcttttaatttcatggctgcaatcaccatctacagtgattttggagccccccaaaataaagtcagccactgtttccaatgtttccccttctatttttaatgaagtgatgagaccagatgccatgatctttgttttctgaatgttgagctttaagccaactttttcact

SEQ ID NO: 29588 - DNA, 2813 bp, Bovine  19866880604393
  misc_feature (1)..(1): n is a, c, g, or t
nccacctcagttgccaccacacaaccatcaatttctacctttaatacctccctttccttctatattcatctccagttttgttattgctgccccagtttacattctcattataaatatcttacctggactattgtggtatctcccccgggaaaacactctgcattcacattttccttcagattaccttccaatgttaagacagaggtattgtcatgtcatttacttgcttcagaaacctttggaagtaccccattgcctaaagattaaatggatacacattgtattttttcaacttcttttcctattatccactacatttgacatattgcagtcaaaccaacctattggactttcacaggacaccctatatgtaaccgtacattgttttgtctttggtgggattacttcctccaatccatgggtagtttctactaattatttaaaacccagatctaatgctgttgtctttgcatgtcttccctgttgcataattagaactaatcactttcttcttcgtgtttccacttacttttctcatgcctctgtttcaacaatatcttactattctgtaaacctttacatgcctgttttgcccttttgactgtgagcttctgcagggatgagaccatttttcattcatctttatcatctctctgcctagctagcatgttgcctggaacacaacagatgctcaataaatgtttttaataaattaatgaaataatgaagctatattattatatcaaaatagcaacaggacagtgttttcaattttagataatatgtatcttctcatctggtatctgctgcacagaccaagacttcagtggggtacctaattctaaatgatacctgctgctatggaagcaaaatttgattttttttgaaccttattatctttttctttaaaatatagctagaaatccctgattcttagttgctatagaaccggatgagcaaatataaccagcaaattatttgttaactaatcatggtagggattttaaaaattgcttttcttcttatttcaattacaatacatatttgaaatagtaaatttagagtacatagacacacacacataaagtcatgtatcatatcactatcactctgcaagataatcagtattttggattatatttgtataacatttgattacaaaaggagagtcagaggatatatactgttttgtattcttggtattgaaagaaatatattaaaaagaactattattgaggatgcatttaactattatatgttttatagcataaatatggttatgctattataaacatgataatctgttgatagcagaaagtttcaaggcaaactgtcctaagcagtaaagaaatttatttctttcatcattcttaaaggttaagagatgaatctggctggcttatactaaggatgatcactccctggaactggacagagggtcaacttttctgagttacatgggtgaggggtggctaggattaacacattcaagagtttattcatcttatgagatgagataatattgacagtgagtaacctgcagagtcagtcatagtggctatagatcttcctcctttttaagtaagtgttgaagcctttttcacttaaaattgctcagtttcctgttgttgacatttaggtatttttccttcaatttttcagtgttataaataacacagctgtgaacaatctcatggttgaatcattgtgaaatccatgtttatatgtacagcttcagaattgtattaagcaacctgttaaaactttgtgagatgttgcctgtggggaaattacaccattcctaccagcaacaagagacaatagctgtttcctttaccttggacaacaactttgggcatttaaaagagtctgccttggccagaggcttttaaactatattagggaaatctgttcttctgcagaactcactttaagccaatgtgggttatttcacaagctgacttagctcccagtgcttgatatgattcacatggagcttgtatcagcttatcactttctcagttcagtgtatgttaattttcacgttgcacatgttcttttttcaaaattaattttgagtacagttgtttttgcacatgtgttcttaggagtgatcattagcagactagcaaacaaacaaaacaaatacaaaactaaaaaatacaaactacttgcacattaccaagtttgggaaaaaccaaaaaccatctgagaaaggataaattttaagggccaatctttttttttctaactctcaaaatacctttctcctatagggatagataattgggcccaaaccagtttttataagtgtgtacatatattatatatatatatatataatatatatacacacacacatacatatatgtgtatatgtgtgtgcatatatatacacaccatatacatttatatatacatacagttattaaaaattatccattgctcatggttctgtattttaaagattcattgtttcaaataggtttctaatccctaggccaggtactgagttcatatgagaccaagatcttttttaccatctgcaaaagctgttaagacatttaggtgtcccagtggtgatgatttatttttatttctctgagaggtcactctgatttaggagtgggtgactgtgggagtggaatattgtatctcttctccagccagttttccagttctacataaacttagaatgtttgtaagttttcttgccaactatatgatatcattaaatgtaataggtctgtacatttgcaagtgttacattttggtttcagtatgtgagacttatgaatccatagcataaaaca

SEQ ID NO: 29589 - DNA, 1125 bp, Bovine  19866880616440
  misc_feature (1)..(1): n is a, c, g, or t
nttcactcagactcacgtccatcgagtcaatgatgccatccagccgtctcatcctctgttgtccccttctcctcctgccccccaatccctccccagcatcagagtcttttctgtgtcaataagtaccttcattttcctctttcaaaaaaaaaaaaaaaggtctgtttcaatgcttagccctcatgaaagagggcaagaaatagacaaagggtaaactaaaaaggtgccatgcctaggacaatatcctgaatagtatataaggagtataaagaagactatcaggacatgtacatagaagtatagagtccattgctctagtaaagcagggaaatttttaaggtagtaggagacctttttaacaccttccttttcaaaaaagctgggatgtgtgtaaattctcttctattgccactgaagaaaagagagaacataagaggagataccattaattaactaataatttcaaagcttaggttggagagcagatttcaccaactatattagcattgtactggtctgtttaaaaaccgggctaaagatagccagggctatcaaaatattattaaaactgtatttgatctatgaactttgagcaattatagatatagaggcagagaatatgtgttaattaacataaaacctctgattcaaagtcatgttcactccaacagaggctgtcatagaataagtctcacacatcacatcagatcagccgataatataggagaaaaggaaataggaatctgagaacgattatgacagagacattcccttatcactaactagctaataatcttataaattatctagggaaacaggagtgatgttttgcagtgtatgcaaatacagagagaatttgtcaacagagaatttgtcaacaataccctttatatagttatattaaatacaaatatatatatatatatatatatatttccctcttaagctaacaatgcattaaattcacacagcacatgttattatttaaattatatcattctctttaaaatgctttcattgtctacataaagcctcatatcagaagaagctggccaagtctttttaaatatgaccattttggatattctcatttgtcactcgatccactcttcatttacccccacc

SEQ ID NO: 29590 - DNA, 1429 bp, Bovine  19866880672234
  misc_feature (1)..(1): n is a, c, g, or t
ntgatttacattgaaatacttctttacaaatttactataaaagagatttactaatatctctttcatagagttgctatgagaagaaaaaatggcttgatgtgtgtagagcattatgtataaaaaaacccctgcccacatagtaagccgtctgttactgtgattctctgtttcagggatcattctaccagtggctccaagtaagaataatgggtactagtttaaggtactagtttaattgcaatatatctcaatctaggaatctaactacttctcctcagggaagacaaaaatcaatggtttaatgaaatgaacccactttctcctctcttaccccacaaatattaaatagatctgcatagagaatgagataccatcttttaggaagtactaattgtttaaagtacctggtggctcagacggtaaagcatctgtctgcaatgcgggagacctgggttcgatccctcggctgggaagatcccctggagaaggaaatggcagcccactccagtattcttgcctggaaaatcccacggacggtggagcctggtaggctactgtccatggggtcacaaagagttggacatgactgagtgaagggaagaaaaagaagaattgtttaaagtagtaattattccatcctccataagaaaggattaagtatttgttctctgaccttcccacagggttgagagtgcctaaattgttttttcctcccactccatatataagtcacagatgaggaaagatttgttagaaaatgctaagcaactgaactgatcggtcatctgttctttaggcttgagcatggagaatagggccagagatgggacagagttgaaagagaaatgccagggtggagcccatatgtctgtgtttggtatgataaggatgtgtgagtggaatctgactgaagtgaggtgactgagaattaggatttttttctatcacaactctctcccaggggccacattttgcttaaaggaagtaagaggatgtggcatgggtcacctgagatgggcctgaggtgagggaggaaaaagctgagccactgacagaaaccccacgtcagggagttaggcagggagatccccctggaggtcccacctgaggatctatgaatgcctctcatgagcaagtcagcatgaagctgaaaggggaaatgaggctagacagtgatctgtcaacaaggaagagaagccaatttaccatgtgtgattgcttgccgaatgccatcctttttctccttcattcttgcttcaatcccagaagaggactgacagcaaagatgatgagaagtagcatgagagaagacccagacccatccataccttcccaacctcctactcccagcctacagaacattgtctagcctatcatgtgtagttgttactgttgttcaatcgctcagttgtgccgactctttgcaatc

SEQ ID NO: 29591 - DNA, 1520 bp, Bovine  19866880672395
  misc_feature (1)..(1): n is a, c, g, or t
nacctgtcctagcaacatttactctgcataagcttggatatggccattgtaataggctaaacattacatgggcattcacctatcctgcccattgggacttttattactagaatcaaagcatttgaatggctctctttaaccattaagagaaaaacaactttgagctagactaacataaggtaattactaagctaagccaaattcctctgccatactcttggcactgaggtatggaaactctacaacccctataagaggtctgaagggggaaaaaagcgtttaagacaaatttcaggggtctcaggttctcattaaaaatgcattttagaaaattgttttaagttaacttgctagggcagttgtatggcaaggaaacatgtgtagcaatttggcaaattgcagttctcatctctcctttaaaataaaatggtaacaataaaaatacaattaaaaataaaattaaaacataatctgaatgagtatttttattttttttcctaattaaagctttgcagttaaagttttgctggagaacaacctgtgtttttaatctcacaaagggctaatacatgcacaggatttgagatgtctgctaacactcagatctggaagtgaccttggagaaccttctagtctggcattctcattttaaaaattggaaactgaggccagagaaggtttatttcttttttccttaatcctttattttgtttgtgtgtgtgtgtgtgtgttttctcttggaagactttgaaacttggtatctgcacataatttagacattatagggcttttttcttttcagtatgaagacaaggactctgtatacctgtggcggattcattttgatatatgccaaaaccaatacaatattgtaaagttaaaaaataaaataaaattaaaaaaaaaatgaagacaaggactcaacaaacagcaaattttatccagtactacctcaaaaatctgtagcttttgcctaagtgaacttcacaagcaattaacatgctaatgcttctttgtgaaaaccaaatggaaatacaacatattccttcatgccttctgtaataaagtaagctgaatgtaacttcaacactcctttatgaccccagcttagtctaataaacagcagtagtatttcaaaggagcaggtgtaggtagtatgggacatggacacaaatatgcattgactccagcaatgactcccaagcctgctatcagttaaaaaatccatcacctgtattttaagtgtttacttcttgttcatataaacacaatgactgttcatcaaatatacatacacagtgcaaaagagaactgcctttagtagatcacatggctgccctaagtagttaatgtagtttggatcacttttatcccctcagtgtgggtgtagggagtgagggagttagaaaagaaatggaatagaactaagatttggtggatacttaatttgttacccaaactttcattcatttcttaactatcttgggagagaatatttctctcacttcacagctaacaag

SEQ ID NO: 29592 - DNA, 3111 bp, Bovine  19866880700885
  misc_feature (1)..(1): n is a, c, g, or t
nttgttgattttggatgtttaaaagtttcctgtttgtgtgtgtccatttgggggagaaggcacacaaatttatagacacaacagtattgatggagtaaacaactagaagtatttctcaagactttctaactgaacttgttggtaaagatggagtattattgtcccttaatctcccatccattacctgcaagcacataaactattcaattacaggcaaccatgggtggctataaacctcccagttcatggacagtatcagtcacattctccttcagtttctgctgtgagtgaataatcatcatgtccacaggaagcacgcaatacaaactgcaaaaaatatatatatgaatgtaaggcttacatggttttccatttaaggcaagcagttttaaatacaactcacacaagaaacaaggatcaaagctgatcatttaattataaaaactataattataacaatacatttaaaatagctactatatattcaacacctactgtatgtcagatgtgttattcagggctttactcaagtttctaagtaattgctctagagcttctaagaatgcataactttttggaaacatagataaaactcagggaccaggaagaggaaggatgagaggtggggaacagttagaaataggacctgtagtcacagcgcaagttcctgagaaagatctatcaaactgttcaaatgtgctaagtatatctcttatgatccatgaaactattgtaaaggtgatgtgcatttatcattgaatagccagatctcaatatcactcagccattttccgttgaaagtcttatctatggttgcagtctaccaagctttatttaatgccccagaaatcacaaaataattatttttatcattgaacatagacatgctaccatgaggttatgttcaattgcattctgaggggattgcatacctctgaccaaaggactctgatgctgggagggattaggggcaggaggagaaggggacaacagaggatgagacggctggatggcatcattgactcgatggacgtgagtctgagtgaactccaggagttggtgatggacagggaggcctggtgtgctgcgattcatggggtcgcaaagagtcggacacaactgagcgactgaactgaactgaactgattcacacagagcagaggatttcacttaatttagactatcatcccaggtttccttgtatgggaagtatgaatatataaagcaaggataagcactcaggctattgtttccctgtacaattaaattcatacctttgatataatttgcaaattattccatggagttagccaacacaggcaacaagcaaaaacaaaatgcctatgagagatgagtacactctgtatttcatgggaacagcaggagaccttttgaaactcctaaacttgctcaaatgttttaactgaagaactttaagattgccacatcatgttaaaactttggtggagataaccagcaaccttgacctacttaagacaaattgtggtttgtgtgcttaagaggacagtgcaattaaaaatatttatataattgctcttcagagaaccctgacattaatatgaggttatgaattaccagaactttcaaaaatgcaggaagaggggaaatttctcagaggggtggtcctggaatttatctacataattgttgcatctttagcgacaatgaagtcaccatgaagacatttaggcaactgggaagttactggcgggctgataaagcaattgaattatgatatggatctaattctttcgtcagcagcaattgtaagatctatatcagaaatctatcacctcttttttgagagatcttgaactaaacaactagccctgctatctttaatcttcctggcgtcagtggtagtctaaataactcatttctaaacaaatatgtttaaaacattttattctatttaaaatgataggcttgactaaatgagtccttatcaaattatagtggtgccttttgccctgttgctgtctccattagaaacctctatttttagaaatttgtaactcagatttccttaagggaggaaccttggcactcaaactactgagagagaaagtgacggttattcattgttattgcttgctccatttcttttttttaaattgctttgtttccaaactgaattatgggaaagcaaacaaaagcctgaagtaagtttagggcacctgtggtttttttttttttttttaaaccaatatctctagctttaatcacatatcttaaagatcaaaattatacactactgagaaaatacatcctgtctgtgctggatatggaaatattttctgactcctttttcatggaatcaaccaaaattttttctttctctgtctctcaagatctgaaggatttgtaattttatttgacttaagttcttcctcaattcgctctgctatctatatttttggattcttttattaatctctaagatcatgtggataaaagtgtttaaaacatcttagataatttgaagcaaatggtaattttgagtttaaacattgcattgtttgaacactaaataatttggaaattgtatagaaatgtttatctcctgtcccttgagcaacattgtatgggaatcaatgacttcataagcctgtctaatggagccaggtagagttttacctgtgaagtaattcttatccaagaccatgcagtcggacaaaatgccagaggttttatactggcagcggtgctgttgtgaaagtgggttcaagcgagttctcgatcaagaggattggttaagaaatgggaggcaagaaacagacataaatgcgtgaagttgaaggtagagatggcatgagaaaaaggtaaggtgagagaatagacatatattgattgtctggatgagttttggagataaggccaatgcctcggctgcttttcctatgttccagtatgtatttccatgaggacctagattgatttaaagttgtgagtgtaggctaggcactgtttattttttccaaaacttcaaatttcaaattgtattggtactaccacttttttttttagatggcaagtcggtacaatgtggcttgtcagggtgtgtgcatgtatgtgtgtgtgtgtgatgta

SEQ ID NO: 29593 - DNA, 2326 bp, Bovine  19866880714148
  misc_feature (1)..(1): n is a, c, g, or t
nataaaggtgtgtaagaataattccctcatagctctgcaagacacttaattctttgaatctcggttttcttatgtgtaaaatgcgattggtagacttgcccacaatactctcgcaaggatgatatgttatgagaaatggcagttactcccttttatggttcctcaattaattagcacctttcccttcaccctctagaggaagcaaagaggcattccctttccacacaccataccatctacgaccaaggccccctgctactgtcatccaaagaagaatgaccacaggctgctaacacaagcagtccatcgtctgtggggttacaggaccccctgggatctctagttccatcctcactaatgatatgctggatcgttaagaaatgaacaactgaccctgcgtctccatccataacattaaggcttattaaattgtcccagggaatattctggaaggaagagtcttccaatttataattaagaaagggtctgtgaaaggtttatacattgttggacataaaatgtagacgaagtgctgtgatttttaacgagcagtctttcatgtcacacttaaatgtctctagttctttgaataaacacttcagcctccttgtccgtcagctggtccctgtcatgccagcagcagggtcaaccatagaaaccagaggatgagaacaaagagaccaaaaatagggaaagaaggcagtttaccaacaaggcaaatatcttatctcagcttatttccttttcttccccttcagagatatgaagaataacattttccaatatcaagcttctgttgttagccaacattgttaaaaacaagggactccaaacgacaaataagaaacaagcttacacatgggtggtctgtgtcattctgtgatgcagaaggagctcaggatgctgagatgggaaaggtgctttcaggccagcggcctgcctgatgatctccaggagatggcactcctcagtgaactcagactcagtttcccaaactctgcataagccagataagaatgaattgtcccctatatgtttacagaactaaactcctatgaatcctggagtaatgtacatagaggctaacaccgagtagaacacatgctttatattcacagcactgagggcccataagcccagagatttattactatcttcacagcttctgagatggcattgttcacttcttagaggtaagaatgagttttatctccctgagaaaaatataaacttgtgcaagaacaatgtatttcaacatatctgtattgtaacaagtttcccaggtacttcagattagaaaaagatccaaggaccacaatttgagaacctctggtctatacatgcatattctcaaactattaaacaggaagaaaacaaagggcaagaaaagacatctttactatttgaaagaaaccagtagtaaaaatgccacttaaacatgattattctcaaaatgtagagggaaatttttgaaaacacagattcctgaaccctgttccttatctatgaaatcagacctgtgtaaagggggtattaatggcccatatacaggtatatttgcaaagcccctaaggtgatgctgctgatggcccgggtttaggaaaccactgttagaaagtaaagccttggcagccaagtctgccaaggatgtcagtccatctcctctacacccagtggaagtcatctctcccctcacttgtgaacatctgtgatcatcatcgtagagagcggctttgcttgttaagggggggtgggggcagggctgggggaagaaaaagctatttacctagtttgcaagccaagggagagcttaattaacatcagagcagataccatttcctcctctctccttgccctaggaactcacagggatgatgagaggatttttaattaatgtttgaaaagcattctgagatccctggacaagaggctgtggagaagggcacaacatgattattgttgttattaatagtagttgtattaataatagaaataatgaagttctccaaagtgattttttagaaaacctgtgacagccatcaccagtgtgtttttgtgccaagagttttttgagagaataaaagaaaaatggaaaaaaattttaaatgctttttcccaattcttttcttacctactgacttagtcactcagtcatgtccgactctttgtggtcccatggactgtagcacagcaggctcttctgtccatggaattctccaggcaagaatgctggagtgggttgccatttctccaggggatctttccgacccagggattgaacctgggtctcccgcatttcaggcagactctttaccgacagccacca

SEQ ID NO: 29594 - DNA, 737 bp, Bovine  19866880746353
  misc_feature (1)..(1): n is a, c, g, or t
nacaactaggaagctaaggcattttcctgctagaaataaagaggtgagttgaatgttgtgtggtaaaaaagaaaggggtgagaagaagagcaagaatagggtttcttcctaggaagaaaaaaagctgtttctagagaaaaaaaaaaaaaagcaaatgtgaaaataaattatactaatctatccgttaattccttaaattcagcacccattaaaacatgcctcaaagaaagcctgggatgacctgttctgcccaattaattctgaagtattggaaatcaattagttacaataaacagacccattctcattatttgaagcagtttgcaattagcttcatagaaagatgattgtacatagggctttgagtataaagacacactgccattaacaaagaatacactgtaccccgctctttctaaaactaaatcttttttgtattaccagaccaacttctgaaagggaattcaaacttttaccaagtggtctgctttttatagaactgatttaaatatcgaaacattgcatttttcctttgcaagtatgtgcaacaaaaactgaagttctactgtgaatgtacacatgacatggtaccagtttttgtttgctgtgctttcagcctgcaaggggctgtgtttaatccttttctcattccttttaaccaccaaggcccttggctcaccaaggtacccctaaccagagccccaaatggactcattgttcccaacatattaaatgca

SEQ ID NO: 29595 - DNA, 1663 bp, Bovine  19866880789209
  misc_feature (1)..(1): n is a, c, g, or t
ntgtttgtatattctacttatatatttatatgttgtgtgtatgtgtgtgtattatgcatgtgtgcatgaaaataagtgactaatatgcttactaacagtactaagtgtagggatttttttccttctttataaagtttattttttaaatgaagtatagtcaatttacaaagttgtgttaattccaggtgtataaagtttttcattatgcttttcccaatgatataattcaaaataatgacaaatactgtatattaatccatgtgcatggaatctgcaaagatggtactgataaaccttttagaagggcagcaatggagaggcagacatagagaacagatttgtagacagtgtgggagggagaagttgagccgaactgagagagtagcatggaaacatacattaccatatattaaatagccagccaccaagaactcgctgtgtgacacagggagctcaacccagtgctctgtgacaacctagaggggtgggattaggagggagatgggagggaggttcaagaggtaggggacatatgtatccctgtggctgatggatgttggaaaaaagaaaaattagtattagtttaaaagaaatgtcttgtgtgattcactcagctgctccaactatgtacattcatttcatcactatcaaatttacaaacattttctattgtgtgccaggcactatcagtactaggatctgtgagaaaaaggcctggcaagcattaaaatattgaataagatgctgaccttcaccttagggaagcataccatagtggaaaaaaataggtctttacagaactaagtatgatgccctatcctcagttcagttcagttcagtcactcagtggtgtccgactctttttgacccgatggactgtagccagccaggctcctctgtccgtgggattctccaggcaagaatactggagtgggttgccatatccttctccaggggatcttcccaacccagggatcgaacccaggtctcccgcactgcaagcagacgctttaacctctgagctaccagggaagccctatcctcagagctctataaaaagtaatgcatactaagatcagatagctattacacaatccaaactttttccctcagtgtcagttcttttttttgagggggaggggggcagcgtcatatggtatctaagttctctcaccagggattgaacccatgcccgcagcactggcagcataaagtcttaaccactggaccatcaggaaagttcctaccttggtaagttctgattggagcaaatacaagatttgcaaggccaatgatctgtgcagtatagataggtctccagccaaaagggaaatgtagacagaatgcaaaagactcaatgttgtatataacataaacagtgtcattcactgctatgacgcacaactatctatatcattgctgtatggtcctggttttctcttaagtcatccctacattcttagccctgagggttgcaatagttcaagcttttcccattaaacataagaaacagtcacaagccatgcttgtctttctcagcctctctgccctgttccacatcaggtagcaccaatccaaaccaaccttggaggttttgcttcctgagttacatgggcagagttaatggagctatcacttgctcttatctgcaaacagggaatga

SEQ ID NO: 29596 - DNA, 755 bp, Bovine  19866880858503
  misc_feature (1)..(1): n is a, c, g, or t
ntgttcctttgctctactgctgaacttaaatgtacccgtccaataaagcctattttattggatgtccttccataaaacattcacattttatcatatggaaaagtcagaatttatgctaaatatgtcactatttccctgaagataaatccaagtgaattaaatagtaaatgatgtagcaaaatgtactactgtaaaacaaaattcctctaaatgtgttaataatctctaatgttgattaagtaagtggctgtgatttacattaacattttagtctcactaagaccaacagtctaactctctctcattcctgtcagttcttattaggtacaaaaagaagcacattgtgcttatgagacaggctttcttttctactcagtgtataaaagctcttattattctgtcgtaaatgttactgaatttacctttgaaagtttgataagacaatgatgggcattcatcaataagagaccatcatagcttgcatattttaattccccaaatcattaaactcaagcacctaaaggcataaaagttccaacgaatttaaaattcttgtttttcagctccagtttatttccagtaaggtgtgagcgtctataaggaaggtaggatatattcatgtgctgtgtaacaaattaccaccaaatttgcagcttaaaataatgtccttttactaggttacagtttgggaagtgggaaatccaagcaggtgcaacaaggccaaaatcaaggtgccacaaaaagggttcttaagt

SEQ ID NO: 29597 - DNA, 845 bp, Bovine  19866880864909
  misc_feature (1)..(1): n is a, c, g, or t
natataaaaataaatatatttcattgaaggatccattaaggaagaagtaacctttctcatttaagggttgggagtaaggctgtaaaaatgacaaatatgttatatcactgcttaatgttttctctttttaagctttatataaaaataaagttgtatccaacccagaagattttagtgaatgttgatatatcaagacataacagaattcattgtctgctgccatagaagtgacatcaaaaaaaggagggctatttgctattttaatatggactttgctaagaaggcagagaaaattgatctaatggtgaataagagactagtatcatgagctatcagtttgacctgctttattagacaaaaatttggtaattgcacacatgtacagacacatacacaaacaaatattttaggaaaatattgttacatacttatagaccagcaacttggtgctctgaaacaaaaattcaatctacatcaaggcagactgcattcagaaatctactgatgaacctcaggacatggtaaagagagttttgtctaacaggggccagagcttttcattagagggcaaactttaatcagtatagacagacttctcaatattgactctgtgctgacttataaaactttcccatgaaaataataatacagatatataaaagaaagggtaactatattcaattttttggatttattctttaagactggatggctacttcttgttacagtattggtagggtgtgttatgtgttgtgttctgtgtgtgagcattcacatatatttgaaagagtgggggtttcccacatggcacagggtaaagaatgctaagaaggagacataagaga

SEQ ID NO: 29598 - DNA, 1738 bp, Bovine  19866880889193
  misc_feature (1)..(1): n is a, c, g, or t
naaaataagctctacagtgtgcagtgactgcactgggatagaaatagaaatgagatattgtaggaacagggaagctgggttattgacaggtgtatctacatggaggtcagtgccctccactgcttctcaccttttcatgttccccacctcaggccccatcccaccttttgtccctctcccagggcctccacagaatctgccttctttctgtgaccataagcttcagatattgtaggatcaacgtcataactctggataagataaaagtactgagagaaggctgtagtggacatttattttagtttagttttttgttttaacacccagcatccgcaagtctttctggaaaaactatcttaagtgctcactaggctactcagcagatttttgagtcccagtctgcacaagtgaaattgtcctccctctctagatgtccttgtaagggtgggtgtgtgtgcagccttggccaaaaaaaggtccatggtgaaccgcaaatatctataaccccagggcatagttctaggactcacctctggttcatgagctgcaggtattctgggggaggtctaccagggctccaccaagactattattatcaaaggtggcaccttaatcctgattggtgaactatacacactaagggcagtatcttgtatattgccatcaaacaatggcaagatggaaggaaagcaccacgatcaccttcatcgccttccccaaagagggggatgccatcttgatgacatcattggagatgctgtttcagtactctaagatgccctcatgcctttctgatataaagcatcagtgtgctgtgctgttctctggtcagcctcaagcatgtggtgcttggatcagattgaggagtaggggagcaggacagggtcacagtatgggaataatgaggcattaacctttgttccaccagcaagtatattctttaagatatctcactttaagacatcttttccttactctcagctgtattttaccctggaagataggtgactgcctagtcaacattcctaccactgacagctgagtggtgattttgctctgtaaaaaaaaattcatcaattgagcagcctgaaaaaaatacccaaggaagggaactacttccccaaagtgtctttctcatagggaaacctcaatgtcaagtttaaagtatgctttcctgaccagcacattacattaacatgacccacgtgaaacagattcttaagcaggttttatgctgttcctggacactttggcaaccagcccagcatccagtacagtaacatccacacccaaacactgccattcaagggattcagctccatgtaggagcctctggtcactgagttctcaataatgattaagattgatttcttcttcaggattattttcagaaagtaaacccatccttaagcctcttcagatagagaagacctgtctttttcctacttctctaaaggagtgtaaaacactcagtgagggaggtgtgtggtctactatacattttctttaaggctaagctaagaggggcaggagacaaagcccatctcctcaaacgtcgtcaaggaggaaatggtcttttgcagagggtgggagttgggggcacatggtatctgtttctcaacaagaactccagagggctggtcacctttgcaccaaagccaaaaggaagcagtaagtaagagcaaaactatattcttcccttaaatatatccctagtaccaaacccagcctcaacaca

SEQ ID NO: 29599 - DNA, 1211 bp, Bovine  19866880922522
  misc_feature (1)..(1): n is a, c, g, or t
ncaggaatcgatactcccattgccctcacaaaatgctatacaagcatattggcatttcacttggcagtgaagagtatcgacatcaatctcgccaactgcacacttcactaaccctgctccacttctcctgcgtctatttgtattccatctgggctgtcctcggctgctgaatttgaatgggactccttagcactgccctgacacgtcctaagataaggaaatggaaaagcatcatttacccactcacagagacagtccccccctccccgacccctgcccattttgtacctagaggttttgcagcatttaataaaacacccatttcccaccaccctatggttttacaaaattgtcatctcagagctcttcattaataaccaaatgtctgcttctaatctactgtgaattttaaagtaatttctgggctcttaaagtagcagatcttaaaaaatgaaaattcacacatgtgggagtacagtgtgcacacagagccacggtgggaactgcggctgcatttgttctgaatgctgaccatagacacaccatggttgtttagtaaacttagtaaaaatgcgtctcacccaacatgtgacttcccctttaaacatgtagttctatggtaatgttgaaatggaagccactgtagggaattctgtcatatcagtcttatgttgggcattatcagtatgtgacagatgttgtttgattaaaaagaatatctagaatatataaagaacttttacaactcaacaaacatgatctgaaaaaagaaaagtgacctctttaaaaatggacagtggccacagtgggataccacttcgtgtccatcaggatagctattatcaagaaaaacaaaacccagaaaatataagtattggagaggatatggagaaattcaaacccttgtgctttgctagcgggaatataaaaatggtacagctgttgtggaaaatagtttggcagttcttcaaagagttaaacatagaaccactgtatgatccagcaattccactcttagatacataattggaagaataaaaagcaggaactcagacagatgcttggacaccagtattcatagcaccattatgcatggtagccaaaaggtagaaacaatccacttgttggcagagtgactttggttacaattattattactctgagcctcggtctcttcctctgtccagcggcagtgacagtggtgtggtgat

SEQ ID NO: 29600 - DNA, 882 bp, Bovine  19866881023722
  misc_feature (1)..(1): n is a, c, g, or t
natgatgaattccttaagcattcaatgataatcatgcttgatttgacaagactttctcatgctattttagggccttaattttctgtgaagttctgtcaagtgctcatcaagcacccacttatctccgtatcttaacctggcagccaatcacaaggttgcctaacagtacagctagcgagtgccagcccattaatattcgagtcacgtgactgtccaaggagagaaaccaatcaatggctgattaacattcaggtcacatgactcctgaggagagtaaatgagttacacagtaagacatcaaacaaattttcatcttgaaagagtgattgctttttctgctgctgtgatgtttgtcaaattcgctctagccttgtccaattaagctccatgagctgaattaataatgaagagatgtaagccctgcgccagcatgagagctgtgagtggtgccacggaataagaactgctaaaaaaaatttcttagaatgattgaaaaatcacatctggataactggaataattatttttgcaatcttgatgctattttgtactctccagtgcaaacgtgtgaactggattatgctgggatgtggtacttgttttgagttctgctttgaagatgaaggtggtttggggtttagaatgattttgaaagcattacgcaaatacatgttaattggattattgtttgtgaccctagtaatgaatttcatttgcacactcaattatgttctggggacttttagagataaagatctctcaagatttttaaaactatttgtagaaggaaaggagattattgtgtattctatttcttgtcctggatggaagaaagggctaaatcaagaactttagagaaagtttgtgtgtattggtgtgtgt

SEQ ID NO: 29601 - DNA, 1016 bp, Bovine  19866881055670
  misc_feature (1)..(1): n is a, c, g, or t
nacaaatactagaatatttcaagaggcaatgcgtctgtaatcattaagaacatatctttagaatcaggtcgatatggacctcggtcccagctctgcctcaggttagtttctgactttgggatagtaagtccttcctgaacatcagtttcctcctgcttaaaaattagtagtaatatacacttcataaagtggttggaggaattaaatatttaactgctgatcttcttcctgatatttgcttgcatgctaagtcacttcagtcgtgtccaactctttgtgaccctgtggattgtagcctgtcaggctcctctgtccatgggtattctctaggcatgaacactgtagtgggttgccatgcccttctctaggggatcttcccaacccagggattgaacctgtgtctcttaagtctcctgcattagcaggcgggttctttatgagtagcaccacatgagaagcgctcctgatatttgatgagtgaaaataaatgggagttatgattattgtaagtctggttatagttatcattaaacctagtagtcaaggccaccttaaatgtgattctaattcacctattcagcccagatgttcaccatgttcccttatttcagtccaaagttacctcccatcatccccagaatattcttaatgttttaatgctttctcttttcccttgttagcccatatgtttttctcaggttagaatacctcccacccatctctgcctatcaggagccctcatattcttcaaactctcactcaggtcctgttcttttctggaatgcttcctttatcacttcagtcagatgcagttttaatcttcttggaattcatttaactctaataactgcactatcaatatatctctagtacacaccacatcaagaatatgaatctgtttacatgatctatttccttgaactacagtgtgggttctaagaggttagtgatgtctctcccaccttaaaggtacaacagtcctttggtgttggtagatgatgatgttatttctctgg

SEQ ID NO: 29602 - DNA, 959 bp, Bovine  19866881086130
  misc_feature (1)..(1): n is a, c, g, or t
ntttttctcccctctttttccttcctaacattttccaagaaaacttacagaacaagaatttcaaaaccagctttctcatcctttcaccattatctattcccctaatatactctgacacataaagtataccaagcttggtcccaaagaaaattcttaaaacagttactattctacccagaaggtggagggagaggggacctaaacttttcaaactgaaaaaaattacatatcttccccccagattcataagaaagtatcagagtgatttaaaagttcagtagggcttccccggtggctcagagggtaaagcgcctgcctgcaatgcgcgagacccgggttcgatccctgggtcgagaagttcccctggagaaggaaatggcaacccactccagtattcttgcctggagaatcccatggatggaagagcctggtgggctacagtccatggggtcgcaaagagtcagacacgactgagcgagctcacttcacttcacttcatctcatttttaaaccatatttagattgaagatcatcaaaatactgtcatgttcagaaagttaaaaggaaggagggaaggggtaaaaacttcaggttatcttagctgaaaaggggccagtttctcactgtttgctccacaacatgagaggtgcattctagagacaggcaaccccacaagtaactggcagatatgtgaacagatcaaatagtacataaagtgggtttctccattttatataaccattaccatgagttttctataataattatgcaggaaactcaatatatactgagatttaggctggtgaaaaaatgaactcaaaaagcacagagctccgtgaactcaattttcttggttttgagagattactcgaagactcagttctttggactaaaataaagttcaagttcacactccaaggacgattatgaaaagaaaaccagatatagaaacctagcaa

SEQ ID NO: 29603 - DNA, 749 bp, Bovine  19866881109076
  misc_feature (1)..(1): n is a, c, g, or t
ntatttacagggctcttgtcttgtcattcactctacaagtcattattgaacacctactttatgccagttactttcaaaaagggaatggatatagcaatgaataacctaggcaagactgctactgtcatggagatggccttcttgaatggcaaagactgacggtaaacaagatcgtaaatagacaaatcagataacttcaggtagcactacgcactgtgaagtccattaacgccaaaatgttgtggagagagccttaggaaggccatgctattttggatcgggtagccggggaaggcctttcaggatatttgaggtgcatcctgcaaaaggaccccaccttgtggaggtctgctaaacaaaatgatggaataagtgaactcatcaggctcaatgttagagggagggccaggccccaccacttctgtggttattcattttgtgtccttttgtggatattcctaaaatctctccaggagccctgatgtattgcctctacaatggaggttactaattctgatcaccttgacaggggtgctctgaggaataatgggtaaacaattgtgaggagctatataaatgctaaataatgatcacagtaataaccttttattaaagtcagcactgtgataggcagctcacactcggatgccttggcaaatgtggaaatcgatgcggctgctccctgcacaccccagcaccatcctttaaaatagaaaaaataaatgagccgatgatcatgatattcaaag

SEQ ID NO: 29604 - DNA, 1719 bp, Bovine  19866881145548
  misc_feature (1)..(1): n is a, c, g, or t
ntattgtaggatgtatatctgtgcctcccctgttgtaacctttctgaaatcagaatgaacccaaaatctgtggcatcttagattcagtgacagcactggatttcaaccctggagctgcctagagatgggactaatatgtgagggcttacttacctatccaagcttgcacagctatgctctcagggtgtgagttaggccagaaagtgacaatgttagtctgaagattatgttttgggaagattatatgatatcaggtaactaagcagatgcaggcttttgatggactgaacgtactaaccacatttttttttttccctttcctccctctctctctctctctctttgctgtgtgtgtgtgtaacctcctgatctgtctcctccatcctctcatgtcatgtctggtttctacccggatgccaccaccaccgccgccaccaccactctttgtttctctctccctcttcctctcaaccaccacctccaacagcagcagcagttgcaagctcagcatctttctcacggccacggacctccagtgcccctcacccctcacccttcgggacttcagcctcctggaatcccgcccctcggtggcagtgccggcctcctggcgctgtctagtgctctgagtggccagtctcacttggcaattaaagatgacaagaagcaccatgatgcagagcaccacagaggtgagaggccgggcaagccagattaggaccttgtcctaacactcttacagtgctgcaaagtttgtgcaccgctaaagaaagccccaacccatacagagtgcaaacaatgagctaagaggaactgtctgtcgcaaagcttggccactgaaacacagttcaccctggaggttttcagggtttaacgtgggcatctgtagatttctccatctctttagatggcaggcatcttgacatcttggcaactgcctcgttaatgccagtggcctgtaccatattatggaaaactgttaactgcttaattgggtaattttcaaagaaagtaatgttgttaaatggggcgaaataagaagttaaatttgaaagtgaatgtgttcaaatgaaaggtttgataattgcatctgttactacttagtttcataggctttaattctagtatgcattaaatattgggcaaaattgcacttgactaattttttgaaaaaaaaaaaaaaagagtaatttattctgtcaagaaatttaaaaaaaataggcttttgtgtatggttaaactgtaaatcttatgtttacaaaatactgtaattttcaggaaatcactgtatgaggaatgtgcaatgacttatataaataaaagccatttttaaaactgtttggggcttgtgttctaattatcccccccttttttttatttctgttcttgcctctgtgtctgaacgggcatgtctgtgcgtttcttggtaacctcgggagcagacagagaaccaggcacagtaagtaccccgactttatgtgcctgctgcacataaaaacacgttcctcctcccacccccacggtgcaccccagccgcctttctgtacatataggcacagacacgtgtattctactctatctctctcagcaacttgtttttttgttttttttttttagtatgtctgttctctcccccaccccccatcttttgtataaaactttttatcagatgagagggaggcaaagctaagattactcacttaaaatacacttgatcct

SEQ ID NO: 29605 - DNA, 1606 bp, Bovine  19866881321438
  misc_feature (1)..(1): n is a, c, g, or t
naactgggatgttcatgcatttctagtctctgccagaccactgcttctggtgaacagagggtgagtcatggaatccttctgtgccttccttccacctccagcaaagcagggtaattagagcttgtcaccgattctatgtcaaaagggtgtggtgatggtaaccttgtaattatggggttctgggaaaatataaaaaaaaaaaaacctaaatagcagtaatatatcaccactcatccccggttggagattggcttattgagttggagaatttgccgcccagcaaatggttaccacttggaggcttttaagtctggaatgttagcactggaaggaattcctagagattacctagtgtgaaccccacagttgcagctggagaaacagaaacctggagtggtgcagggattgtatcaagtcacacagtgagcgggaggcagaacccaggtctcccgcctcccgccatgggccccccttttcctcctctgtctttgaccatcctgctgctttgggggaggctctgactcctgtctggagagaggggctgcagatgacgggaggctcaggatgcaacagctgctggaggctgcctttcaggtcggacacacaccattcactttgagctgaaaaccctcattcaaatacaactgggtgagccaggcaaaccagatgggtaattgactggagtgtgtagggagatggtggagagtgtggttcactgagtacccaaggaggtttggcacattatcgttccagccatccagaatatgaatgaccaaaccccagtggtctgatcctgtcacattagttttacttaatattgctatgcctgagctaagctgtaccctgtactttttacacatcaacttgaagagataaaatttggttgaaggagttggaaagagatgttagaaaaactgtacaagtagttttatcattacttttatgaaaaaaatcattaagccctattttcttccttccttctctcctctgtccatctctccctcggaacttcctactttctgcacagattttatttagtgtccattatgctctagatgggattcccaggtggtgctagtggtaaagaacctacctgacagttcaggagacataagagatgtagattcaatccctgggtcaggaagatttcctagaggagggcatagaaacccactccagtattcttgcctggagaagaatggacagaggaacgtggcgggctatggtccataaacttataaagagtcagacatgactgaagtgacttagcatgcatgcatgcatgctctagatagtctaggctctaaatatagtgatgaaaaatatgtatacaaagtctctgggccagagagagctgagagatgaaagaaagcaagtgaactacaaggaaatgagcaagacagatttttttgtcttgagagtgatcagtgctatgaagaaatgaaagcagggtgatacagtgcagaccaatggggcctctgtgaagatggaacttgagctgcaatgagaaggagccaagcatacagatctaggagcagagtcccccctgcagaggttaatagcaaatacagaaccttgaggtagagaagctttgtgagtttgagga

SEQ ID NO: 29606 - DNA, 1452 bp, Bovine  19866881329448
  misc_feature (1)..(1): n is a, c, g, or t
ntttggctttaaacccttgcagtcacctaaagacagagtaaggaagatcttggttatgctgccaaaaaaaatgcaaacattaaactttatactatgaagctcacagaaagtgggaagtgcaaactgaaggaaatatgaagagaataatagtatcattgacatcctcaacttctataacgagaagtcaagtctcctataacaagacaagggtaggaggaacctacctcaacatagtaaaggccatatatgataagcctagagcaaaccttattcttaatggtgaaaaactgaaagcattccccctaagatcaggaacaagacaaagatattcaagtttttagaaagagaaattgaggcatgacataatatttaaagttacaagggtaaccaaaacaaaacttaaaaataatgacaactgccccaaactgggaggagttggcaggaagaaaaagataatgtgaatgagctaaatgtttaccttttgtaactggaggccattcataaccaagaaattgaaaagaggaatcaatttctaaacaccccatatattcaaagaatgagtaattcaggagttattttttataggcatcaataatcttaaggacacattatagtgctgatgatcttgtagtcatggcattttttcccattccattatccatgtccagttataagattatatttgcaaacaaggtcatatctgttttaatgctttttaagttttttctcagaattatctctattattccacagagtactctttccaaaagtcatagcatagtatatggccatgtggcctcttgatggtattttattatatctaatttctcttccctaagaatatattctcagaattgggattttgctcccactggatgaaagcttagatgagctggttataggataaaaactatttttaaattaatccttaaaaataatataaaattcccttgaattacttctagacgtttgtatagcagcatggtttacaggctcctgttaaaacatggcagaggcaagtaaaactctgctgtaacttcgtaactgaggtacaaaacatcccgtcgtgtaatgtgtgggaccaacttagtgcagagttaatgaaatgaccaacgtgagccggctgcaggaagacaggagccaatcaccaaaattgtcatatacaaatttccattatcaaggagtgtgtaattacaagttccactgttcttctgattactggctagagtggcatgccacatggccacacagataaacacggttgccatacacgttgtttgctagctttaaattatgcaattcttgattactcttggcaagacttaaactatttcaaattttgcacaaaattggtacttacctaataggccaattacactatttcaaatatgcattattctaatttttctaaaatatgagtatattgtaaaagaacagtatttacttttttaa

SEQ ID NO: 29607 - DNA, 1287 bp, Bovine  19866881365460
  misc_feature (1)..(1): n is a, c, g, or t
ncatgcacacacaaaattattgttgtatgatctctgtaagcaaacattttttatgtctagttttttaccatatgaaattatcttctaatttattagtctgcttatctattatctgtttttttttttttttttcacaatggaatataaacttctggagagcaaagactttactttctctataatttgcgtttttcatgacatttggaatcttggggattgaaagaatttacagagaccttgtagaccaagtgcataagagggtgtaggacataactctaagagagttaagtatttaagaggtgaataatagaaggaagcttggcagtgcagaccaaaggaacatctaagcagaaagaggagtataaaatcatgggaagatattggaagatagtgttttaaaaaggaggtcagagtcaatagtataaatgctgcctagaagataaatatagtatctaatggttgtaatgacttggaggacactggtaaccttgggggaagtatgcttcattgaaatgatgggatggaaacaagcctggagtggacacagagagtcatgagagaggaagaagctgaggcagtaattgtgaatgacttaactccttcctgaaattcggcaaggatgtaactagagttggacatggagctgagaaaagaactttttcttttttttaaaagtagaagatagttgagctaatggactgaggctggaagagaagttgaaggaaaaagagagatggagaataatggatgtcactaagtctgtgagaagtcagaggggtggaattggaagatggggagaaagggttcagaaagagtaggctactgcttctgttctgataggagagaaggcaggatatatactcaacacctgctgtgaggaaacaacaaggagcatgatccccgtcctcgagaagcgacagtccagttggagtggcaagacattgcaacagaaaagaataatactctgtgataagctggcaggcaatgagtgctggggcgtttgagaggagagcgagatgagctcctgatgctgtgatcaaggaagacttcaggagaagtggcatttgattttgaacttgaaaagcagagtaggattgtactagctggagatataaatggtaagagaaaataaaggagaaaaaagtgcatttcatgtagaggactggcatgaacaaaggattgaagtactgaacttcaattagtttatccctcagcaaagaaacagggacttcttttttggggggggtctgtactctcatagaacacagcaattgagaggaagaaaag

SEQ ID NO: 29608 - DNA, 911 bp, Bovine  19866881520859
  misc_feature (1)..(1): n is a, c, g, or t
nattgttgctttcacaaactgtaaattaactgtatcactaaacccactttttagtgtggctcttggggctaatattgttattattttttctttaaatggtagctgcttctgctgttgctaagtagcttcagtcatgtccgactctgtgcgaccccatagacggcagcccatgaggctcccctgtccctgggattctccaggcaagaacactggagtggattgccatttccttctccaatgcatgaaagtcaaaagtgaaagtgaagttgctcggtcatagtggtagcaaaactttttcaaagacagaaacagtgggttaatttacattcttccatcatggtcttgtactttgagcagtacaagcctgtatcttctgtttacttcctttattccatgacttagttttttacctttggaccatctgttttttttcctagttcttaaaagtagttgcttctttggtgtcttcatttgtcttgtgactgtctatccattcctttgcatagttttccaacttccagtattatttggcacattgatggctgtccattttcctccttgtaaattcttgattttatcctaaacatactatttaaggttaaatcactgggtttccttgcagcctgttctttcctgtttactaggaggaaatattttcatagttcatatttattctaaaaatagcatggatggtgtgcaaaaatatacatttaagactctgggattcagattctccttggatccagcctttctgtaatatttggccataggcagtcatgtagtcatctaataaatagaattggctgcctgggtggagatttgtagaagatactactgtcagtgaataggatgggatttggaaagaaatgtctaaactgcttctcagccgaaataaccggatatttaattag

SEQ ID NO: 29609 - DNA, 664 bp, Bovine  19866881645875
  misc_feature (1)..(1): n is a, c, g, or t
ntcttcctgacccagggatcgaacccaaggtctcctgcattgcaggcagactctttaccagctaagtcaagaggtgggaagtagtgcagaactgctctgacaacaggcagcctctcttgaaagaaaaacaagagaaagatgccagggcttgaaatacgaattaatccagaaaccaaataggaagacttttgttcatatactggaggaagtaaagaaatatacccactatattcctataacctagaaatattattttcatgtgatagggactgaatccacaagcaatctttcagtctgctgtttggcagaatccaaaaagcgtgagttgcagggggaaccaaaagagatgaaaaagatataaggatgtgagcatgaacgattctgtgttcacagacttctcttcgtgtgcccatactctccttagataaaaatcaaaacggtatctaacagaacaataacataataccatcaaactataaataccaaagttaactaaagtttaagtttcacatttactgaaaatctaaacaaactccttgataattaatctccgaaatgtatagctctgcttcagatatgggcacataaattataataaagaacgttggtatgcaatttgattctaagtgctttttagtaaagtacataatgatgcatgctgagg

SEQ ID NO: 29610 - DNA, 2075 bp, Bovine  19866880596483
  misc_feature (1)..(1): n is a, c, g, or t
nctccctttaaatgtggggttcgtttgctacctcaaacccaaaatggcacgtggtaagtattttcgcctgggtaccatttctgtgcctctaatgggtttcagggaaacactgtaggtgggttggggtgcagacatgcggatgagctttctccaactgaggactgcaggccacacaggcctgagtgagtgcagtggcacagatgggactgcactgggaccacacagatgcacaacctgcttcaaatctttcagagccagaaattcctggcaactaagaggaaacagagaggcagcctggggtactggaaatatcactggcctggagacaagggaaggtttggtgagattgtgggctgggtaatgaaagggatgcaggaagtcaggcctaggttccctgtgcccagtaacagccagagctgttccactctgattcttttatagactgggcctctgcaagatgccttctatttaaagagcagctttttgctgctttaaacaaggtttaatcactacaaggggctaccctggtagctcagctggtaaagaatctgccttcaatgcagaagaccctgatttgattcctggaggaagttcccctggagaagggataggctacccactccagtattcttgggcttccctggtggctcagatggtaaagaatctacttgcaatgcaggagacccaggttcgatccccaggctgagaagatctcctggaggaggacatggcaacccactccaggtattcttgcctggagaatccccgagagccaacctgggtggatggatgaggctgcaggacttgccatcagttggatgaccccgaagacaggccagtaggtcgggtggagggtggtggtcaggttgaaagtcaaagacctggcaaacagatggggattcaggacagagaaactgaggcatgggcttattgatggaccctctgcccagtcatgctctggctacaaagtccagtttcttttgtgaagtccaaatccttctgttatggatgattttgggcccctgtcaaacatttgatgggtttcctttgtcactgccacacattggggcaggttgactcctgaaatctgggcaaacagtgccacatgttaaacctgaagacagggaagaagactttgtggtaatgctgaatctgccagccctgtgttatcagttagaggttccttggccattttttggtttgtttctaaagcatttttgaaccctgtatacatcaggagttaaaggagatcttactgtgccccacaccatttttttttttttagatgggctatgtcaatcaatatttaatgtattatttaaacacaacaataacaaattcattccagatcagcaaaaataacatattgtttaaagataacttatatttccccaaaataaaataattactgagtagaatggcatcattttacatgttttcgaatctcattaatatctgccttaatagaaggcaggtgggttttcatatctgcttctatatacaatctgcagcaatatcacatgtaaactccataaccttgtgaaagaaagagagagaaaaaggcaaataatgtcttagtagtattacaaaaacagtttgactccacagacctctttaaaggattctgtggcccctaccatcccggggtctcaaagaccacacttggagctcctgctgtaggggaacacagagttaggattcagaccctgtgaagttaaatgttaagtggatggaaaatttccaagtgatatcttctttttcctcactgggcctctgtgtggcccccaatatattgtctttaccgactgagctatcacggaagctcagttggtaaagaaacaaaagaaaagtttttggattttttttttttttttgacagctttaattttttagcactttatttttttttttatttgataaatttaatgccttttattgccatacctcattttactgtgctttgctttagtgagctttatagatacatgttttgttttgttttcttccttgttaattttctgtttagttgatctatccataagtgtgagtggggtattaaagtctcccactattat

SEQ ID NO: 29611 - DNA, 1180 bp, Bovine  19866880617358
  misc_feature (1)..(1): n is a, c, g, or t
naattcctttagaagattaattttggctaagcagaccgtcattgtgtttcttgaatgaattcttgggatttatcaggctctgaaaaactgccaagatgaatcaaaggcagacttgtcatgggtcttggagaaggaatgggatttctggggctgctgtggatccagtagccaccccctccctcacacccttctccaactcagcacccttactggccagctgtactctcaaggtctctgttgcccaactcagagagtcaaatattttggcaaagaaggaaaacagaccccagaatccagtggttaagccccacttattcttgacataattgcctgactccagagtcctttctgccaaagcacgtgagatgaaaatgtttacgcagatcaactgctgcagaagggttaggaaatacaggcatggtgcttgtgcttctgtgcaccaagtcaaaaaactcgagccagagattttgatgaggagcagccaggcgcatgccagctctcttggaaggataatggtcacaggatgcttcactgggcaagtcaagcacatggaatcctgtgtttgcattcatctacaaatgccaaaagaacatgtcccctggctgagattgaatttttttttaaagaatacacctctctaatcaaatattcttttcatagaagtgctacacagagagaaaacaaaatatcttatcttccaggagcagagaacataatccaggacacttacaggaggacctgcaaaacacaagcagagaagccatagtaagtatcaaagggagcagagggtcccctcaccccggccagccccttccttgcacagctcccagtcacccctccttgcaaggttttgatgcttgtgtcagggcagagggagcacctctgtccttggagggactggacgggcatgtgcgtggttatgacaatccagcaagttttggtttgtgcattcatgacatgaggctgctgttgcttcctgcttggggcacacccatgttgggctttgccaggcagggtaggaatcagatctgttccttcttgaagaatacattttggagctcagtggggggttggttcatttctgtggaaagggagatacttgagaaagaaaacattttgggcagaggggagaatactcctaacaggcactggctatgtgcttgtgtggctgagcagatgt

SEQ ID NO: 29612 - DNA, 1489 bp, Bovine  19866880669717
  misc_feature (1)..(1): n is a, c, g, or t
ntgggtgtactgtcctcacttcacagatgagaaagctgaggctcagggagttatgtgcccagcacaacaaggaatcggtgagctagtagagcagttgccctgataggggaccctggaggcagtctagggggtggtgccagctctgcgctggaggaagcacagtccaacctgagcccttgggggagggaaaggggggcggtacaatgaggtctgaccccgctgtttggcttaggactaggggcacaacagtggcttcatatagggagaaagagagagagagagatggagagaaaaaagagagagagggagaagaggttggtagagaggtgcagagacagggtttcagggtcaggactgggactgagattataaccaaggtcagaatctaaatgcagttagagattggggttaagagttgggccagagtctgtaggtgtgagttagggcttggataacagtctgaactgggggtgtggatctggatttggaaatgagtttggggtcgcccctgggtttgattcctgggttgggaagatctctgggagaaggaaatggcaacccattccagtattcttggctgggaaatcccatggacagaggatcctggcgggctacagtccgtggggtcacaaagaatctgacatgactgagcgactaacactttctctttcacttgggatcaaggcctatgttggggtcaaggacctggtttgtgttagattaaggtgtgattggagtaggagtctgggttggggctggggataggagagggtgggggttggttgtgggatcaggggttgggaggtttggtaaccacgtcccgcgtggtccagctccatgccctcttttacctctgggcctggtgctcccctggggccatctttcccagtgtcgccaggagggccccgggccccagggggtcctggaggccctggaggcccagcagctccatcttgccctggatctccctgaaagagatggggcccagcatgactctgagggtgggcggagggagttctggcctccagagagagagatagaggccttctcagaggggtggccagatgtcttcgccttcccagcatgcggccggctcagaggaaagggccttgttattgcgcctcttgctacttcttggtatacaaagggacaggacaggtcccttggtatataaagggacatgacctacacctctgcatgagaggccaataggatctcgtaccctcccccatatgcatcattgctccagctctcagtgcctgaagcccagctatggagttcaggtgagagatgagatgtattaggtgtgggacaaagcacacgtgcccaaacagcccccttccttttggaagggaggggactgtttgcctcctgaaagaccttcctggtcgctcagctctggctttattaagtgctagaggcacactctcaggcatgatcccagagaaacactaaaatattaaaattagaaacatgtccacacaaaaac

SEQ ID NO: 29613 - DNA, 1460 bp, Bovine  19866881050578
  misc_feature (1)..(1): n is a, c, g, or t
nagaagttgtggtacatatacataatgaaatactgctcagccataaaaggaatgcatttgagtctgttcttatgaggtggatgaacctagagcctataatacagaatgaagtaaatctgaaaggaaaaataaatttaatatattaatgcatatatatgcattataatgtgttaatatagattaatgtattaatgtatattaataatatattgatacattttagttattaatatattattaatatcaatataattataaatatataatataatataataatatacagtggttaacatatattaatatgtattaatatatgtttaaaattgatacattgtatattacatataatatgtattgatatattgatattaattatattttataattatcaatcaatatattaatattaatataataataaagtatacttatgcattggtgcattaatatatattaataatatatatatggtatctagagaaatggtactattgaacctatttttaaggcaagaagagagatgcagacatggagaacagactttgtacacagcaggggaaggaggaggtgggacaaattgagagagtagcattaacgtatgtagattaccatgtgtaaaatagccagtgggaagttgctataggcacagggagctcaacctggtgctctgacaacctagaggagtgggatggggtgggagttggggaaggagttcaagagggaggggacatgtggatacttatggctgattcatgttgttgtatggcagaagccaacactattgtaaagcagttatcctccaattaacaataaatattattattttctacaaaacaattaaaaacactcagttaacttttgaatggactctgattgatatgaaggaatttgccatgagggaaaagggatgaagactttccagattatgaatgattatacaagtaagagaaatctcatgaagataatttaaaattctgtcatgggctttggactctgatcccagactgccttttccaatttatggctccccttttaatccttctccattttcccattaactgattctcctggtcactcttacactcacactctttaaatgggtttgtttagtattttctccaccctcttgttctcagcttgtgttggcttatttctctgtactgcttaattaaaactcctaagtttttcttattagcttttggccagattttgagaccttatttgaataccatcagtattcagtctatacatttagtagccaaatgctgtatcacatgaaacattttcagttttttctttcctctccaggatggaagaacagttataaaaccacaaagtcaactcaaacacaagatcgttcatttcaggaactgataatgaaaagatccaaaaggagtggaccctgggacttcaaatcagaaaaaccctgcagatatgaaggcagattagagaaaaag

SEQ ID NO: 29614 - DNA, 1215 bp, Bovine  19866881060059
  misc_feature (1)..(1): n is a, c, g, or t
nctggaaatagtttcctttaatactaaatgtttctttaatccttgcattaaaatttttactgtggtatagctgttttactctaaaatttaagcttttgtaatactttaacttagatataactaatgggggggtttgattactgaggcaagctatttaaagcacttaaaaagcatcatatcagatgcttgttttgcatttatattttggggtcatactgaagattgttaaggactcttgctccaaagtcttgcttattttctgaaaaccatttatttcataccatgggaagggtctttaataatcatgagttatcatgaatattcttttttgtagcttctgtatttatgttatcaggcacatcaatcagtcccaaagaagttatttcagggttccgttcccaagggaacaaagacagtgggttccatgttaacagtggcttttgtaggcttatttttatttttctgacatgaaagttgtgtatagttggcaaggatttctcttctctgaaaacaagcttgttggtaaaaggacaagctgcaggcaccatcacatacacaaccacttcagcacaggctgaaaggatgctttctgagaacaattagaactgaaaatcatgttcaagtacaaatgtgctttctttaagagatttttcagttcatcatttatttgtctttgatattgaatagttttttttttaagttatattcagatctatttaaaaccaattaccaactcccactactgcacttctcacagtcccctcatttcagccaggggctctcagggtcactgtccaggctgtatacatttcccatccagcgacatctgtgagaagaatggctagaaggaacagcctggtgccctgggaaagagatgccttttcacagggacacgcaaacagccagaagctcagccatgactgcactcgtagtatggcatctcagatgctccaagtagagactcctccacatcaagtctggttagctgagatgtgtcctatgctaaaggtatagcctgcagaatggaacagcaaatttcaagtgaaaatcccaggatttgacattttccttcaccttactactgaagaagagaaaagagggtagtgggggagagagaggtggaatactctgcctagtaactccttggaagcaggatgaagcaactgcaatctctcctagatctacgtagttcaggccttaatccacacctctcag

SEQ ID NO: 29615 - DNA, 1687 bp, Bovine  19866881167288
  misc_feature (1)..(1): n is a, c, g, or t
nccatttcagctgggcccattggagtgggttgactttttactttggcctcaccatatggcatgtgagatcttagttccctgaccagggatcaggatcaaaccccctgccccctgattgaagtcttaaccactggaccacagtggccacagtattgggggcatagagtcccttctgctccaccaccactacctctctgggtccacagcctgagctggattcagtagtgtcttcttctcctggaacatcagtggaaccctccagtcagaaactcagcctagaattcttcctcttcctgtgtgtagggtgacactttctccctgaagtttagggtaggcaccagagtcgttgcagcctacctgcatctggtcaccatttcccttgcaatagctatctgattttcctgggagccactctcccttttcacaattcaccaactccacccccagatccaggatggagcattatgagcaggtctggccagttagggaactgcattcttatggccgagtgacatttcagcattggcccagctggggccgatgagagttgatgagactttttctcaaagagtaacgagtgaggcaaatgcctttctccaggatttggacttagagggatgcaagtttggagttcttggctccatctcatcaccatgtggaaattggaatgattcaagaggaagaagagacaagagagggtgagaggttgggttgtgttgacatacttgagccccggatctatgtgtcacacatatggagttttcagttatgagtcagtttaaaccagtttaacttgtgtttcccatctcttgcaaccaaaagatacctgatccaatcaacattggattaataattctcttctccttcctgcagtactgccatagctgaagccttatcatctctcaccaggatattgcaacatgctcctcactggtcttcctacctccctactccaatggatccactcaccatcctcggtcatcctccatccgtcatctgtcaagctatcatccatccatccaccatccatcttttgcttgtatccatcactcatttacataccatccacccatccttcctctacccatccctccacccacccatcctttgtaccgtatccatcatccaccatccactcaaccacccatctatctatcaagaaagcacctactctgggctgtgtgttgggtttgcactgtggacaggggtggaaccagccagttgtagtctagccatggggaatggggacacatccaagccatccagagggcagcatgagggcaaaagttacaaacgggagagacccagccacagtggatggtgagctacttacatctagtcctggctccccgggtctgccctgagaagagacaaagaggagatgtgaggaggctgagaaggaggtgttgggaacacaattcacagccctgtgaattgtccacagaacctggactctggccctagggaccagtgaagcgcaggggttgagcccccaggactgagtgataccatagttgggggacattaaaggaaggtggttaccttctctcctttggttcctggcagcccaataaggcctggtgggccagctggcccctgggtggaaaaggaatgtgtcaagagtcatgacaattacagaaattagcccctctgaggatgaacaaggctcatgacactcacaggcagg

SEQ ID NO: 29616 - DNA, 1210 bp, Bovine  19866881313422
  misc_feature (1)..(1): n is a, c, g, or t
naaacccatgtctcctgcattggcaggtggattctttaccactgaaccacgaggaaagtgctcagctgtcttgatatttgctaagatgtggtagacactgttggtagaggttgaactcggattgtttttgctaccatctcagtacatggacagtgccagacatatagtagatgcctgtacatgttgattgatgacaactagactgattctaatgaaaggatcatttggaaacaaacgaagaacctcagttcacatcatttgcttaacagctctggatgtgatcatatgccaatgcttttatctcaggagttgtagaagagagtgctttatgtatcaatcttcttattaagaccagacgacaaaaccttccctgtctctcagaccacttctctaatgaggaaaagtagtaagtaaaaagatggggaggagtggggggaggtacggcatctttccagtttgaaagctgtatttaggctgggacagttgtgcctgtaattatcctgtctgagttgactttaataagcattatttttaatgctttcctctcaaagggaaaaaaagtgatttttgcatccaagtgtataaaacagctttattcactaagcttgaaagacatagtcatcactgttcgatctgtaccgactctgagccagaaacctcatatcagagcctgggccagaaggtaagaattgattgctttcaaagaatcacaggattcaggctggcccaggtcctcctcctcttcccatgaccatctcccagtggtagacatgtgggaaaacagtgctggatgcaaggcaggcaggatcaacctcttgagaacctgacatttaaaccatgtcctcttttcaggtttaaggcatcaccatctgctcattgccccagctaaaaacctgggttagtccctttaaccctgcatttcaagggtccccaccaggctaatcagcaccctccctaccttacttcagacccttcacattctcctgcttccattacattttatatcttcccacctaacttacctcttctttttcttctcttcaataaactgttttttaaaaagaataaaagtaatatgactacatttggaaaacagaacaaagaaagaaataatcatgtataatacatcataacagctattatcaacttttataacatttccttgtagtattttatttatttatttaaaccacactgtgacatgtaggat

SEQ ID NO: 29617 - DNA, 1183 bp, Bovine  19866881540579
  misc_feature (1)..(1): n is a, c, g, or t
ncagcctggaccctgtggaccctggttgtaaagagtaaattgtatcttagaaaacccagtgtcacctttttttcaccttttagttttatattatttgtgtcatacatttcctataatggaagtgttaattttactgtactttttggtacctttcgggaatctaatgtattgtaaggtattttacacgtgtcctgattttgccacgacctggatattgaagctatccaagcttttgaaataaaaatttaaaaacccccaagcctgggtgagtgtggggtacactgtgaaggggggcgggtgctccagagctccagtatcctccacgacctcctaaggcatcctgtcaggcataaccacacactgtcttcatctttggttagtttcctttaatgacttggccctgcttaggacttggcgcagctttaaagaaagtggagtggcagaggttggaggcagttgttcaaggaggtgaagacagtacagtgaggattacaccttcagtggggacgctggcccaggccagttggagtctggagtaccctggaacacctgtcttgacttgccattgaaaatggtattctatcccagcgaagttgtgaaacctaaagacaagaggggatacacaaaggaccagctggatctgggcaacagtgtccctcctggttgtcatgtaacagccccatctggcagtggtatttgctggcttggctggagtgccaagtctagtgacctgagacctaagatagctggttttaagatgcagcacttgtctggggccagggtggataaagcctcgcaaaagttctgtattttatagaggaactggctggggaaggaaatagctatcaaatgcaaacttaaggactcaagattttcaggggtgagggatgtggagctcaaggcacccagagcctcccagtgttgaaattaacctgtgggaaaggtctaccacttggaataaacatacgagctgccgatggatggtaaggaagccaattctgggtcttctgggaacaagaagcaaggccacttacctagagaaagacacctctcagcagggctgcctcaggagtggagcctcagggtctcacaacttctcactttcgcttccatgtctgaaaaataccacaggaccactcaaaatggtccaccttcaaaaatacattcccttctcccagcaggt

SEQ ID NO: 29618 - DNA, 1416 bp, Bovine  19866880017277
  misc_feature (1)..(1): n is a, c, g, or t
ntggggctccaaaatcactgcagatggtgactgcagccatgaaattaaaagacgcttactccttggaaggaaagttatgaccaacctagatagcatattcaaaagcagagacattactttgccaacaaaggtccgtctagtcaaggctgtggtttttcctgtggtcatgtatggatgtgagagttggactgtgaagaaggctgagtgccgaagaattgatgcttttgaactgtggtgttggagaagactcttgagagtcccttggactgcaaggagatccaaccagtccattctgaaggagatcagccctggaatttctttggaaggaatgatgctaaagctgaaactccagtactttggccacctcatgcgaagagttgactcattggaaaagactctgatgctgggagggattgggggcaagaggagaaggggacgacagaggatgagatggctggatggcatcactgactcgatggacgtgagtctgggtgaactctgggagttggtgatggacagggaggcctggagtgctgagattcatggggtcgcaaagagttggacatgactgaacaactgatctgattcagtaagttagccaattcccacaatttttccaacattaaccaaaatcaactaatacaaacttcaaataattccactattctatatccacactactctcatgtctaccagagaaagcaaacaagtggggggaagcccaaataattacaagcaaattgccgagaaaggcctaaagaagccacacacagaagttgctcagtcatgtccgacttgtagcccaccaggctccttggtccatgggattttccaggcatgaatactggagtgggctgccgtttcctttctcaatctgtgattccagaaccagacgcatcatctgaaactagtgagaaatgcaagttttcaggctctactccagacctatggaatggaaaatacaggccttccaggaacttctgatacagcttttataccacaagcctttaaaaattaaacccaattatttaagcagctttggcaatgttttccactaaagataaaaattacaaagtatataacctataaattagaacgttaaaagtatgttttaattagtctaggttcaaaagcaaaaataaaatgacaaagtttacccaacatcttctcaaaataggaaacagtcaccatttcaaactcaaggaggaaaaaaaaccacttagatctgcctaaaaataaatgggcagattttaaaacttctacagaacaatcatcatcggtagatgccataaatattgggggaaacaatgttggaaaacaagttatttacaaaatttccaagtttcgctccactgggcatttattaatttcaaatacaccattagaggaaaaatcgggatttcataataaaattat

SEQ ID NO: 29619 - DNA, 1161 bp, Bovine  19866880534128
  misc_feature (1)..(1): n is a, c, g, or t
ncaaacttatttcatcacccaagagcatagaagaaattatgccattgtgcctacatgcaccactgaagtagaggataggagtggggggaaaaaaaccatcatacagacatacaccaacataactatgtagcttagagatcctggcttacaaagtagtgagaaaacaaaaggaacagatgctcacttggccagctctcaatgaaactcattaaaatcatcaccctgtccttggatcattgctcatgctaagattttaccttgtttagccagaagtcacccagttgtgatgaaaactgaaaacaccatggcccaaagataaaaagattattttcaaaggcccaaattattggtcccccatctcaatgtacaaatgctggatataaaacagggtcaatcagcactagatggctgtgactatatgaccaaaaaaataaatatgttaaaccgtaatattcagattttgaggtaaatcattaagatgttctaatttatgaacttaactgattaattctacctatttcaccataatttttaataaattttgacatttctctatggatcattctcaaaggttgtattttgtatgatatatttccagttgataaagtaggtcctttaccaactgaaactacttcatgttttaagaaataaaacaaaataaaaaatattgccatccttcgagttttatagcaaagaatgcagacacatgatacaaagcctggctctaataataacagtaacagacagcctgaatgcgtaacacaatagattaaactagttaaagttgggagtgttgtaaaagtgacaaattcctgaatagttataaaaggcagtaattttgcagatatacagagtaaaagtctggaaacagggcccatatgggaatttcacttaacttctggaataagcaaaatggttgatacctaaatttaggtcaaagttcctgagtaattagagatggaaaacttgaggcaaagttgttacaattattagattgtaagatctctaatacctaagattattttttgtatctagtctattgatacagcaaacatttatacatgagaaacaagtggttccatatgcatgattaaacatacttgtccagtcagatcaagacctccaaagcaatatatttatcaatagctactcaataaatat

SEQ ID NO: 29620 - DNA, 1085 bp, Bovine  19866880536884
  misc_feature (1)..(1): n is a, c, g, or t
nctaatggatataaggtggtaacatattgtagttttgatttgcattcctctcatgatcagtcatgttgagcatcgtttcatgtgctttttaaccatatgtatatcttctcagataatctctattttgcttccctgatggttcacatggtaaagaatctgcttgcaatgcaggagacccaggtttgatctctgggttgggaagatcccctggaggcgggcatggcaacccactctagtattctagcctggagaatccccatggacagaggagcctggtgggctacagtccgtgggggtctgactaagcacagcacaatctctgttcaagtcctttgcccattctgaatagttgacacctctacctttcatatatacggtgaagtcactactgctcacacacttgttcatggcacatcagtggcacttttgggctgtcgctttcttccccatgtctgccttgtccctcagctcccataaatgtagaatttacacataggatctatttgtgtgttgatttttagaaatggggcagaatttgaaaactgcatgacagtatttcagtacctgaacttatttcaaaaaaattctctttgcagacatacaacagctgtgccagactctgcttaaatcaagagacagtatgtctagcaagcactgctatgaagactgaaaattgtgtggccaaagtaagtaatattacacattaatatatgttatgtcacatcataacaatggtttatctatagatatctttactcagtaactaaagagtattatagaattgttaaaaagaatacagcaggcatcattatgttcaaagcagattgcaagttggagtttctatctcttcagtcgcagcagaattttttgattgtgttctctggtcacactttagtctaattcacatttgttgcttgacactaattacggtttattacaaataagatttgtgtgggatatccctagcagtccagtgtttaagactccaagcttcaactgaaggggcacaggttcgatccctagttggggaactaaacattactgtgtgtcagttcagttcagtttagtcactcagtcatgtccaa

SEQ ID NO: 29621 - DNA, 1155 bp, Bovine  19866880539323
  misc_feature (1)..(1): n is a, c, g, or t
ncaggaaaagatgggactcttatgtggcgttctgagcataggcatatttaaatgggccaagagatgggtccttaaaatggagggcaagaagtgctctgtttattgccccatgccctggaccctgcccttttatcacttcaccagggaagcctgaaaggaatcgagaagcagcccaaataggctggttcgcctccttaccaccacatgtggaggtagagggattctcttccttcttccactcaaaaggcaaggaaggctacaacttctgactgaattggtttccactaagactaggagactgaggaacagagcctataaggggttccctagccaggtgagaccagcacctgggagattaccttaactctgtcatcgaggaaggagttctgagtaacagagattaaggagaagtagaaaagacactagaaagtctgtcccatacaaataaatttttaataacttcaatttgccaccagcttccagctcctgctcctctgaggttcatcaatgtggaaaacactaaatgccccaggctgaactatccatctagtcatcagagatgacccagcccctgatatcttaagaatctacaattattcacggcagcacaatgtggattctctggaacttgctcagtgttggagctggaactctggttcccaggaagggcaagtatcccaaagacacctgaagtggaagagtagcctgggaggtcccagacctgctctcccagctggattctggcatttacttccagattcttcctatgctgcttgctgcctaccatcctgaaggctttaaaaagtgctttagaaagggagggtctcagaggagcagcgacttcaaaggcagctgtggggcagggaaagcctacagcagtagtcccatggaggctgtccagaggaggaaacacaggccaacttttcaaaggtcggcctctccatgatgctcacctggcttgtttcagagcctggccctggcaagctctctcccttgcaggcaccagaccaccgcaggaacagattcctccccagaggaaattctcaggcaggctggatgtaaacaacagccgggtgagggggtggaacacgtggaggggagctcagtagaggcaagagaggctcccagaggagggggggctaaggaggtggggaa

SEQ ID NO: 29622 - DNA, 3490 bp, Bovine  19866880553772
  misc_feature (1)..(1): n is a, c, g, or t
nacccgggggtgggggcagcagctccgccatcttgtggatgagaggccaagtgacagcgggagcctaatcggggaggggtctctggggcgcgcggggccctggagagtaaggggcgtagggacagttactgaagagctgaggaggccaggaggagagacgccgtgaggccgctggcagggccttgccggtgtgagggttaccgggtgaggccctggagaagaggttcattcagtagtggggaaggggaacgctggacagtgggaggaaagatactgggagtgggaggtgggtgggaaaaacgggcaaggctggatgcggatgaatctaaggtagagcagagagaggactggtgggagacttgcagtcttgtagagtgagatgggaaagagagcctttgacttcagggtacaatcccagcttggccaaactaatgttgacaaactctgggaagaactaggccttacttaggaaggaaaggactggggacggggatctagggctgtgatgacagtctttgggaaagggaaaaggttgaatagatgccagaattacaggtatcaggaaagggtatacatcctctagtttgaaagaagacagaagaggttcactggttagggaaatccaggtacaggagattaggggcgaaattaatatctaatagtgtaaaccaaagcttaatgcaatatcgtagagacagtaaaatgtggagaccaggtgcagtatcactttctgggaatggaaaggctatgcagattagcatccaaagacccataagaagtaataagatcactggagaaattcaggagataaaagggggaatgcagatagtggagaataatagatgtcagggttagtagttacttaggagttttaggttgaagttttaatccttgggagtctagttctttaactttgtatcatgcttttctttttttgatatgtgtatgtttagcacatttgtatagctatttgatgcatttaatctgatgcttcatttgtatatcccagatgtaaaaccagactttgtggttacagctaaagaatgatgggatgcatagacttctttctgtcttaactggtgtccatagggaccattgatattatttgcagtctatttgctttttcagaagtaattgtaacctgtcactccaaatctttatttctgttgttagatagttgttttgtgtccttgccttagataccaaaacaaatgtaaacaaaccatgaacactaacctaattgaatttagggtttaaactgctgcatttacaagaatataatttaagagtctggtcaaatttactataactttatttattttgtattagtgctttctaaaatgcctaactaacgttcaagtgtatctttaacaaaatactattagacctgaagaaagatcttgagtttctgcccagtgttgaaattctaaaatattaagaggcttcgaaattgttttggacttcagaagtgagacgaagttgctttgtatgtacagccagcttctagatttaagtaagaaaagtgacagctgcttatttttgtttttctgcttagaggttgactcaatcctaatcttgacacatgtcagatttatggaataatgtggttttaacagatcataaagggaccttatgagatcatcttctttactccctgatagacctcatcctaggaacattttcaaccaattgatctctgctttgtaccagtgagttgttttgataatggtctcctgattgagttaaagttagagctagagatggccatgagtagtttgaagcttttgggacaccacacattattaaatgttgagtcagtttccataaggagaaaccaatttttcttcaattttagttactttcatttttgaccttgcctgctgttaatggctgctgtttgcgagaaggccaactggaaaagggtcaccaagaatgacaccttaataactgaaacagaatggagagttaaagatttggtgttctttttcagctcagtgctgtgcttagttgctcagttgtatccgattctttgagactccatggattatagtcccccaggctcctctgtccatggggattctccaggcaagaattctgaagtgggttgccatttccttctccaggggatcttctcaactcagggattgaacccaggtctcccgcattgcaggcggatcctttaccgtctgagccaccagggaagcgcttttcacctcagtaacagtcttattatgaatctaagtcacaacctgcctttggtcccatttaccctgttatgtttgtttacttagtcatttgagataggaagatattttatttgtgcttgcacctggtaattaatgcacagtacacatggaaaagattatccttttaatcatattgaaatttttatatagtatttggctttattttgtcctatcctttccctcaattctgaggtgtgaatgacaatttttgtataggatgccctgatttctacagtttaagaaaatataaaattttgtttaaaataacatgaaatggatattctcttttctgaattttgctcattactgtattgatgtagtaatttgattaatttttataataaaaccttatcagtgagaccgattcagatttgaccataattcacacatggtctagacttaaactttatctttgactatctgtactatatctgtatctgtctatccttctgtattttatctatttatatgacaagttgaagaatggatttgaaatttatttttaagtggacaggataaactggtctcaggatcttagaactagggaaatttgacacatggatgaaataatttcaggatgtatagaatagttttttttattgatagataagtgaaacagtgtaaaggttaacttgctgtgtaacaaacataaatctttcattgattggtgcattttctgtttcgcttggtgttggctggaatgttcaaaatggccacagtctctcgtggctggcccaaaatggccagtttctcacgttggccactgtctgcaagttcagctagcagtaaggccttcttgtcctcctttctccacatggccttcttttggatttccttaaagcatggtgtctgggttctaagaaggggagcattccaggagataagaaatagaagccagccaattctcttaagtcctaggtttggaagttgagaatgttgttattggtcagagacagtaaaggctggcccagagtcagaaggagggaaaataatctctccccgtagacaaaaagagtagcatgcaggaacagagagaaggaaattgctgggggccaggaccttttgagtctggctaccatagatgctgttctagttggatgctcaggctgaaaatacagatgggatcagccacatttgtggctattaacacttggaatgctttggagacatctcatttttgagattaacttcctaaaaaactattgtgatctcctgcagactgtcttaataatgttactgtagcg

SEQ ID NO: 29623 - DNA, 1683 bp, Bovine  19866880617918
  misc_feature (1)..(1): n is a, c, g, or t
naaatgtacatctatactagctggaatgtttacacaaaggaactttcattagaacctaaaagggaattcccctcttaaaagcattttgaaattaactaagatgtattaatatgtaaattagaaattcttgatttgacttgaaagaatgtttagccaaaagacagctggcttggcatagtctttgggacatcaatcatctttctcttccttgtctcctccaaggatgagggagattcaggagcctctctaaggtccaggaggtttccaacccttccagaacatgtgacttgatctcccgccaagggttggccatactctaggaaaggaggcattgtctttgggatctaaaaggctgtatgagttaggggttgtgagtttatgtgtggggaaggagggacaaaaaggcagagacagcaacctgtgcatagccattgtgttttattggatctggtgatttcttattttacaaaaattacagaggaaccaaaaatgcaaagtagtcaacagtgttctcatggggaagggggcttcttgggtgccctccgcctcaattcacagctgactgggaaagtgagctaaatgggacaagcagatatattaaagggtagcagtgtggcagggctgctgacagtgaggtgggacctggatcctatggtccctgccatcaaggtgtgctcaggggcatctctgggtagattgactagagcaagaggaaactctgagtgggctatgaggaggctatgtggggaggcaggaatagagcctgggtatatcaaaaattctcaaaaatgcccccacactgggttcaaatgctatgtctgcctccttccttcctttttctcctaaggcatccacagggtggtccctgacttactccatgcctccaggtctagaggaaatggcaaatgaaatcttaagttgtagtcatcagagaaggtaggctgaaactttggcaggtatcagtcaagcagctcccaccccatcttccccctgctgccaccaccactacccaaacaggaaggaaggagaggaagaaattccagggatctgccaaaacccagatcccaagttctcctgggatactgaggagtatatggaaaatttctgggtatatttccaaggttttctgaagagcctggaaacacatattctgatggcttggggtggcagacctgtagagctcaaagctacagcctggtatgctgtcactgacaatccccaggcctttctgctctctaccgcaattgcctcctagggcctacccactggcttaggcccaaggttactccctccacattcttgaccccctcctacagcactgtcaaaggccctggcctaaaaggccagtcagtggcaaggacagaagagcctttttataaaggaatcttaggggaaatgtttatgagatcagggatggaggaagcaccatagcaggagaaattttgcctagtgttgtggtttctcagttggggggtgggaggggaaggaccactcaattcccataacagggcaacctcggcactgagtttcaggcaggaagggggagctgttgggagtcgagaacacccccacagatacactctgcccactccctaccctcctcagctccagctgtatggaccaccaaatccccaggctcttgggttcctatagcccccagggtagagctaggatgaggacaga

SEQ ID NO: 29624 - DNA, 3534 bp, Bovine  19866880665702
  misc_feature (1)..(1): n is a, c, g, or t
ntggcgggtctgaaaactgtctttacactcacgttatttctgttttcttaggtacatcagctcggccagcacctaaagtcgccaacggcaaagcagctagtagcagcagcagcagcagcagtgatgatgactcagaggaggaaaaggcagtagccatctctaagaaggtataggccttaatttctaccagggaagaggggacaagggggtggaagtcctccatttcctggcaggagtggttgggtcaacattttcctgtggtaattgattttctctgtgtgatgcagaccatacctaaaaagcaagttgtggctaaggctccagtgaaaatggctgccgcacctgcccaaaagagttccagcagtgaggactcctccagtgaggaagaggaagaggagcagaagaaaaagcccatgaagaaaaaaccaggtgactggacacggggagtcaagctaccactgatgagggcccaaaggcaggaggtcctctgcagtcaccacgtggaccttggcctgacagctggcctgtcccagagaaaggagaaagccaaaagttgccttttgtgactcagaaatggcatgccatcgtccttgccctagtctgttaggaaagagtcactaatcctagcccaccctcaagggaaagggaattaagctccatttctagaaggaagtggtatcaaaagatttgtgtacatattttatcacactgtcccttttaaacaggtccctatagctcagtccccccgccttctgttcccccacccaagaagtccctgggaactcagtcccccaagaaagctgcagagaagcagcagactgtggagagcagcgaggagagcagcgatgagtctggtgagtcatcttccgtggtgggtcttggaagtgtgtgaggagtagggaaggagatgcttctgttcccttctgcttttctctgaagcaccacagggctgatgctctgtgtgggtctttgcatccttgttgtttttggctgtgtcacatgtcttgcggaggtctcagttccctgaccagagatcgaacccgggccatggaagtgaaagcccagagtcctaatcactaggccaccagggaactccctacgcttcttttacttgcctctggtgggactctggacccagcctaatgccattgcttctctcaagattcaagttctgaggaagaaaagaaacctccagctaaggcagtcatcgccaaggcagctactaaagcagctccagcaaagaaggcagcagagagctcttcagacagctcgggtaaggacggtgtagcgtaggaggccctcagggcgatggtagctccaagggccccctttagcctgattcggggacctattcactctaacctccctgtctagactccgacagttctgaggatgaagctcctgccaagccagctggtaccaccaagaatccctcaagtaaaccagccgccactcccaagcagcctgcagctaagttagccgccactcccaagcaggctgcgggcagtgtccagaagcctctaaccagaaaggctgacagcagctccagtgaggaggagagcagttctagtgacgaggaggagacgaagaagactgtagccacccctaagtccaaggcgacagtcaaagcagccctgtctttgcccgccaagcagagctctcagggtgctgggggcagcagctcggattcagacagctccagcagcgaggaagaggaagaagagaagacgcctaaacccccagctaaaaagccacggaaggaggtaggagccatagccccttccaaaccagcctctgggaagaaagcaaaggccgagagcagcagcagttgttcctctgatgactccagtgaggaggaggaggagcccaagggcaagggcactccaagaccgcaggccaccaaggccaatggcacctctgcactgactgcccagaatggaaaagcagacaggggcagcaacgaggaggaggaggagaagaaaaaggcagcagtggcggttgctaagccaggtctgtatccaaaaaacctgcctcctgggtttgtcccctaaaccagaatgggctgtactctagaggagtggattaggaagccaaagcccctgaccagcttccagttggttggaggccctcaagtgtgggagcctgggaggaggggataggaaactggtttcctgagcctggctttctgctctgtaggttcagaaaagaagaagaagaagaatgaggctgctaaggaggcagagacgcctccagcaaagaagataaagcctcagacccccaacacatttcctaaaaggaagaaggtaggttgtcttgttttcctctcaggagccagcttttagagtagacaaaaactgcagatcatctggacagctctttgcctggcgtggcacacacactctagtgtgtagctcaggagggcctttttgttccatgactgctccatcctgaatttcctactccattcttccccagggagaacgaagggcatcctccccattccgaaggatcagggaagaggagatcgaggtggatgctcgagtggcagacaattcctttgatgccaaggtgaggaaaacgaggggtcttcaccatccttgagggggtggggtggggtgggagagagtacagcatttggtcctggttgataggttctctgagtttgagttgcctggagcaagaaatgacagggccctggggttgcccttctgtgcgctaaccacctctttctgcttaccagcggggtgcagctggagactggggggagcgagccaatcaggttctgaagttcaccaaaggcaaatccttccggcatgagaaaaccaagaagaagcggggcagctaccggggaggctccatctctgtccaagtcaactctgttaagtttgacagcgagtgaccatgggccgtctatggcacagcaagggtgtgcccactcaacgtcctcagtggacctgggaatcctaggctctatcaggggagggtcttggtgaagagagcagtttagaataggtctgaagactctgcactgtaacaccctctaaggtccttttttgtgttcgtggttttgtacagatttgttttttgagtgttgggtagcaaggacaaagagtgttcatttttaagaacaattttagttgtcattccctccatgttctgtgaaagtcttcatactgagaaatttgtatatttcctattaaatcatttcttattgatttttgttgtggttttcagaggtgggttcccacagattaaaatcttagctatctcccaagacttggtaaaggtcacatgtaagaatttttataattggagaactctgcctatgtgagtgctggtgtccacttttcatccttcctacccatcagagccctgatgaggggcagttaacattaaccattgttaatgtatatatctgttaagcatgaactgtgtacctcatttatggggtctaggactgaaatcttcagccagcatggacttacctactttggaggataaaagtcattgttttattcagacaaaattctaatg

SEQ ID NO: 29625 - DNA, 1406 bp, Bovine  19866880733480
  misc_feature (1)..(1): n is a, c, g, or t
nataaaacgtatgcaaattttgcggcgttagttgctgtcaaactgtaggggtataatactttttcttttccttcttcccaccttcttaaaatccttttaagtttcctgtgatattttgttttctaatttaccgtttctagtgttgaagtgctactatgaatgatttcttttttctgcttagtctgcacaatatttcacttttgtggtgagtttatgggagatgagttgaggtgcgtagaggaaaagaattgattaattggaataagaagtagatttcctttagtttcatacacagaagaacaggaataaatttttaaattaaatattttgctttttgacctataacttttttttcttccttttttgggcactagtgctccttttgagtttccatctggggttagaactagtaaatagtattttcttgaagatgtttctgtcataaaggcaagctgcaactggaatattgtatttagccaagctttgagaattcctgtaatctgtgtcatcctgtctcatgctgtcccatctcatagttgtcctctctctgcagtgctctatgcccaggtctctgtggctgggctgctccagcctggcggacagcatgccttcgctgcgatgcctgtataacccagggactggcgcactcacagctttccaggtactttctctgtctctgtgggttatttgtgggcattagtatgtgtgtgttagttcattagtgtgtctctccttctttcccatcctttacttaagttcgcttttctccttcgtgttgcctgtatttcacgtcactcagttctcctttaatttttaatgtagatccagactgatccactcttgagacatttttgttatgattggtttgccaaaattgacagagcacaacttgatttgttggttttcatgtttagtagaagtatgataatgagttttaaagtaatctcaataaatagcattcaatatgtaatgtttgctctggacctacataaaaccaattaatataatcaatcaatcaattgcaaccagttgcctgggcactttcttatgtttttcttatgattactaaaaacataaagtgctcaattcagagtgtctccttgctactatactattatttatgtgtgggtgtatgtatatgtttatgtatctatatgtgtgtattttacatatataagaactgtgtttatttatatcctgattaataggtctagtttcaaggtggaaaggccttcatgacctttgagtatagtgttcagcttgagacagtccagctggtcttgcttggaccatcaaatcctagttccctttggcctttcttagaggccactagggcagttccaggatgtgagagaaaactatagaaggaaagaggaaaactgtagagaaatatgtaagacagagct

SEQ ID NO: 29626 - DNA, 1773 bp, Bovine  19866880771051
  misc_feature (1)..(1): n is a, c, g, or t
ngagagaaaaagagtatgaatattagaaagatgatgacccaggtgtgccgaaaaggtttctcagtcattctgagccctagaagggggtgggggcagccttacatctctactgggaaacatatttcccccttttaaatcaggaaagaaaaaaacaacaacatagccccaaatagagaatgttttcttttgtaactggaagcaaacatcactgatggctttaacagctgcctgccaacatggcctgagaagcaggcaagctcaaacattttttgagatcaacacatgtacagacatacagtatattaggtcaaattataaatccaggaataaaagaacaaataaacaagtttcagctttctctaggctttctgagtccaataccagctaaattagactccgaagcagagaaatctagcttccaagaaggcaggtctcccaggagttcaagtcaaacctccctctggtaggaaaagaaggtgccgttgtagattaactggctgacggctgaccaggtccaggctgacggccctgcctagcgggggcttccccgtgtcttagccttacagaccctgaggatgtctgccattgacttgatctttgaccccagtaaatcatttaatgtgccatgtgcctctgtccatatgttcatgttcggatgagaattccagcaagtctgggtgtgccacccattagggctaaatctctccctttggagcttctaggaagaaacctgtggacagctgcattgcagagagccaaagtgcctggacaaaccaaactgaaatgcgtgcagacagtgagaccaggattgcctaaactgcaactaacaatcagaaggacaaatctgttctctggttatcaaaactgacacaagacttttgtgatagttttgccttagcgcaagaaaaccacttaagagtcataggtgggaaatattggattattcttctgatcccacctctatactagttaggtgaccttgagcaagtccattagtccaaggttcttcagacattagtcatcatgaaatcaatgaaatagactagaactaaatattttttaatgaagtcaagctgaacagaaaaatatcagtgtttagtccacaataagttaagctccatcgtatgtgtgtgtggacgcatgttttctggagtcatgagaaataaaaatttcctactgtgggtaacaaacaaaagagcttcccacagtggcttagaccatgggttttgatttcttcatctaatgaatgaaagtcattcattttatacatatctagacagtcatattcatacacacacacacatatatgtataatgggcaccaccgtgtcaggcacagtggcatatgacctatccagggacaacaaggccctgtcttcctcgagcctcagctagcagggaagccagtcataaaataattacataactgtttaccattgtatgaagagtgtatgtaacaccaggttcataacctgggctgtagggtcagagccagccttcctaaggaagtgacagagaagggggcagagagggatggaggcaaagaatgggggtggggatggggtggaggtagaattccaggcagaaggcccagtaagtgtgagaagaacctgaaggttgaacaatgtcagctctacctcaacaatttctatgaagaccacgtgagatgaccatgggaacactttgtaaactatggagtgttattcaaatatggtggcttattatttaaaacagtgattataaacatgccttaaagatgagttgagggacttcc

SEQ ID NO: 29627 - DNA, 1223 bp, Bovine  19866880894590
  misc_feature (1)..(1): n is a, c, g, or t
natccaaagactatgagaatattgtgagtttatatgggctagcaataatgatatcagactagtaatactttacatttaaattctgatttatgtagtgtttttcaatgtttataaatgtttaaaagtgcttaagcacttaaatctaaattttctactagattataatctcctttaaggcagggattcacttttcataacgttaatccagtttcattttagaaggcttaaattaaaaaaacattattttttgagcactgatggcattgttgaaataactgtagcttcccatggtgtttattctggggataatactcattttagacatcgatttttgtcttcattggatagttttggtttccagtaacaacttgtctcttttcatccttaagcaagaaggaggacctattttaagggtacagagatagctcacgggaataaagtgcaacaaggatatggagtcagtgttgaaacacttttagggctcaaggcagccactttgtactcctgggataaatttcacttggtcatgatgttagtcctttttatatgttgctggattttatttgctagtattttgttcaggatttttgcctatatattcatgagaaatttgttgtttcgttgataagtcatgtctagcactttgcggcccatggactgtagccctgcaggctcctctgtccatgggatttcccaggcaagaacactggagtgggttgccttttccttctccagggaatcttcctgacccagggatggaactccagtcttgtgcattggcaggcagattctttgctgcttagcaccagggaagcccttcttggaaaatactggtctgctaatagccattcttttactgagtctatacaatgagttaaaatttttattattttcagttcttatatttccatttggttcttctttatatgtattgtttttttgctgatactttctgtctttccatttctttctagtgtttgcagtgagttgttgaaacatttttatactatttaaagtctttgtctttaaagataattcaacaactgtgtcgtttattattggcatctgttgatgtgcattgagatcctccacactcttctttgtatgcctagtaattttggggttgtatcttggacatttttaatattataagactctgagtttatttaaatcctaatattgatatttttgttttatcatactctcaaccctgttcagttcag

SEQ ID NO: 29628 - DNA, 2501 bp, Bovine  19866880927667
  misc_feature (1)..(1): n is a, c, g, or t
ngtctgagagtggcccagactctgtcctggcagagtgagccttgtggtttccacagaatttttactctcatcagtttgtaaaaagaaatcccagaggcccagtctctgaagatagggctttcttccttagaaactataaccccctgcctcaagcagtatccttgttatctgctgtcatgcagacagtctccccacccacctctgcatggagtgtaatttttttccctggcactctctttgggcctaaatgtaggaaaacacgtcataccctttctgaagttcgaggccagactatgctgctctggtcatctgctctcataggaggcctaccagctattgatttcatggacgaggcgtctcttcttggctagccctcaaggtgtccagtgggtgcctggcaaagccctttgcttatttgtcagtgaggacattcaggtggatgagaagtccagtggctactgaattgaagttctatagcagtcaggataaattgtttgtaagtgacagaaaccaaattcacgttaactcgaataaaactgtaaatgtttggctcataaatccaagggcaaagctgagcaatcaagtaaaggaagagcaggagtccagcatcaggagtcctggacccagagccccgcagtctgccaggacttaatgcctctagtgctcatctctgtttctggatctcagctcctttctttttcccagttgaccagcttattccagaggctgccaagagctcctgagtttggcagctcatggattaagtcatggagaaggactggcatccagaaatctcactggccctgcttgggtcagctgcctaccccttgactggttaactggccaaggagggagattatgtaagaatataggaagtctcagaatcagctgtgtggaaggagcgtatagggcagacagagcagttagtgtctgctgttttcataaagggcaaattactccttgacagcccgtcccaaacgtctaggtgatggcgctagtacgtatgtggatggtagcagcttagcaccttggccgccagctctcacggtcagtcagtctggagggaactgtggcattattggctttcacctcctctttctcacttcattactgctctgctgattagacattcctccctctgtaagctgttgatggtgtccttagaaaaatctgccacttttctcacgtgttcatgggggaaaaaccggactgcagacacatgaggttggacaaatgtgcagtggcccaggacccttccagtgggcagagagagacgggagccgagtcctgggatggcacagacctgactgggccgcctccggaggagaacgactagcaggcggccagaattagactccaggacttcagcggaacaggatggaacacacagactcccgcctctctcttctcagtgccattgtctagagggcaggaaatcttggagaggagcagagttcaaggtcaagattgctggtgctgcccactaatctggaaataaggaagtcccttgggatttcaccttcctgagaagccctgtaatgaaagacttgcagagaaggacctcagtattcttacttttctcctatctctagctgtgtaatttttcctcctccccctgtacagtaagcctcagtctgtgccaacctgaggactctggggcccttagtgtctctcatcacagggaaggagttgacatgagagttattgcttaaatctgcacaccagggtttactggtggacctcctctacaatagagactttcttgaggaatcagtttttcctcctgtgtacatagacatagtcctctcctttcttcttttcatggatcccatttctatagccctgttgtgtatagttcatgatgcatagcaggccctactggtctgtccacctccatgatagaaggaaaattcccttcccactccttgaccactcctccatcaccagtagccttcgggggtaatggtggaaaatgccacagcaatcaggctaggtggaggagtacagagcttcatctccacttctcctctccctttttgatggaagaaaagtggtccaatgatgcagatggtagtagtgaatccgtaaatcaactctcacacactcggtctcccttcttctcagcttacttgatgtcactgtgggcctctctttggaaagtcattagggcctctttcgttttaagctctgtcagagttatgaggccaggggatgaggaatgccatgcagtcaggcgataggtagtgtgggtgggctctcttgccctttgattcctcagagagagcctctttctagaaggtcttgattatactttgatgcttgccacatgaaaataccccacattggtgcttatgtgatgttgagaataaaaataagaaccaggccaatcagtctctagggaatgccattgctgggcttaaatgtgaccgtgggtcaaggacaacaccacagagtcctctttgacctgtcctcatctctcttctctctctgtgttgtaaaca

SEQ ID NO: 29629 - DNA, 1106 bp, Bovine  19866880975191
  misc_feature (1)..(1): n is a, c, g, or t
naagattatcagctttagcctttccatagagtccttttgacatgttgctgaatttgtgttcttttgattttgaatagttcaaaagttctgtttctgcttctttaggagcattctggaagagttttccgactccagtttgatgaattccagattgtcagtagttcacatgatgacacaatcctcatctgggacttcctaaatgatccagctgcccaagctgaacccccccgctccccttctcgaacatacacctatatctccagataaatactcatacactgacctcagactcacccaggtatgaaaaagaattgtgtacatagcactgagggtaagcgatggaacactggcggtaaggtattgtgagttcatggagccttctcatgccctttataactccaagtcctgtgatacagaaactgacaccacgagacagggctgggctgcaccctggatgctgcccttgactgaggtaaccagcctcagtccttagataattcttgagctaggtctcgatgatccttgtgtagtagaactaatattcctgcctcagtcacctagtcggattgttaaggaaatgagatttaaatcagtttcaaaactaagagtattgaccccaaagcctgtggctttgtaattcccagatcaaactagtacctacaatggagaccctttaacccaagtagataatctgatgttggaaagaaaaaaatctcttggcaaaatagcacacaaggctgccttctcatagctcttgtcagtatcatttgattataaaaggtagcttttctctgtcccccttatctgcattccctgccccctccaactgttttttgaccttggaagtagctcgagttggtgagaactctgataccctcccactcaaatctccatcctgtctctagggcagaagaagatcctaatattcatcttaacctatatccctgggatactcagatcatacctgatggtcctgagcagatcagatataggtcaacactggtttggaaaaactgtactagctactgggaaatattgccattattgtgatttctcatttcctatacttgcctctgttcttggggcaggagcacacattcagtaca

SEQ ID NO: 29630 - DNA, 1507 bp, Bovine  19866881103536
  misc_feature (1)..(1): n is a, c, g, or t
ngtaatttattgttctatgtatacacacctgtcactggatatgtgtatgtgtgagagaggtgtccttgggttggacatcatcctcagaggtccagctatatagcactggagccaaggacactgggtcaacaaagactgaggccaatatgccacttctccccgcccccgccatcttgctgtccccagctgtgtctctttatacaaggtgcccgagccgtcttggtggaccttccgtgcctgtgaaacccactggactcccctaaccggccccagctactctctccaccccccatcttcccccaacaccggggttgatttgtgatgatggggagggtacagggaatggagggacagcggggttaacgttccctcccggggtcttctctcttcccaggccaccctccagggcccactaaaaaagcgctgaagcagcggttcctcaagctgctgccatgctgcgggccccaagccctgccctcagtcagtgaaagcaagtgcctctcctgtgcttccgggggtggggcccgtgtgtatctggggtgtaaggagtgtgagagtgcgtgtgggcgtgaccaacttggcagaggtgggctgggcgctggctgacgagggggcgtgattacccagcgaatgtgtgggcgtggtcagcatggaggcggggcctgagtgtctgtgggacatcagggtctgtgaaatgggcgggatctggatttgggggcgtggtcagtgtgactggctgaggtgtctctgatactgtgagtgtggccacggtggcagaggtgggaccaggtggctgtgagggtctgtgcatggggttgttgtctggccgccctccccgtccttgggcatgttttggactttgagaggtaggtcaccagtgccttgactagacggatgcaagtgtaagggccgagtccaccttccttcagataccaagatacgggagttttctaggaccagcctggtccccagtagagtgacctcgctttgtctgtagacctcagtttcctcgtttgggccttgtccacctcacaggattatacatactgcattttgcaagctataaagactcggtttgtagtcattacttgagaatatcattgtgtttgattctgctgggtcccacatgggggtagattccgaaaaaggataggtgtgatatgcataaggtccgatttgtgtttgtgctcattcgttacgcttgcctttgcgtgcacgaggagatggggagtgtgcattgtaacaagcaggtctgtgagatttgctgtgagtgtgaggggcgaggtgtgtgcagttggccgggtcttccgctttctcggtgacagttcgctcccttcagcattagccgccccagcctccctccgcccccacagaccccgcctgctggacccaggtgacttattctcctggtgggggcgggtgcggggaactttgggagcctgggttgggggcatctgcctggggacttggatgttgggaactggggtgggactgagatgggcctggg

SEQ ID NO: 29631 - DNA, 1273 bp, Bovine  19866881108998
  misc_feature (1)..(1): n is a, c, g, or t
ntcctaggggcagactgtcaattctctagatataaaatacaactgtagagtggaaattaaactcaaagcttttttagaaaactgtatttatttatttttggttgaaggaaatggaagaagttctcaaagacagcatttggggagaggcagtataacagaaaggctttattgacaaaggagacttagtaagacaacttgcaagagaaaaatgaaaaagtgattacagactattgttttctaaagtgaggaagaactactaacacaggaagaaaggcaacacgtaaacataagcagccacatactgtcaaggggataataaaggcagtcttcatggggtgaacaaaattattttgaaatctcagggatctgtatcaagctaaggtgatatatatggccaaagacaaaggaatacagtcagaactctaaaggatactcaaaagagcaggaatgggtttctgtagttgaagaaataggagaaagagtgataattagtgctgatcctaaattatttctcagctataccttcacatacccttttaaaaggccaagaagccacctgttcgatgatcttttttttttcttctgtgtaactaatacaagagatctttaaccctctttaaggatttaaaccctcttttagggtttaattaaccctaagcataattctggagccttttatctttggtattttcatacatatctgtcaagatttgcccatctacttcttactctccctgccttcaaaaagagactgtaaagtcccaacatctgataaaggtttattgtcatttacagtccaaatgggaacaaagtacattttaacagggaacaaaacctttataagctatgagaatgcatctctacaagtgaaattttgggtcaggagttatttggagaaagattttcttttcttccccccccccccacgaagggtagaggaatattcctagctgccctaaaattttcccaagcaagcaactgcctcctctatttctaaggctagtcctaacatgcttaagaaaatgatggactttgaattccatatatctatataatcttttactttattatacaatatagtttatttccaaagtatgaaataagttatcaaagatcaggtttccattcttccatacagtgaaattagtgaaagtaagggaaacatactcggaagaagaaataataatatattttcatttatgcaattttttatagccaaaaattccctggtatttgcttcctaatttaacgaattgggagaaattttaaagac

SEQ ID NO: 29632 - DNA, 1107 bp, Bovine  19866881139857
  misc_feature (1)..(1): n is a, c, g, or t
ntttgtagtccataggatctctgtcctgaccacccacctctgccattgcagtgtaaaagcagccacagataaatggtaataaatgaggatggcttagtttcaataacagagaaaggcagtggcaccccatcccagaacttcttgcctggaaaatcccatggatggaggagcctggtaagctgcagtccatggggtcgctaagagtcagacacgactgaacgacttcactttgacttttcactttcatgcattggagaaggaaacagcaaacccactccagtgttcttgcctggagaatcccagggacggggaccctggtgggctgccgtctgtggggtcgcacagagtcagacacgactaaagcgacttagcagcagcagcagcagcagcagcagcagcagcagcagcaagtttcaataaaactttatttagagcaggggcttacagtttcctcctgtaaattatactggcattaaattgatagaatgataagactgtagttggctttcactttgaagtttctctgctgtggaaaccatttttaaagctatctggatggtgtgggtatagggtttcagttatttattaagaccttattatctgtatattatgtaatgtgttgggaggtagagggaaccacaaagactgtccagtaagctttcagtcttattgggtacttgagagtagatacaaacattcatctatttaagtgccaaactgtgtggaccaaataaaaatgttaagaaatttccagtaagataagatggaatagttgtatactttcttagaggagaagaagttgaaactcattttaagaatgggtaggacttgaattgattaagtaattgtgtttataattctagactagtgttaataaagatccttctagcttggaaatttcaagaccaaatcatgtttatgagactatgaagagacttgcttaactagggcagaaaaaaaaaagtacgttgagggaaataacttgatataatgtagcaggaaattctggaagatcttgaaaaccaggcctagaactttatatttgatttcatggaaacaaagagccactatacatttttaagaaaaaattagtggtattaagaaaga

SEQ ID NO: 29633 - DNA, 1331 bp, Bovine  19866881167448
  misc_feature (1)..(1): n is a, c, g, or t
nacgtgactgagcgacttcctttccttttactttctgcactggagaaggaaatggcaacccactccaaggttcttgcctggagaatcccagggacgggggagcctggtgggctgccgtctatggggtcgcacagagttggacacgactgaagcgacttagcagcagcagactaggttgctttagcatcattccttccagagaacacccaggactgatctcctttagaatgatgctgggagggattgggggcaggaggaaaaggggatgacagaggatgagatggctggatggcatcaccaactagatggacatgagtttgagtgaactccggcagttggtgatggacagggaggcctggcatgctgcaattcatggggtcgcaaagagtcggacaggactgagcgactgaactgaactgagactaggttgcatctttcagctgaagtgcttggtgtcaaactgctcttcctctcaactcatcagtatccattctgataagagagctgtgacgaagaggcaaattttacagcccaaacaggtgcatgagcaaagggattcgggggaattttgcctggctgagaccttccattccctttccaatcctaactctgtggccatcaatagtgaatgtaccctccctgattactgcctgagggtgttccacacctccctctctatgacattcagaattctgtacatagcccactccaaagggtattattctcaatgaacccccttagacagaggctgctgaatttcttttccttagagtccccagcagagtgtacatttaaagcattctattttttttttttttttgagggagaattttttaggatgaaagaatacagctacataagcactaagcaggaggggagagtatacctcagcatcggaacaaaaagaccactggagcaaacagaggactgcaggcaaactcaccaggagaacagttaaaagagacttacaaagaaatgcacttaattctcattccaaaccacaagcttgtcactaaccccagcaatatctaaaaagtcattctcaaagaccaactaaactttggcttaatgtatttcagataaagggaaaaattaatatattaatcacagagttcaaactttatcaccttaagaaaatcatacatcaggagaaaagcccatctgcagtgattcagtctctatttctgtgagcaaccagagaataggatgtgaacttggtgctaataaaatgctcattaagtgaaaagcattaagatgttaacatgaagagattcattaagggcttcaaattacttacctgaaagttgttggttagagaaggtcagatttca

SEQ ID NO: 29634 - DNA, 1167 bp, Bovine  19866881213082
  misc_feature (1)..(1): n is a, c, g, or t
ntgattactctaaaatgggaaaggtttaattatttattagacagagaacagaatcaagtatgcctgctctgtaaatgaactaggggaaaatctcacaaccaaacaaaagtcaaaacctagcatccttcagatgagaaacagggctcagggggctgtccaccaggcggccctcgtgtttcagtcagaaaaaaaacactttgctctgctcttactcaggagaacagggcattcagtgaagctggaccaacatgtgggttgaatacagtctctgaagaacctaagatttcccaaagcctacaaccgtcgtatttgttagttaatattttgaaccaaaattttatttccagccattcaaaccaaaatctgaatgttgttttcaaacattctctcttcagggtcaccaagtcatatcaaatctatctcttaaaacctctgaaatctgaaataaatttccctgaaaccaacgctttagtatagatctttgtgatttcttgtctggtagagtagaaaaccaatagtcatgtatgggtttgagagttggaacataaagaaggctgagcaccaaagaatttacactttcaaactgtggtgcttgagaggactcttcagagtcccttggacagcaaagagatcaaatcagccaatcctaaaggaaatcaaccctgaatattcattggaaggactgatgctgaagctaaagctccaatactttggccacttgatgtgacgagctgacttactggaaaagaccctgaagctgggaaaaactgagggcaagaggagaacggggtgacagaggatgagatggttggatggtatcactgactcaatggatatgagtttgagcaaactccaggagatagtgatggacagagaagcacggacagagaagcctggtgtgttacagttcacaggattgcaaagagatggacatgacttagcaactgaacaacaagaagagtataaaaaacacaggttatagaggttaatggggagaagagaaaaatctaacagaacaatttcaaataatatgtgcagatactctcctctttatgaggtgtttagttcccattatcactgagagtaagctagacttatttccatagagtagcaaaagggaaaaatagtaactgacagtaaagaatccggcaaatctacttcaaccaa

SEQ ID NO: 29635 - DNA, 1184 bp, Bovine  19866881244927
  misc_feature (1)..(1): n is a, c, g, or t
nataatgataaaaacagaacagtggttgcttgggactggatttggggatgggattgactgggtaacggcaccagtaaagttttgaatggaatgaaaatgttccatagattgactgttacacaggtgtatacattcaccaaaattcatcaaactgattatttaatatgaaaatagacttttaaaacttctaagtatagggtattcctaaggataaatgccattgtaatattaacttaattcataatgaaggtattatatttgtagagaattctggagataaaggcctttgttatcaagcctcctctctctctatcactctcccttacagatttttctactaatgcctaaagtaaatgcagcaaaatttcaatttgggaacctcagaaaatccacaagggtacagtgaaaaagttcaattattaaaaaatcaaaaggttgtatattagagtgggagagagggtaatggttacttgtggcaatagaattgatttggctttcccagcaagagcctgatgactcaaccactactgttcaaatgtctaagaaagctgacaaacaatctcagtttaatggtaatactaactttctgccaaccctgcacatctcctgttctgctattctgttcacaatgaacagttatctccaaaagaaagaaagaaagaagctgtcaggtgacaagcacacaaaatgaaaggacttaagtatttatacgactgttctcagcttagtcctcaaaagccaagggctaacatttccttccctgaaaatatattaaagcatcactttcaaaattaccatgaatttctctgaagcttctgcctgggccaggaaggaaaaatacacacttgcagataccaactagcctaaccactgccttggcaacattaagtgtgctgactttgctaactgcactgggtgtgtgctggaagatacagcagactggctgaacttaatggtaagatgacagatgtttttagtttgcatgtaaactaaactgctttaatcacaagggagggtgtatattaagtagagaaaaggaaatgtttcagatataggacaacatttggaattgtgggtacaaggactagataaagagaatacattgatgactagagagatgcaaatgatatttaagggattctggtttggtcttcagaaggactccaaggacagactctggtatt

SEQ ID NO: 29636 - DNA, 586 bp, Bovine  19866881279500
  misc_feature (1)..(1): n is a, c, g, or t
naatgctaccctgccaggggcccgagtggcccccatcacccggcacctccctccactgccccaggcagccggcaggggctggggtccccccaacatgccagttcggaccacccccaccctacccaaggaagtcggacagacccagtctagtatggatgcgcccgggatggggaaggatctggacccacctgttgggaaacaccctgggactcccggccagctcggaacagggaagcgagctccctgcccaacgcaggccccccgcccgggccttcctagaagagcagggcgcttttaagtcgggaggcagagcggcccgacccctgacatttataaagacaaattcacggagcaaatgttgagacgacagaagacccgggcacctgatctttcggccagacccgccgccaagtctccccaaagagccgcggagcgggtccctgaggcagtcaccggacctctgacatcgaacgccccctggctccgaatgcccccttcctcggcgcggccgggagtggctgcccgccgagttccccaaccacccccaccggctgggaggcgtggagacagcgccggactccgaaac

SEQ ID NO: 29637 - DNA, 1560 bp, Bovine  19866881289937
  misc_feature (1)..(1): n is a, c, g, or t
nccaaagtccatattttacattagggttcacttttttttttcctgtactagaaggcatttttttaattttatttttttaaattgcttattgtgaactggggtatcgccgattaacaatgttgtgctagttccaggtgaacagtgaaggaacttggtcatacatatacatgtatatattctcattagggttcacacttggtgttgtaccttcagtgggttatgaaaaatgtataatgacatgtatccaccattatagtattatacagagcagttttcactgccctaaaaatggtctgtgttccacctgtttcacctgtgttccctcctccctaactcttggcaacccctgatcttttcactatctccacagatttgtatggtctgttgattttgacaaggatgccaacacaattcagtgggtaaagactagtctttttaataaatgacgctgggacaactagatatccatatataaaaaaatgaagttggacccctacctcacaccatatacaaagaatggatcaaagacctaaatgtaaaaactaaaactataaaactctaagaaaacacaggtgtgtaatctctacaccagggtttctcaacctcaatactaacagtttaggctagatgattctctgttgtagaaggctgttctgctcatggtaggatgtctggagcatctacccaccagatactagtagaactcctccctcttttagcactgacaacacaaaatgcctcaagatattgcccgatttcccctggaaggcaaaactgcctggttgagaatcactattttagaataaatgatgctccctaaacttttcctttccaaaattaccaatgtttatgtcatgactatctgaatggttatttgcttagtagatgaattctaagaactctctggaaaagtcatttaatattccataatccatcattttgaaaggatctcaggaccatcccttagtgccaagagctccattttgaaaagttcttagtcaaactctttccattaaaaggtcacatatcatgattttttttgatatggcattttttaggtaaaagctttattgagatataattcatgtcatataaattcatccctttaatgtgtaaaagtcaatgttttttaatatattctgagttgtgtaataaaatatgatttttgaaaaagatgatccttttgtattttatatacctttgtcccaaccacctactcagcatatctaccagagaactaaaaaccaaaaccaaacaaaaggctattcaccttgacattgtctcctcacaggatagaagagacatcactctgccaacaaaggtccatataatcaaagctatggtttttccagtagtcatgaacagatgttagagttggaccataaagaaggctgagcaccaaagaattaatgctttcgaactgcggtattggagaagactcttgagagttctttggacttcaaggagatcaaaccagtcaatcctaaaggaaataaatcaaccctgaatattcattggaaggactgataaagctgaagctccaatactatggccacctga

SEQ ID NO: 29638 - DNA, 961 bp, Bovine  19866881303826
  misc_feature (1)..(1): n is a, c, g, or t
nctgagttcagcttactttgatgttgtttggctccttaaaatatgacccctcccttggggcagatttgcattagaattgagttctgtgtgccttgaacaattatttctgagcaggtttttctgtggtatgaactgtgacacgtgcagatagtgttgtgtgtttgttttcctttagtctggcctgatttcctcttttcccaaagaaaagagccctcagctctgcattatataaaagtgagacggggctttagtgtaacatggtatcaaacttgatgtttcagaacaagactttgagtcttgttttcaaaagcacaaaatgagacatacattcatatggtctcccttccttctcaccctactcccaagttgaagggcctgggtattcatgaggtgagagttcagatatagtctccaagccagttaaaaaaacaacatcgcctatgctctgctttcccttttttggcatttgcatcagtgtagcccttctgtgagcctcttgctggcagggccagctagccagctgtggtgtgattgtgtgttcagtgttcctaaaagctattccattggccaaatgaggcaccagagcaagcctttgcctaacagacagcttctcagtattccaccagtggctctttcctcagccagatggataggactcaattagtctatcagttttccctttgacatatttattctcctttgtgaggccagctgtgggaatccatccttttacttaaaccactttgataaatggctttcattttcttttttcctcttctgcctgtggagcagccctaagtcctgtttaggactttgatgccactgctctctgtgaggtgcttcaacatcctacctttttcctgttgaaccggttcagatcagttttgttatatcgtttttatgcaaaagaattcaacatcttgagctttgtataggaaagaaacgggactttcctatcaca

SEQ ID NO: 29639 - DNA, 1413 bp, Bovine  19866881380160
  misc_feature (1)..(1): n is a, c, g, or t
natttcctaagaaattaaattcttttcatcactctcctttcatctggagcagggggaaattcaacgaagggcctcaactcattattctctgtcatcatcacaggcacctggaatttaccacccaagctgtctgaagtgtgactggaaactgacaacataaaagtctgctccttttgccagcacctctacccaatgagcacaacaaagaagggtatctagaatgcaaactagaagaagtgtagaactcttaaaaaaagtctttctggggtctcagaaaacgaagcctgtgctctcaaatttgaaagtaaaatatctgactggtagaacagtaaattgcagtacatcagtaatgtaagtgtaatctgtttatatcctcccagtgtctctttcctctttcacaatcttcccctattgtagagagaaccagtagcagctgagcagcagccagacataacggaacaaacaaccagcagaactgagactagaacacagctctcccaaccaactagatgacactgagtaaatcactgtgcttctcagtttccttacaagtaaaactagaggactggactagacatattatctaatgattctctcagcatccctgaaataccacaagcacaaaaggaacacctaaatactgtaaagctctaactgaggcactaaggagttacaaaagggaaactccgaactggatcctctaggagctcaaatctattagcagagacaggcacagaacaacccatgaagtgttaagtcgctcagtcccatcccactctttgtgacccatggactgtggcccaccaggcttctctgcccatggaattttcagacacgaataccagagtgggttgccatgctcttctccaggggatcttcctgacccagcacccaacccaagtctcacactgcaggcagattctttaccatctgagccaccagaacccaaagcacaaggtaaactgtgagaaataaatagagttaaagtacaaagcaaatgctgtggactacaaggaacagaaagaagcattctatgactacactatgatctctgttggtctgggcttttaaatccttctagtgaagaagcaaatacagcaaagccacagcaatccttttctgtgagaaatgtcatcttaggcgtgaacacagtttctgagaaacaagatatagtagacaaagtaataaaaaataatcaggcaacttttcaatgctaatttcacctaccaccaaacttaggaatggcttcaaatcccccaaactcaatggtaaatcaatgaagtctttcattcctaaacctcaggaactgctggtcccatgacctgcatacaacttctctctgaaagacccaagtcatacaataagaactatatcttaaagcaatccagctacagacttcttaaatgcatgtca

SEQ ID NO: 29640 - DNA, 1296 bp, Bovine  19866881426526
  misc_feature (1)..(1): n is a, c, g, or t
ntgggtaacataaaatatggagcttattcttacagagagggatttgaaagaagggattctgtgagaaaggaatacttaaagagggactggaatatggagcaatgttaatgttttataaactccaggagctgattgttttctttgtctcagaggaactgatgaatggtgtacggagctactaataaataagtaatttatcacctacacctgttttgctggtgatctggaagggccagcatggtagccattttgatctctgtcatgtgtaattgcctctggggccttattacaacagcaagaaaaatagctgaggaaaaatgctgaaggtagttaaagagagttgagttatgtgtgatattaaagcaccatcatcagtaatgaatattttcagaacattctgctggatgcaggccactctgagaccagtggcttggcttctctgaatgtgaacagaaccctggttcagcccagtaagactttctgaaatgtcagcttgaaaaattggacatggccatggagctggagaaaatcatatttctagagtgaggtatgcatctctggtctgtcagaaaccccagaagaattaatatagtaggtgagggcaagctggtaggcataatttatctgggctttgcggcttttggtataagtcactcaccagaaaccattaaggaaacctggtgaccatggagcaggaacgtttttgacaggagtgtgaggaatttccagatgaacacagcaaaaccaaaagctggagaagttttatgcaaaatacaagagggtgtgcttgggagaacaacattttagttaccagcacatttggtcccatgaccaatggggtaagttgtaacctttccagaaaggtgcagagggtgccagagaggctccgtgtccagctaaatacagagaagacaaattaggtgttgaacttaaggaatgagagtagttcttcctcacttcattttagtcacttaatcttaagagattagaagatcaggttgggaggggaaagatgtagggaagagcaatgaaattttttaagtatggtttcagttcagttcagtaactcagtcttgtgccactctttgtgaccccatgaatcacagcacgccaggcctccctgtccatcaccaactcccagagttcactcagactcacgtccatcgagtcagtgatgccatccagccctctcatcctctgttgtctccgtctcctcccgcccccaatccctcccagcatcagagtcttttccaatgagttcttagaatcaactctaagtaggtttagatcaaataa

SEQ ID NO: 29641 - DNA, 873 bp, Bovine  19866881495896
  misc_feature (1)..(1): n is a, c, g, or t
nccagaaatggcctaatgaaaggaatctgtatcgtttccatccagaaacaccagaggctgggtaagaagagagacttccgggttccctgtccctgtcctacagactaccccggaaagctaccatcaaggctgatgacagacaggacaaaatttaacctggccagggcagcaggagaccttgatccaaccaggggccttaaagggaaggattggaatttgtgcaccctcaaactgaccacagcccccttagtctctccctcgctccccctcactttctaccaccagcctcctggctggaatgcaggggcccctgtgccagaaggcccaggccaggcaggaggccgggaggcacaggtggttctcagaggagatccctgagctccagaaagcatttcccccacaggcccaacaaagctggggcttgttgttggtcaaggcgcctttgcttgtctgggctgcagcccagacggtgaggcggtcggggcaggccagaggactcagggctgcagggtgtgtgtgtggtggtggttgttgggggggagcaggtcagccagccgttttggcaccagctgcctccttccctgggtttctcactttgttcagcatggcaacccaaaggaggctggggaaagcacttttcactacccagcaaataaagacacagggagaaggagaaggatgaaaggtttgggggttaatttggtttgggggtatttacgtggttttaaaaaataatagaagttttttctgcgatccaattaatttcaaacccaggatacagatcatgaatagccaacagtgatcccacagcacctaattcatattatccctcttctgagacttgaagtcccagtggagtgagaggtggtccca

SEQ ID NO: 29642 - DNA, 1049 bp, Bovine  19866881585013
  misc_feature (1)..(1): n is a, c, g, or t
ntctgcaaaatctatatattcccaagacccaatatgaagctttcttcttcaaaccttccaaagctctttccagttaaggctaatttcccctcccttaaattctatagcactttgcgcctctactttggcacttaccaaagtgtgccttaagagagatttataaatgcttgtcttctcaaccaactgtgaagttctagagaagacagacgttttacttaactttgtgtcttcatctcctcctgcccccagaaccacctccctccacacgtaacataatgttttgcactcagattatgtttatatttttatcaagtcatggtgcaggccaactaccatggcctcatttccagttgtcaactttttgccaagtacttctaaacaggaaaatgcagtgcttcaacacagttgagaaccagagagttctaaacttccagtgaaaactttagatacatacagcggtttaagtaatataatttatcaattgtgttaacatattcatggaagtttacaatttaaaatgagcttgggggtatgggatgggagagagaaagatccttattaagtaggcaagtccaacagttaagacttttcagttaacaaaatgaggtgagtgagatgtctattcaagccatcactgccagtccactggccagtacacctgctacactgcgctccatgaccaagtgcaggtcttcgtttggggtacttgttttataaacatatacattttttaaagtttaaacataaacattaaatatattaagttttaatttatctgattaaaaacaatacatattcactgtcaaaatgtagaaaacattaaggaacgtaggaaaaagaaaaacaactaagtaatgctttttgtgctgtgtgtttccttatagatcttcagatgccattaaatattttgaaatattacccataatccaccatttcacaagtaaccacattaacagtttagtgtcatacttcctgagaggtacaaggatttatgcatccatgctgcaaaaacattatccacacgctacaactctgtttccacaattttt

SEQ ID NO: 29643 - DNA, 2104 bp, Bovine  19866880388715
  misc_feature (1)..(1): n is a, c, g, or t
ncagagcatgaagcgggagggcagtcatccttcctgagtagatgtgcttcccagttgaaaggccaccaatgctatatcatgtgaggctcctagacagaaggtggctgggctggtccttattggagaaactaccatctccttgtagcaagagtccatagagaaaccactgtctacaggctcttaacgtttaactcctgggtcagtagctcaataaaagtccttaagttaatatctcttaggggcagaaggagggttctgagatctactctcttttcctttcttctccttatattcttccatagaaatttcaccatgtagtaaaggaactgagtaaatggacattttgccaaaaaagagaaaataacctcgtccatgatgccaagattaaactcttattcatatttgacagttcacagttaggaggcagcctgttgtatatttagagtatagaggaactaggtaatgaatactggattcttcatgctttctcaaattgaaggttgtaacaaccctgtgttgtccaataatggttaccattttttagcaagaaaagtatttttaattaaggcatgtatatatgtatatatcttttgagtgatccaaattaatattttaaggcattactactgtattattttttgattcctgttgcttacagcagtctgctatatgctaagtacaatgttaggtcccagataactggatagatggatggatggatggatttctttttttttaaatgagcagtaccactgtggacaaactgttctatggtatgaatactataataaatatttctactaggaagtatcttctttttagtgccttttataagatatatttgccagtcaatagttcagtgtgcctgtacacacatacatacatgcatatgcaaacatatattactgtcaatatgatcagtcattatttaaaatatctgaaccattgaaactgaagtttacttacagccacataattccacaaaagagaagttttacatctaaaatgcattacaaaaggaattaaagatactttccttttgcgtcctgtggccgggctgtctgtattttgtttctgtagactgaatccttgaattacaagttgcccttgatggctctgacttcacagtgtatcagcagatgttgcttttggagactaggaaagcactcactcatcagtcatttgaataacacaactttcttacctagtaatgggtgaatgtttcattatgtaccctatgctaagaatcgtttttaggatttgctatataaatggctgttttcattccagtaataaactgatggagagtttctggaagcactgtaatggttatataattttagtacgtgtagcccaaattatttttgccatgttttaactcctcctcaattcaaaactttataaatgagcctacaaattttagttcgaagaagagttaagttcggtctcataaatttttctcttaggtatttctcctttcgtaatttctttattagtcagcagaatatgactcaatggggaatagactgatattcgcaaagagaaaacttaggaagtttgttgcaaaggaaagtacaacagattccccactaatgatcctgacctctaaatagtcaccaggagcagctgtctagcttcctaaatgcaaaggctttacaaatacaaggtcattatacaaaacgcttcaggataacgaagaaatactgtattcctccatgttctcaatgtgttttctaaatttactttctgaaagcaactttatagtaatttttaaatttataatatgagtttttaagttaatatattattggcctaatttttagtgtatatatgagatttttctaggttattaacctaaatatacaatacagtaagacaaattattgtacttttagctacctataaaaagtcctttaaatattctttaatatgtgagtgtgtatatatacatgcacatataatccttatccatattgcatttgaaaaggtgattcatttagctaatccagttaaaagggtgcaaagtgaggctcatgtaagatgggccaccatatatactttccagcttaaatggtaaaaatttccagtactccaaactaatgtt

SEQ ID NO: 29644 - DNA, 4803 bp, Bovine  19866880555549
  misc_feature (1)..(1): n is a, c, g, or t
ntaaataactccaagttaaagacattaggaaacccttgctgctatttttcaaaccagatggggcaaacaataaaaaatattgctctgaataggcaatctcacttcaaatttatattgttttcaaggctttccaatctcacatctatttttaaagtttcctctccaagtatttttgactcattccatgctcatctcctcttaaaggtggtggccattcagtggctaaatctggcctctccatctatgaagcacttctccatttcagacctttcaacacttaataccctctcagtgtcactatcggtagagctatgagtgagctcaacctttccctggaagtggtgatttaacgtgtgaattatatggttattaggatgggtgtcagggaaacagtgtaatatatgtaatgtggaggctgatggggctggaggagctgaaacagtctggatgatttctggcgcttcttttaatgctgtgtcaattattcctacgaccgatcattcaaagctgtctattaccttctaataataataataatatttttcacttaacgttgcacctttcaccagaggatttcaaagagctttgcaaacattcattagcactttatgaagtgggcaggtaatatataaatacccagtcacatgtccctaaagagcagccattaatagttcccttgacaccacattcaggttagggcagaaacaaaaaatgaaaagcatttatatatgaaaagccaggtgccatcagcagcagcattttctgggcatctgtagaattctagcagagatgagcctcattttcttgtctctcagggtggcagcatggcggtccttttccctgctcttgccatctgtcctcaaacacacaaacacctcttcctaagacacagcacagaccaacgtgcagacaatccagatactggattctgtcagaactcttagaagccctgctaagagaagacatcccaacaggggaaaattctgactgccctagagatgattcttacacaagaatcctaagtaccttcagtcttctcctcaggacaaaatgaaatgagggaaatgtaccccagaggtgaggaaggagaggctgccagatcccaggtaagggaagttagaacaaaaagtgtgggttcaggcaaggaccacctgagaaacacgaacagctggtagctccaaaagctgaggttacaagtacccagtcgagcagtggacggcaaaaggcagaggagggggatttcacccttgaatccccatcctctatgccatttgtctgacttagaagataattagacacagaaccaatggcatattttatacattcttctcaatttacgtgtgtgtatgtgtgtgttactcagaataggctagcttaggctgtggcaataaccatcaccccaaaatctccaggcattaacacaacagaacacaccaaacctattgcagacctagatggctctttgggacattcattctccatgtagtggctcatcatttcaggctttcatcttaggcattctccatctcagcatgatgcttcctggttcaccctgctgggagagggaagatgggaaataacacaccaacacttattgtttttcccaggagggacacacatcatttttattcctagcctattggctggaattagtcacattgctccacccaaaactcctggaggggcaggaatacatagtctctcctatgtccaaggaggggaggaaactggaaatatcagtgggcattagtgaaatctactagtaagtacatagtgctgttttagtttgaaaccagggcaatagaatcatctctaaacctcaaagacctcaaaatatgggataaaagtgttatacaaggcttgccttgccccatgctcgatggacatggttggtgtgaaggtacaatatcttccatgtgatactatccagatagagctaggggtggctttgtgtttttctgcacaaacctttctggcaacaattattcctctcatgctttcttatttttaccaaagaaaaatcttgggttaccatattcctctccttccccaatcccaaatttcttttacatagaggatgttctctgactacaaaaacagcatgcagagagcagaagccctttgagccaatatttccatgttctctaagagagttctatcctctgtccttaaaagccaagaaatgaagatcattacactcactactctgcaatattcactcttgattaaccaccagtgcgttatccatattgcttcctaatcattgttgactggttagaaagatattttttaactcactctctcttatcttgggcttccctggtggctcagatggtaaagaatctgcctgcaatgtgggagacctgggttcagtctctaggttgggaagagctcctggagaagggagtagctacccactctagtattctggcctggagaattccatggacagaagagcctggcaagctacatctatgtggtcacaaagagttagacatgactaagagacttttttcttaaaccagaacagatttgtgttcaccatatcagagtgtgaaacacaaatgaaccaattcctttcctcccactccatttgggctcagtggccccatcccatcaatccttcattctcattgggaagctctttcagagcagggcctactgtgttggagaaatgccaggaaggaaaggagaagtccattaggttccagatgagttcccagcaaccttccattctaattctgtctagcaggggaaagaaaggatttgagagaggtacaggattctctcaaacagagagaattgtttcacaactgcctagctatgtgactttggatgatttacttaatctcttggttaatctgtttacctctctatagaaaagaaacaataatactgctgacatcatatgcttgtcatagggataaataagactgtatatgtgcaatgtcacaaagaagagattaacatttatctccccttcctaaaaaggccgttccacaacagagggcacatagccagagttgtatcacaactataacctttaaaatgtgtgagttactatattgtacaactgtaatttatgtaaaattgtgcatcaactaaactccaattaaaaaaaaagactgatctatcttacaggcaaaatggcaattcttcagtccttgtcctccaaaaggaaagagttcaattgagagacatagagaagtttcacgtagcaagggtttattaagcaaagcaaaatacacttccaaaaaagaatgagagcaggctgtctgggaaccagaaacagctctgtaatgggctatgcatgcgtgctcagtcatgtccaactgtttgagactccctgatctgtagccagccagatctgtccatgggatttctcagacaagaacactggagtgggttgcccttctagtccctaggggatcttcctgacccagggattgaacctgcatcttctgtgttggcaggcagattctttaccactgagccatctgggaagtaatgagggtggagttggatgttttagagtggtgatccctcccttcgtcctgtgttatttgactgacaagttgattgacagctttaggttatataacttttctcctagagcacaggtacttaaacacaagtatgtgaatgaaaccatgggggagggggacagtaaaaaccacaatgctaatttattacaaatatcgcttaatgaaccctgggtcactctgagtcactttttaggtcttggcatgcctgtgccaacctgtgctgttgagttttatctcgtttggtcctgataaggctgaaaatgtagcagtccttgaccagaagcgggagaacctcctggtgccttctgatcactagcatccaggtggagagggaacgaagatcccatccagaattaggtggcgacctactcatgtctgactacttgcctaacacacctaccactccctcttcttttcccaacttctctctctctcgccccctctctccctctcctctcacgctctaacttttcctgatgcaaaaactgagaggcccacagtgaccattcttcccccaaggtctaatcccatttgatcttaaacaaggaaccagtctctcactaatgatattaagaggaatcaagagaggagaattcctagtaacaaatctgcatatatcatttgttgccccttaatacaagcacagatgcagtgatccttggcatctcttccttaagaaaaacagttttaatgttgacattctgtcttctgacttgaagcaagaagtattacataaaacggcagctaagggttttcagatgccacctccagatggtaacggttcccggggaaccccaccttctagtttgcacatttctgttaaagtacccatcttctgggtactttaacccagaaacttcagcctctcctttcagagactggtctcaatcctgaacgaatcccctcccacacaccaatccaaggtgtatctctctaagtctgagaggtgagtgcacagcagcaccttgacccaagcttcaagaggagggtcggaagaggcaggctctcagctgctcaccactgtacagcatccagagggcacagacctgccaaagtaagtccattcatggtcttctgccccatcagtgtgaactgaggcacatctatatattttcccaattttatagctaataactgttgggctacacagacacatcccctaaagacaaagaattctcattcatttattcattcattcattctacaaatatttattgggcacctatgcatgccaggaactctcctagattttggggac

SEQ ID NO: 29645 - DNA, 1038 bp, Bovine  19866880562474
  misc_feature (1)..(1): n is a, c, g, or t
nttacagtgactcacctctggtaaatggtcttatttcatcagagtcaccatcttgctcaaaaagatactttcctgtaatagtatgttgacttttgcccttttggtggaaagtaagtgaaaaccgaaaccagaggtgctaatactaaagtgaaaggcacaggcttcatacacttatcaagccattccgacaagggtcaaagttgtgtgtcttccaaaagtaattaacattagccaaaattctatgcttaggtcatttaactggtggtgaatttatgataaaatgatggtaagcataagtttaccatttgacctgcacacatttaacagattcccaggaaaaatacaggtgctgagttcttatttgtattcagacccacacaccaacatatagtttgaactcaataagtatatatgtatccttttttaacttttgctgtttggcttagcctcgctgatgacaccctctgggataagatgagtgatcgcacatttccttctgtcgctgtaagtaactgcagccttggagcagggtgtgggagccatgacatttaggtgttacatcttagactgtgtgtaatcttcacctcatttctgctggttagactggaatagagtagtcttctagtcaaagacaagaggctttcattttcctctgcttagggatgttgctacattctctactagggtgtttcctggatatgttcctaagtaagactaactgttctataaaccccttaaaggaatcagaaagaaaagccagaagctgaaaagggccatttttatgcaagtgctttctgcaacgttacatttggggccatcagaaacatagttcttaggtggcctaacatgttctttgcacatctggcctctgggttccttaggctgttccaagcagagtttttgccagaatgaaaacgacatcttgcatgctaggatactttccagacaagtcagggctttccgtttatttcactgtaaaatcgtattcattgtctagggtgcccgcaggatttttatcaaggatttcctggcaaaggt

SEQ ID NO: 29646 - DNA, 879 bp, Bovine  19866880571626
  misc_feature (1)..(1): n is a, c, g, or t
ncaaatacaactacaaatggtaactcaaccacactgaagaaaattactagcaataactgtaatccctttcccccactttctacttgcctttaaaaaaatcagattcaaatcggtatagtttgctacatttctaatttaattttaaaatattttatgtattattttcttctaaagtgtttataatatacaaacctcaaaaactgaattatataaataacctcggccaaactttttcaaagcgccagatttacccagaaggaattctgagtttcaccagaagaggctgaacactattactataaaacacctccaaaagtggatgtcagcaacttcaggctaaacatctgtgttacatttccatagcagaatgtttaacatatacattataaaccatcataaatcaaaatcataaaagacaaaaatacaaacttacggctcctttgcagtaaagtcgtaacttcccggatggagtgcgaacgatcactgacattctttttctagcgctgaaagaaaggttttccacaatgtgtcatcatagtgagaagatgcatctatatgtttgtcctgtcacatattttaatgctcacactgaaaaaataaatttgaccaaattatgaggctgatccctccacatacacaaaccatcgcctgagtgtgtagctgagtgcctttgaaagtcacattatgtttttcaagatatgcgggtaccatctgctgccctaaaggaataatttaccaagtagcttccaagaaacctgcaagagttaatacccaccagggcagagagaggagagttctgatgagccagaaccttttatgatgaattattaaaacgagaaatgataatcaattttaagtatacacccaatcaaaaggcat

SEQ ID NO: 29647 - DNA, 923 bp, Bovine  19866880614760
  misc_feature (1)..(1): n is a, c, g, or t
nctgatgtgttcttataggttattaatgtaaatatatatccactaacatcattgttcctggttctgcatctggtccttaccttatcccacagtggtgatgggcatagaggtaatgactaatattttttgagtacttactttgtgccagacattgtaacaagtgtaataaatttaatctttgcaaccctaacagtaggtactatttttaagatgcagaacctgagacatagagaagttaagtcgtttacccatggtcactcacctggtagattaaaagccagggtttcagcccagatagtctgacttcagaaccctcatgcttaattcctattctctattttattccctgtcttatatgataagcaaattagttgctaatttaaagagttggtgacaatttcttggtcatctctaaaaatcccttatgtaaaattgagcacatccataataacctgcctcaaaatgtcatgtgtttctgaggaagtgtctctaatacccttggttggctgcccaggagctatacccaacagcccttcccaatagctctctcccttaccagcgccctcagtagagctggcaaagcaggaatttgctttcacagactctgagtagcaaggagtagctatgtgactcagttctagcctgggagaatgtgggaaaattttctgagagacttcctggcaacatttctttcctgatgacatgacgaaggcaagtcagggaacttctctttcatttctcctttccaatgccttgctcacgtgggacatggccacgtggaaatacgatgttcagagctgaggtagaccttttgcagtcattcaggggcgactaagagaatttcagagattttgacgtaacccctgatgctgtggagttacctcacttgggaccagccatctccagacttcttaggcaaaaca

SEQ ID NO: 29648 - DNA, 4330 bp, Bovine  19866880618970
  misc_feature (1)..(1): n is a, c, g, or t
nggactgtaacagaatgttttcatttccaaaagacagcccattacaacaaaaactgttaagtagcatcctgctcagtaaaaacaggtgacatttgaggtgtttgtttaaaatctgagctctgccatgcatattgtcagactaattagcccatgtggaaattatagcaggtatgtttggggaactactgagaggtggaagaggtttgcattgaaaagaatgagttgttgtagcatcatgagacaggccattggcataattctgttccagcttgttcacagtccccttcaccaggcatcactggtcatctccacgactcaccttctctagggttatgaagtaagtttactttgggctcaagaaagctgaaagctcagcaaaggacccagcgtcacttcttgcttcctctaaacctggctagagctgggtcaaaggaggtcagtgattaaaaataactaggctgctgtttcagtcaccagtctatacatgtgatatggtttattttcattgttctgtggttggattttaagaaccagttcagaagtaaagacagtaatgaattgtgactgacctttatactcagccagtattcaagccttaaattgtacagaaaccttttctatattgtgagctgtgatttttaactgcaccagaattctgtgttgttctctatatcctaaaatgggtctagcctcaagtttgaagaaactgtgcatccagcctttatttctgtgttccagttctgtatgcaagaacaaatgaaattgggggtaaaatatagaaagggtagaaacatcccagggtctaaaaagcctccaggtgatgctgatgatgcagatctggggaccacttgttgagtacccaggttctgtactacatccaaagatgtgtttctctacctacttagaattctaagtcagtgtaagacattaaggtaatttacacttgtattaatccagtccactgtaactttcagaataaatgccaaatacttatcagattgacaaaattcaaaggactgataacaatttgtgcttgtctaagtttattgtcagtgggactttatatattgctaatgatggtatagattgcagtaggaatgaatctggttgtatctgataaaagtacgaacataaataccctagagccagcggtgctcctttgggaatcttctcctataggatacaatcatgtaaatatatttcagtgttgtttgaggtggcagaaaaagcagaagtcagagtttccattgagaggaggatggttgaatacactatgatatagctgttgtgtgaaagagttgtttcacagctggtctgaaatagctctatgctgatctcaggcacacctggaattgtgatgctgaaacttggccaagagaaggacaagatggactaattggtgaattataaggtgctttgtagggtttgaaactccctggggcacccaaaacttgcttctctgctgggtttaaggatgtagacgagtggaagtttaactgagttgtaacttacctggtttaacctgtaacataatctgacttgtctaattgatgagggggtataaaagatcccctggaaacatcttcccaggcttccctgaagttaagatttatcctccatatcatggagtttaaatccatgtcctcggtgaatgaggaaaaaccctggagggctgtgcctagaagctttttgggctcctggtacttgcctgggcttttaagctaccactccttttccagctgtaccacatcctctagtttgattaaaacttttcttgaatgcaccctgtggagtcttgtgagtctgttcaaattatctatccatttgtaacagatgcaaagatacagggattatttttcaaaaaatagactgtctccatgctttgtcctgaaagtatatgttaagtggaaaaccaggttgcagagaaatacattttctgaaaagaaagaaaataaacatgcatgtgtctatgcttgtctagaggaaagtatgaggatgaatcagttagcattccttaccttgagaaagtggcatgagatgaggagagacattcagcttttcgttttatataactcctgttggcttggatagtaatacatcgattctgtagtttggtagaaaacattattggctgaatatgtatttaaaagtttcttaggcatgtcagtttttgtagtaagacatattttacagtgtgactccagtgatgaatagagaggaaacacttggatggagaggaggagagaagaggctagatggatgtactgttctggtggaggcaggcattccctatgagatggtagaactggctggtttatagggggagggtgctgcagaagggtcaggtaggggggtcgaggatgtagatgggctcgaatgtgcatggagaaaccatccaagcaaggttgaaggggatgagtattggggggggatggagaactgaagcagattcagatggttttccaggtttccatgaaagtggccatacttctaacctccctggtggagcagactccctggcatggtctactgagtttggttagcctgttgtgactcttccagcctgtaaggggaacccagtggagtggttcagagctatttttggatgtgaactgacaatacctcttccaagtggcaccatttcaaggagggttagttaagttccagagctggaaagggtggcgcaaagctgacatcagaggacgttcctgtcccaaacacacaggagcattagtgcatctactggttgcataaccatttccagctgctcgcgttggaatcatttaggaacttctgaagctgagaaggttattttaagcaaatgtttaaatagttcattggcatcattttatgtagctgttcgttattgaattataattcatatactgtaaaattcattattttcaagtgtacagttcagtgtttttaatatattcacagcattatgcatccatcaccactatctgattccagagtattttcatcacctcaaaaagaaaccccagacatataaacagtcagtccccattgcctcttccaagagcctctgacaaccactaatctcctttctatctatatggatttctctattctgggcttttacataaaggggaccatacaatatgtagccttttgtgtctggcttatcttcaggagtcatccagttgtcacgtgtatcagcactccattccttttatatgactgaataacattccgttgtgtggatatacccctcttgtttaaccattcattggtggatgggcatttgggttgtttccaccttctccttattgtgaacaatgatatggtgaacagttgtgcacaagttcttgtatgaatatgttttcagttcttggatgtacacttaggtgtgaaatttctgtatctcatgatagctctgtgcctaaccttttcaggagatgccaaagtgttttcctctgcagctgttttttaaacattgtgtgtatatttttaacaggaaatctactagggagcagggttgtatctttagtaaatctactactatggctttatgtgaccccaaacacataagaacatcaatgcatccactttccatccagtgagtactgactgagcacctttgtgctgctgcatggaaacactgggaatacagcagtgaatggaaagagaacgttcctgagtcccagatcttggagtctaggggaagaaattttttttttctcatacgagcataagcttacaaataagatgaacaatgaggcatatgaggacaataaaactgccaaacataatacagcattgttaacaaactgaaattaattttcttagaaagtattgctatgaaacaaacagaaaaaagtcctaccagaactaataagtgaatttaacaaaattaatggtgacagggtcattgtatgaaagtttaatgcatttctgtataccaccaatgactaattggaaaatgtagtaaaaaaaagacaacttacagtataaggaaacaagtcatcaaatatcaagaagtaaatctaataaaagacccatgcactgtaaaatacaaaaacatactggagaaaatttatgaagacataaattaatagaaaggtatagcttgtccaggcttgcaatgaattgaaacacttgagccccaaatcaaattcttaagagggtttagaggttttgttttgttttgtttttcagaattgacaattcagttttaaaatttacatggaaatgcaaagaactcaaaatagccaaacaatattggaaaagaacaatgtaggaagactacctaaattcagaacttactggtagagttacagtgatcaaggcctggtatatattggtatga

SEQ ID NO: 29649 - DNA, 1043 bp, Bovine  19866880705594
  misc_feature (1)..(1): n is a, c, g, or t
ntgcagaaaaccttggaataattcaatcctagaagcaaatagtcattttacaaagtgcatcagcaccctaattagaggttcattttaagaatacatctcagcaaaccaattaaccatattttgctaatttcattcttatttttttcagcaatttgcttatcattgtaatttatttcagcgatttccttaataaccttcttagaatggcactctcagatataaatggcttcaaaaaatatgctgaatccgtgcatgtaaaaaatttacagtcaatttccttcttcacagtataaatgaaatggagtcatttgggcttgtgcccttccgccatctttacaggggtttaatgaggtggagtagaagggcaagtgggagagaagagaaagcacttgctttgacagaggcagaaagtggaggaggaggggttgtactgacaggcagctggttcatttgatccctcagacattttcaccacctccaaagatcagacgctgaagctgagttagacacttctgacagtaaatgagcaagaactgcaatatagaatacctctgggtgggagaagttcagctcacgctgactcattaattgcttcgttaaatattgccatggtatgaactgctttcacctaacatttcaaatctccttgagagaaatgtttctttgaaatgcgttctagccgtctctctttctacctgaagatacaattttttaatatttattaattttttgaaatatagttgatttgtaaagtgttaatttctgctgtgcaacaaagacatgtatatatgtatatatattctttttcattatggtttattataagacatttgaacatagttccctgtgctatacagtaggatcttgttgctcatccattctgtatataatagttggcatctgatatcctcaaccttccagtcatcctttccccagcctgtccctgttggcaaccataagtttgttctctgagagtctgtttctttttcatagatgggttcatttgtgtcatattttagattccacatgatacaggatatcat

SEQ ID NO: 29650 - DNA, 2418 bp, Bovine  19866880759800
  misc_feature (1)..(1): n is a, c, g, or t
ncatgtttgtgaaacctgctctaaaggccctaatgtctaatcccctctttacaaaccatgagtctgaggtcaaagaacatgcaaggggaggggcacagcttggggctgggctgctggcggtgtctgaaagtacacttctgggcgcctcatattctctagtggtgaatatgtgccaaagcaaatttgagaaaaatgtacctttttcagtatctcagattgacagggttctggattaagagatttatagtaagtaatctaaggaagagaattccaagtcctaggcaaagtaatgaaaggaagggtagagaaaatacatcactcaggaaaagacttgagggagggttgaaaaccttattgtttcttatttcatatctggattcactgcccatagtggaggggatttccatagccaaagctaattgtcttttaaaaattctttattttttttcacttctgcattcctttggccttttctccctctttccttaggatattttagttcccagtcctttctgatgcattcattttgccctgtttttccatacttctctgtattgcttttcttaaatctttcactctgcttcaaagaacataaaacaaagagaagtgaaagggacaaaggtgaaaaatatggtctggtgccaacctcatgatgctaccgattccaagctattaaattttttaaaaaatatatataatttttgttcatacataaaaatagaattgcatttcaattttgcaagtacccttcacccagttacaattatcaacacattggctattgtgtgttagctgctttattctgtcttcacattgacatttctcccctaactttaatttcccctttctttctccttccctcttctctttctctttccttcactctgttttctctctctctcttttcttctccatctccttctcctccttgcttctttctctcccctctaatctccctcttcccactctctctttctctggagtttattaaagcaaatcccagacatcatatcatttaactcatttcctataccatttcccggaggcagggagggccacaagagaatataagctgaggaaatgatctcttatgattattttcttcaccaaaatatggaatttgtgttaccgcgataagggaaaatatagaatttccccaaacctctacaggataccccagatggtgcagatttgattttccatctctaggtcttctgccttgagtctttgaggggggtctatgagaactttttaatcttcctttactattcacatagtaacaaaataacagcaatctttggatgtttataaaccccaaaggaaatgcatgttatcttcttgtttcaaagagcattctgagagcattgcttttgcagtagaaatttgtaaatgtgcaattggaagagagtttctactacaggaaccaacacatttcccccccagtgcaaaccccctgagctgactgttatgatggtttaaaggtgctttggatcaagacctagtaaagaaggcatggtatacagttgctttctgctcacacacatcagatctaaggagtatcaagtaatttggaggtgtggttattttctatgagtaaatgtccaactaaatttgaataaaatgctttctaaataagtcaaataggcaggagctttgaatgagggaatcaattatatatagccagtgtcgtaaggaaaataatcccaaggtggcacagagaatgtaattattgggaggtacgtgccaacaaatcattccctaaaatattaatgctatcaaagaacagctggataatgagagaaacttgacccttgggggactagcagaggttgctgcagaactgtgtgtagttgtgatgtcatgaaattcctctaaatttaacaaaaatattattaagaggtgtggttctgggaaagttattagcagtaaacatgtctttgtagttttgtcatcttatcacgatcattatatctcactggtgctgtgtggttccacactactttcttccttaattgctcaggatttatacaatccaaacaacactccttaaaaaaaaaaaaaccactttaagtctggcaaggacttttctttttgtaagtaaaaacacagtacctaagaaatttctgcaaaaacaatttcccatatgcttatttaagttctttaagtcaagaaagacgtctcattgtttgtttgtagataaaagccagaacttaattgggttttactaagtagcatattattgtcccacataatatctaacagagcaataaagttaaatatttacacagtcctacctaacatctgaaatgttgggcattatttttacattcttataactaaatgctaatccctatatttaaagtcagaaatcagaagtgaatctttccttgtaatatactgaacttatattttaaaaca

SEQ ID NO: 29651 - DNA, 1568 bp, Bovine  19866880772415
  misc_feature (1)..(1): n is a, c, g, or t
nctggagaaggaagggttgtttaaaaacaaaaggaaaaacaattttgggattaaagtcatctaggtcaaaatttaggatcccacatttgctaatcctgtgaacccatagtctccatctgtaattgagacaaacatcatcattcatgtaggaacggaggcaaaaagcaactatgtgccaataaaagagtcaaaatgaaaaaaggaacagaggcgagtgcatacagacacacctgggacacagcttcctgcaaactgtcagtttaataactcatcaaaagacatgggtggcagaggcgcaaagaagtcccaaggcacagcagtctgttcccctcaaaactgcccacaagctgtgaggaaatggcaagagggtagactggttagaaaggatttatcggtaattctaggtctcagagagctcttgaaagagctcagatgtttagccaaaaaaaaaaaaaaaaaagagagagagagagagggataaagaccattcaagcttgtggcaggaagaatttctcaaaacagaaatactatggatttgtgaacaacttcactttgggttctgcacacaagccaagattactgaattttgtttaagaaaaggggacacatttagtttttctgagaccaaacaatggactcgatggaactttttcaaccacaaactctgctttgtggcagacactatcttaaatcagaggaaaagggaacagattatttgttcatatgttattttcatttttgtaatgtttactttttttttttttaagtaacccatttctctcaaatgtaacaaagttcgctttcttcactgagcgctacttgaagcaagctgtgtgccagacagtatttgaacaatcatcctgcaatgggacattacaaaaacatatctttgcttctgatagggacacattaacaccttaaacgttaaactgagctcttaaacattttcaggccaaaaagctgaaacaactttgctaatggtaacagagaattcacaatcctaaagatccaaagctggcagtggaagaaaattcactgtggtttaaaacctgcctgaactatttttcaaagcaatacaaaatgtattgtattagactcatgggacatatcaagacaaaacctgaagtagcctcaattctcctttttccccttctttttctggagccaattcaataacttgcttattctggatttctttcagaagccattcaacagtgattggtttcccaaacagtaaggtttgtctgcataatacatgtaagatgagcttaaaagggtacagatgacaacttcgccatttatgtcatgaatgcttgtaagttatatttgaagcttacatggtgttataaaaccaaatttagctagaaaaaaatgtgcaatcctataaagggctttcttttaccatggtgttgaaaaatacatattcttgtgcttgttaatatcaaatgtggttaacaattcattttctgcaaaatatacaggtgagagaaaacactggtatccataatcaaatgtaagctggcttaagttcatatttgcaattaagcagagaaatttaagtagtgagg

SEQ ID NO: 29652 - DNA, 1452 bp, Bovine  19866880778662
  misc_feature (1)..(1): n is a, c, g, or t
ntcttttaagggattcctgctcacagtagtagatataatggtcatctgagttaaattcaccctttccagtccattttagttcgctgattcctagaatgtagatgttcactcttgccatctcctgtttgaccacttccaatttgccttgattcatggacctaacattccaggttcctatgcaatattgctctttacagcattggaccttgcttctatcacagtcacatccacaacggggtggtgttttcactttggctccgtcccttcatcctttctggagttatttctccactggtctccagtagcatattgggcacctacccaccttgggggggcggttcatctttcattgtcccatctttttgccttttcatactattcatggggttcttaaggcaggaacactgaagtggtttgccattcccttctccagtggaccacagtttgtcagaactctccaccatgacctgaccatcttgggtgtctctatatggcatggcttagtttcattgaattagacaaggctgtggtccatgtgatcagcttggctagttctctgtgaccaacctagacagcatattaaaaagcagagacattactttgctgacgaaggtctgtctagtaaaagctgtggtttttccagtagtcatctatggatgtgagagttggactataaaaaaagctgagagccaaagaattgatgcttttgaactgtcgtgttggagaagactcttgagagtcccttggaacagtgaggagatccatccagtccatcctaaagggaatcagtcctgaatattcattggaaggactgatgctgaagctgaaactccaatactttggacatctgatgggaagaactgacatttgaaaagatcctgatgctaggaaagattgaaggcaggaggagaaggggttgacagaggatgagatggttggatggcatcaccaactcaatggacatgagtttgagttaactctgggggtaggtgatggacagggatgcctggcgtgctgtgattcatggggtcgcaaagagtcggacatgactgagcaactgaacttaactgaacaaaagcagaggagtagtaaaaagtcaatttcacagagacaggaaagtatggttccagttctcagagtccaggctgagtgtgagggtagagaggtttagttctgaggtagataagaagactgactagatgggtttgaatattcagaaaggcatcccagagaaacctcttcagctttgaaggcaaactctatgtctccaggattaaggatagaacagaatgcaaagataacataggaatgggcatcaaacccactctttgagagtcagtaatgttagactctgatgctgggagggattgggggcaggaggagaaggggatgacagaggatgagatggctggatggcatcactgactcgatggacgtgagtctgggtgaatt

SEQ ID NO: 29653 - DNA, 1898 bp, Bovine  19866880795772
  misc_feature (1)..(1): n is a, c, g, or t
nactgtccttggggtcctgagagtagacacgacttagtgaccaaccaccaccaccacatataaaatgggtgataccacacgtgtgacatattctcagggactacgcctatggacgggcatgcagctagggatacatgcagatgacaggcaatttcaggtgcatttgctggaactctctatgccctttccccatgtctccagaaaacaccctgaaatgtctgtgaataagaatggcatagtgatgaaaatagcacatctactctaattaatttttaacacacaaaactccgttcttcgttattactaacacattactccagcatacatctgttttgacacatcagaattctgtgaaacccagttgctaaggtccattttgaccgaccctgggaacttacggctgaccactgtcacactgggagatgttcacaaactcttccgcacatgacgttaattatgaacggcagactctgacccatgtgtcatcagaatattctcatgcatagtcatgacacagaatgaagctgtactgtccctaacatgttttaaagctcagggtcctggcaggaaagagatggcaaactcaaaaggggatgtagaagagggtttgatgaaggcactgtttaaaaggcttgggtgggtttaagataagccaacaaggatggaaacgaaattgggcttatgccaacaggaagttgatagtacctacttcttgaaggagtgagcacagaatcagctactggaacccaaagaggttgtcagaagaggctgtcagaagaggctgcctgggagatgcaactgccaacaagccctgcccagtggcagtgaaccaggggagtaagtagagcatccctggtggctcagatggtaaagcatctgcctgcaatgtgggagacctgggttcaatccctgggttgggaagatctcctggagaaggaaatggtgtacaccagtgtttttcttcttccccttcctctgactccactggccaaacccagatggaattcggagggtgtggaccatagatgcagtccttaaatgtagtcctctcagacagagcaggctgagagatgcaaagagtatctggggagacaaatggaaaacatccagcacagaagccaactagcttttttcttcttgattctgcattgtgatttggagcctatttttcagaggtactagacacaattagagtcgttttctttccggcctgaaggagaaagccctttttatccgcaaaactaaaaagaactagactcacaggtgttcaactaaaccctggcaatacacgacctcatccccaacctaaatgaaaagaaatctcagttgtgtttcccaggccactgttactaacttttgtcatgaaaattcgaaatgtattattttctttatctctgttttcaggtcatctgctgagcagaatggaaaagataagcctttacagaatttactctaaagagaaggaaaaccctgaaaaagaatggaaatattacaaagggatgtttttcaccctctcttttaattcttgtcgtatgtactcaataggattttgatggctgacagaactaaaagtcccagtattccctttgatgatggatctccagctccagctggaatccttctcaagaggtcaaactggccctccttgctgggcaggtggatgctccactgtcggcttaagctagctcatcctgaagttttgaaaggacatcaagtatttacactttttagtactacatttttatttattgttaaaataataataatatattgtgagttgtgttattagtcactcattcgtgtccgactctttgcgaccctacagactgtagcccaccaggctcctctgttcatgggattctccaggcaagaatactggagtgggttggcatgccctt

SEQ ID NO: 29654 - DNA, 1194 bp, Bovine  19866880838733
  misc_feature (1)..(1): n is a, c, g, or t
ntaagaattctgacttacattcttatgtgccgaggaatgccctccaaatcacttaacctctccggtgccttgatttctccatttatacggctgcgagagttaacactacctacctcaaaggaatgctatgaagattaagtaggtttttaattaagtaggttgtagattcaagtgctccaaatagcacctggcacacagtcagtacaacctaaaactgtttgctattctgaattcgggaagcaagatttcttgctgtttatgaagcaccaatcatggtgtatccatggctttttggctgaatagccttggtttctttatcagtaaagcaagaatatttatagttgtggtacaaatgatggatgtatctcagtgaacaacgacaggccaggtataagcactggattgttcacttgtacattctttatcattggttatggagtaacacagctgtatacttattacattattttgtattatacatattgtgctgtatacttattacattattttgtattatacatattgtgcttagttgctcagtctttgcaacctcatggactgtagcccgccagctcctctgtccatggggattctccaggcaggaatactggagtcggttgccatgccttccttcaggggatcttcctgacacagggatcgaacctgggagtcctgcattgcaggtggattctttaccgtctgagccggcagggaagcccactgcatctacacacacttatatgcagcttttatgcatgtttatgtgtgggcagagggcgtgtgatgaagacacaatggaagatgttgccaaggagcttgctagactggatcaacctcaatttgatccaaaactgtgaaaagagctacattctataccaagtaagtccagagaatttttggaaaaaactgagttgtcagtgcttagaccagaggagattcaacagtggtgtgtcaagacattttgatttttattttattggccccttgaaacaaggctggagttttctggaaatcaaactttcctcacaagcagaagagttgtaccttttcgattaactcgtagctctcttcgagtttgagcagcctgttctgcacagatgtggaggcacggtgatagacggctcgccactcctgaaagtcgctctctgaaatctcagccacggcaaaacacaaggttcttaaccctaaaaaagg

SEQ ID NO: 29655 - DNA, 1012 bp, Bovine  19866880890169
  misc_feature (1)..(1): n is a, c, g, or t
ntgacttcctttatttctctgcatcgaatgacccactccagcccaccccctattgtcaagcttttcagaaatgcccaggtcctccggttggatatttagaaactggggtctcaggggcttccccgccccctattctcacgtcggaaaacacgggtcaagtttccgcttacttcagagcggaataaatcacaaccccagcagaggaactttacaccttaaaaaacaaaaaaaaaacaactttccaccagaatcggaacttcagggagaccatttagagctccaggcgatggttttacggccgagaaaccggaggagcgggggcaggggacggggcgagccaagagagagccttgacaccccagaactccagagcgggggtctgaagccggccaaagacggtccccaggcaaggcaggagaggctggagagatgattaacggtgctggagctccagtcccgagactgacaacccagaggaaaggaggtcccaccttagaactccattagaccttcaaggaattaactttggagtgcaaaataccagtctagaggattgaggaagtggcttctgggggaaggatgttcagtggaaagtagggaactctagggcggcctggcctgtttggaaagtacaaactggcgtcacagtcactcgccctctctgcagagcaagtgctaagtgccgggtctacctcggggaccccatcctggcctcccgcagtgctctgtggcaggaaagggggcagtctatgcacccacccagactggggtctggcaaagcctcaggaccttcccttgccagcttgtcattttgggcaagttacttaactgctttgggccgcttaactctaaagtgggcatgttgctctcagaggagttaggttgtgaaataaatgagtgtatggatgctcagcaaggtgctgagtgagtagtcactttaaacttgccttctgcagggcaagaagtagtaagaagtactagtaaccttctactacttctagcagtagaagta

SEQ ID NO: 29656 - DNA, 1970 bp, Bovine  19866880969996
  misc_feature (1)..(1): n is a, c, g, or t
ncttcaggaagatgaatttcagtcacatcttgagccagctctgcccaaaagagaggccatgatattccagtagcatctgatgaccacttatcaaaacgtcatatatggagactcaaacttcaccagtatgactggcctgaggaaactgtaaaacctctttctgacctttagattcaatgattctgaaccagccagttcaggaaggcttccagcctctccttccttgacatttcttaaattctctgattggaaagacaagcagtcatcaaggaataaaaatccatctgtatgccatgactggcagaaagatgttgaaataagattgatacaatgcacacagaagcctctctacatctacagtctttacccttgagaaagacgtggggggagacagacactgatcatggctcaggattctagactttaccaatctaccctctaactattagatactggaaaagtcaacttccttttaattaaattttctaatcaatacaaatagtggagatgaggtggagaggtttaattgatttctaagggttttcctagctgtaaatttttatctaagattgttgatatacgtcttttggtttaattgttcctcatatgtctaatgactatggaagggcctctatatcacacggtagttgtgccattcatttcaacgtttactaaataaacatacattgtatgtcaggccttgtgctggacacaaaggtatcaagttataataacaaggacagactacaaaaaaggcaagttaaaggacagtgtacccaatgataccctggaggacctataggcatttaaataactctcaagttatatgaggaaatgatatggaagaacaaaactgagatggcaaccatcaaggaaatgaaacaaattctccctcccaatcctccttccagagcatcacagcaaccactatgtatgcctcaaacaaaaagcatgctggacaggccatagcttcttcattacccagggcttccccagaggagcaggaaataaaacactggacgatgagcgacacataggcatgggtggcaccaacaggagaggtcccatctcgtgcacctgagacaaaactgagaagaatccctgaaagcttactgatggagttctaggacaccaggaggctgagtgaagatgtacacatgttcgccaagaccttgttagtgtacttgagaaagagaatacagtgacagtggctgtggatgagttttgcagactgggtcatccaagaattccatgtgcaaattcaatccaccctgtgttaatgggacatggtattttctgctcatttatcaacttaatttaatcatatggttttgccatagcagtatttgttctttatgccagataatcccaaaaatgctggcaaagagagatctttccacctggcagtgttctttgagacaaattacttgtacgtgaacaattaaatggaaagaggaagggtttcataaaatgagaaagatcgagttcctgcagtcatggaattcaaacactaactgggtgtgcagatatggattcaactgttaatgtgaaaatattgtgaagattaaacaggataacaaatgtcaagtgtgagataaacacgaaatcacaacacatatcacatataaggtgtagaggtagtagtagtaatagtagcagtaggggtattatcacagagaagttcctatttagactaatttccctaaaatgaaggtgcataacctttttctcctgatcatttgagcagcattgttttagaaacaatgtctgtttctaaaaatcattattctaggcaaggctatgtttgtcattcagctgtgctgtgtccttttaaccaagatgtctaacaccacttcagtccgttatgtaatccccagttttcccccattttgattgtctctgttgtttactgctctgctttcacagaggacttgtcgaaaggtccggatgctttcaacgggccttaccag

SEQ ID NO: 29657 - DNA, 1003 bp, Bovine  19866880973542
  misc_feature (1)..(1): n is a, c, g, or t
ngattctaaatcacaaaatctattgctcagaacccctactcttggatagacaaaacttcaattagaatattattttggggtatgccccttgagaattatataagaattgtgagggcttatttggtgattggaaaatgaagagatggactttgcttactatttcccaaagcagtgagaacaaaagagaaaccaatgtctttatgaattttcctgcaacacacatacaagcatcccattttaaacctgggtgtttgttttaatttttaaagctcatatttgttctgctatccgtacattacttctcgtgcttctggtaacagatgtctgactttgcaaataattactcatggaatatctgaccactttggctgccaacatcatcacttgattgaaaattaaaattttatctcactaagaagttctttgagtgatccttttgcaaaatcagcgtcatctgatcccatttctttgacctgaagtgtaagacatggcatgtgagaacggttggaaactaaaggactcaacgaatgcaaaatcttattctcatagctttatgataagttgagtgccacttggacagcttagtagaaaatgcttctcaagatgtccttggtcatcttttagattagagatctctagtgatgatcgtggcatatttctgataggaataagaaacccgaggaaggaataaacagagagtgctagtccattttctggagtgtgtgtttggtgctggctgagcctgggcagacttcgatctatcttgaacagatgcctctaagaagaagttagctgagctttaggggcagctaatgtctcccaggctgcagaatgttattaaggcttgattgcaatctcctgacatgataaaactgaattgaagaacaggaagtgcctgcttggcagctctgtggacagttggaaagctcagagaaggcacaagcattaaagaagaaagagctgacagaagctgggcaggcagacagggctattaattcagagg

SEQ ID NO: 29658 - DNA, 2669 bp, Bovine  19866881016194
  misc_feature (1)..(1): n is a, c, g, or t
ngaatggccaagaaacagagacaataaaacctttgtaatctgcagcccattgataaaaaattttgagcatgtatccaccagtgtacacatccattgattatttacctgcatgtactactatactaatatattatgttcaaagtaaagcatacataatacatttaaaatttttaaggctgatccataaacagaagttatgtttttttcctcattcgatgtctttgcatcacaaaatttggcagcttatgtagaaagaaggaaatgttgactaaagttacccacttgtttattagaagtgccaaacaaaaagtctgctttgctcctgtcctttcatttaaagcatttcctggatagtgctgaggtttggctcagaatatcttggagttagattgagtgcagtttgtccttctgggagacaagcaagaggtgaagtaaatccattcttggttgttgcagttgagctctggagttagatgcaaagtcttggcattgtccctgccaggcagactgattacaggagagagactggcggaacccagaacaatgcagtagaaccagagccctattggtttctcctggtcagagagatatgggtgcagctaacagactgaaattttacagctttcacagttgtgtgaattatgatccattaactgtgggttttaataccaaaagggtatgtcacatctcactccccactgctgtttcattaggagagaacacggtgtcctggggtcagccaactgcaggttcttgaattagccattcagcactgtgggtaggggtttcatggtgcaaggatgggtgactcgcacgcagagtactgctgcccaactcctcatcctgaatctgtggcaagctgtctgtccttggtaaacttactcagccaatgtgggattcactccacctgctttttcctgaatctgcacaggtgcaatgtctgtgtcaggagtaaatcatggctggcctgccactaatcatccttttcgactgcccagaaaaacaaaaatgctgcaatttcttgagtcctcttgatggccagacattgaatgactcttgctgaaaataggctaatgatccccactgttagtgtaaacacctaccactgctgctatagagagtcacctccaggaacttgaatgattagccattctacatagagaaccttgattgctttaattagtccatgtgttgttcagtcactcagttctgtctgactctttgtgaccccataaacttcagtaccccaggcttccctgtccttcaccatgttccggagcttgctcaaactcatgtccgttgagtcagtgatgacatccaaccatctcatcatctctcgtccccttcttctgccttcagtctttcaagcttcagagtcttttctaatgggtcaactcttccccatcaggtggcattcagtttcagcatcagtccttccaatgaatattcaggtttgatttcttttaggtttgactggtttaatctccttgcagtccaagggattcttcaagagtcttctccaacaccatagttcaaaagcatcaattcttcggcgctcagctttctttatggtccagctctcacatccgtacatgactactggaaaaaccatagctttgactagacagacctttgttggcaaactaaagtctctgctttttcatatactgtctaggttagtcatagcttttcttccgaggaacaatcgtcttttaattttgtggctgcagtcaccatcttgcagtgattttgaagcccaagaaaataaagttcgtcactgttttctattgtttccccatctatttgctgtgaagtgatgggactgtatgcgatgatctttgttttttgaatgttgaattttaagccagcctttccactctcctctttgactttcatcaaaaggctctttagtttctctttgctttctgccattagggtggtgtcttctgtatatctgagattgttgctattactccagcaatcgtgattccagcttgtgcttcatccagcccagtattttgcatgatgtactctgcatataagttaaataagcagggtaacgatatacagccttgatgtactcctttccccattttgaaccagtccgttgttacaggtctggttctaactgttgcttcttgagctccatacaggttactcaggaggcaggtcaggtggtctggtattcccatctctttcagaattttccacagtttgttgtgatccacatagtcaaaggctttagcgtagtcagtgaagcagaaatagatgtttttctggaattctctgcaatttgatctctggttcctctgccttttcaaaatctatcttgaacatctggaagttctcagttcacgtcatggtgaagtcaggcttggagaatttcgaacattactttgctggcatgtgagatgagcacagttgtatggtagtttgaacattctttggcattgcctttgggttttgaatgaaaactgaccttttccagtcctgtggtcactgctgagttttccatatttgctggcatattgagtgcagcacttttaacagcatcatgttttcgacttgaaataactcagcaggaattccatcacctacactaactttgttcgtaatgatgcgacgtaaggcccacttgacttcacactccagggtgtcggctctaggtg

SEQ ID NO: 29659 - DNA, 1597 bp, Bovine  19866881116282
  misc_feature (1)..(1): n is a, c, g, or t
ncgtgtgagattgtgcagtagtttgagcattctttggcattgcctttctttgggatttgaatgaaaatggcccttttccagtcctgtggccactgctgagttttccaaatttgctggcatattgagtgcagcactttcacagcatcatctttcaggatttgaaatagctcaactggaattccatcacctccactagctttgttcgtagtgatgctttctaaggcccacttgacttcacattccaggatgtctggctctaagtgagtgatcacaccatcatgattatctgggtcctgaagatcttttttgtacagttcttctgtgtattcttgccacctcttcttaatatcttctgcttctgttaggtccataccatttctgaaatcatatagaccttaattaacagtagagacaggggtctgttgatttcaagcacgaaacagaactgagagaaactttggcttctggggtcattgtcaagaaaatcataggaaactggatgcacaaaaatcattttaaaataggaaatcagacatcttcacctccatcaaatactctgtattttttctttttctatttttttccctatggaaacaaagaaagcagctacagagaattcctgcagagaaaacatatatattcttctaagccaagtgtttggaaaccagaggacagttaggctctgttaacaatgtattaattcacaacaggacaggcttcataaataataaacgaatgtcaaggggtgcctctaccatgaactagaactgagatgaatatctgagcgcagtgtaaagctctttagtgaaaatgaacttggggttcgactttaaatgagtaagtttacttacttggttaaaggtagtaattaaccgaagagtgattatggggtctaaaggatccatttatttgatagagagtaaaaagtcagtttcactaagctttgcgaaaagaagcattaagaatatttgcaagcaagctgataccaaactgtcacgtgagcagctaatttcagatagatagccaggagactctgagaaaagactctgttgaaataacagtaagaaattctacaacctaataaataccatagggagaaaggagttagaaatagtgatattttaaagttaaagtataatgaaattattagtaagttaatagtaatagagaaggaaagaaaacagtaactccttaaaagagattggccaaaatatcccagaagagcaatataacatgcccatttgttttttggtttcttatcgttataaatgatggaccatcaaagcaacagcaaacccattaatcaagactgtaaacaattaaaatctctttccagatccgggaaagcatccgaatgatcatgacagtgccaaaaaaaggaacataaatttgagtcagctctttggatctgggaagtgtttaggctaccccgccaaaaagtcagagagcaagaagtctaaactaagctgataacaactgatcattaattagaactgaagccaactatctcagtatagagaaatgtcttggctactcagctaagagccagaaagccaaaggtccatcttgggttcacgatgattaatcgcaggcaaaa

SEQ ID NO: 29660 - DNA, 1553 bp, Bovine  19866881127026
  misc_feature (1)..(1): n is a, c, g, or t
nccttggagctgtgggtcctgagctggtagagtccggaagctagcctgttagtgcctgtttatagagaaggaaaattctctgagcaggcttagtcatattttcaaagctgctgttttatggacctcaagtctactctcatagttagtgctgcaattctagttcagcagtcgtgtttccttttgccatcaatttctctgtctcctctgatgtcgctctgcatgctgcacatggcctgggccagcctcagttttctctagctcagctttgggaactgaagtcactcatttcttgattcaatagagacaaaagtaggagactacagtctgtcaagcaatagaagacaagacaaattttgctgccaaaagccacaaaatcagtgctgggtcactaggccctgagctgcacgcaaccttaccttagtatctgcattgttggcccctgcacacggctggatttctacctgtctctgtttcattgcatcagttctgctggattggcccttagttctgaacccttaacgtgttctgatgggtctctgacaacctgcccagttctaacctagctttcttcgctgcctccctctttactggctcctgctttaccatacatggctgaaaacggtcttgtacttactaggtctcacgatggtgtttgttccagagaatgatgattcacgagcttggcccagtccctttacccaccttaacactgcactgaaagtgacccctacctggactctgctgttgccctgccccaactttcccaacacacaccactgaacgtgtctgcttagttgctcagtcatatctgactctgtgactccatggactgtagcccatccagcttctctgtccatggaattttccaagcaagaatactggggtgggtagctattttcttctccaggggatcttcccgacccagggatcatacccacgtcttctgtggctcttgcatctcctgcactgtcaggcagattctttaccaccatgctacctgggaagcccatcaaatacaggcactcatctgaatggaaggtgagtttgccacacttttctggatactgattactcctcttggtctgttttctctcacccgaatgcagtcctttctgagtttcttctcttctcactcccatccctatcctctcctcagtgggtcccttgttcgagcctgcttgtattagaagactgttctttaatcttaaccttttccctggcttctgtcaggcttcacttccattcttgttgttccaaataaaggcacataaaaaagtttggcatcgaaatatgagaggggagaaagataaatgatgaggtaaattagtaaaaccagaggctgtggagcccaacaggtgtggaatagaagggaaaataatggggaagcaggtgatctgcattcatcaagagaaactcataggaaagaatattcaaaacaatgcttatagcttcaagttgctgtatatttaacgatgtacacagcatagcaataaagacagtgaacttaaaactcaacctgagagtgtgaatatgatctttcagccattattgag

SEQ ID NO: 29661 - DNA, 1138 bp, Bovine  19866881142526
  misc_feature (1)..(1): n is a, c, g, or t
ntcttatggtcaagatgcttttctttgaatctttcaagattctattctttgggatagaatactagttaagaatgtttcctatggaggattgggattctgattggagactgcagagcagattccatactcttagcttctgatgaggggagaaaacttcttaaacaagtttcttgaagaagcagattattttgaaatgcctgaaaccctgacttctcaggaacatgtcaaggcaacaagtatttattatgctccatatgttaaacatggctatcccagtgataggtcaccatcaaatgaaagacattctccactgtcaaagaaaaagacacatgtatgccgtcagagacatgtaaacaatggcaaagttagcattttctccatgatggaggtagaccgatttctagtgctaagaggtggtcagcaaaaacaaaacttaataaatgctggctgttccatgggacacatttggagaagtaaactggagattatgcagtaagtgacaaagtcagcatcatagacagaaagcactagaggaagaaagaaagcagtggttgaggccaggagaggtccaggagggctttttgcatagtgtgacttaagctagactttgaaagatgggcagaatggtgggagggggaggaagaggaaggaggcttttagatagaatattgtcagataggcacagtcttaagcaagtctcagaaatgaaattcatctccagatgaagagagaagagctttgtgagagcagaggttcatgctgaaggagtctgagatgcgggctggacatgcaatgaaggataagtagactgtatgacagaggggcatgaatgctaggcggaagcatctggcaggattaagaacctttccaaatgtgacctattacagaatgttcttccatgaactttcccctgtggtttatatcattccattcaagtctctcagagggcagcttgtttacaccaatgtataaaatcagatttttgtgcttcatacattgggcaagccttgtatcaatcactattaagaatcagccactcttttgtttttcttttttaaattatgaaaatattatgcaattacaggagacttcaaaaatacagaacacagttacatatagttccactatatattacaat

SEQ ID NO: 29662 - DNA, 876 bp, Bovine  19866881197492
  misc_feature (1)..(1): n is a, c, g, or t
natatgtttaaactaaactgacaactgcagaaaaaatgtaagattctttgaaaggctgccttatgtgaactgacgaggatctcagaaaccacatgccatttaacacacagcaataactccactgcaacgttcccaccctcttctggaggggatattaaaagaggttgaccagatgcttccctgaattaggcagttccaagcaggagacagattcttcctagcatagaagtggccaacagaggtagggttcatccaaagtctgacagggcgagaagtcacctggctcagtggctttcacattggaaggagctgatccaggaagggtgcatgtgtgcatgggcttcacacctttctatgccagagaagctccaatcttaactgctgcagacatctaggctccctggaagacttcactgctatatggcaacctctccattttacaagttacaaaaccagagagaggttccatcaggtatccaaagtgccagagaggtaaagttggaacaaatatttcatgaatcctcaactatacaagctgtaagaccttagggcataaaatattggtcactgagatgagaaattattacctggtacagttagtttgcagaatacctcttgcttttagctgtgtacacacatctccatgagtcttggagcaagcttttcccctctacctgtccaaggagttccagggagcctgtgaaatctctaacatggcaaattcaattttacatgtttgcgcaaaattggtacagacctttcctttgttcttcaaaagtatctgtgatcacactgaatggaaaaaaaaaatcaatgtacttcaagaagggaacagaagggaagccccacaagaggagtagtttataaccaggaaaa

SEQ ID NO: 29663 - DNA, 977 bp, Bovine  19866881521680
  misc_feature (1)..(1): n is a, c, g, or t
ntgatattgtcttgggggaaaatatcctcttctacacttgcttgattttctttccctcaacagatttgtcaaagcatctggccagaaatctaaaaatagcctctcagtggttagctgtccctcttctcccttcctcagtgttaccatgggaatagcgtaatgaaggatggaggcgtctgagaaagcgctaagaagccactggcgtctgcagcctgcctgttctgagagagtcaatctaggtgaaggcaagctattgcctcctttccattgatcaaaaaaagatgaatcttcagggtgccccaaagccatacaacaacccacagcaaagatagatgtgttgtcaagggagggaacttgctgtgaatgatactgaagggtttctacatagccaacatatatcttcaagctgcaccttatctggcaatcaccactgtcagacagtaagttttgtagtcatctaggcatctaggaacagttctagaaccccacatccactgtaactcccaccgcctcaggccaagaattagtccccactgctccccaatagagggtcagcttggtgtagactcacctccgcaggcttgggcagatgtggtgggttatttccacttgaccatttgcctgtccaggtggccctggtttgacaagatctcctgaaattgaggtccctagacaattccaggaattccattcttaaacaaaactaaaaaatataataaagactgacattttaaaatgctgatggcagtgtgtgtgtgcatgcgtgctcagttctgtccaactctgtgaccccatgaactgtaaccctccaggctccactatccacggggattcttcaggcaagaacactggaggggttgccatgccctccttcaggagaacttcctgactcagagatctaacccacgtctcctgctatggcagacataatgctaataactttgcatttacttaatcttcccaataattacatgatg

SEQ ID NO: 29664 - DNA, 1376 bp, Bovine  19866881554358
  misc_feature (1)..(1): n is a, c, g, or t
ntaagatatcacatatttcatgattgagtcataggatattttcaacattataaactgtgaaagcctttttcagtgttaataaaaaatagcattttactgttcattttcctggagtaaaattatgttgtagccatatgaaatttaaaaaaaatttaattaaaaaaatgtaaccaaactgctaatatacatggaactgaattttttactttcataatttttccaaggtttaaaaattttgagaattaatggagttattataaaaataatactgttttactttagccataaaaatttatttgcagtgagtaatactatatgattaccatatgaaacaaaaatatgaataaactgattacacatttcattaacatttatcactaacaaatatcttacatatttatgtacatattacagttactctgtaaaggagaaaaaagccataaaagtatatatgtggttttgtgttgtggctgtcttcagatcagcaaacttgaactccatatgaaacaaatcaaatgagaattgcctctataatctagctcttactaatttcatagccatgcaatttaatatcaaaatgttgagattcaaaggaaggacaaggaacatttaagtggaaatgtcaaaccccaagagtatacttattacagttcagtgaaaatatatagatctaaagcttttgtgcacagaaggaaatttcagaagtcgttgaggaaaaaataatgtgttcaatattaaacagctgtaatctagaaagcttttaatcataatttttacaggttacaaagagaattatcagtgccaatgtgccaaatatcaagtttcatattttaaagccagctatttgaaaggaaggagaaatcattgaagaaaaaaaaaaagaatgtaaaataatttaacctaaaccagatcatcaatatatgtaaatatctttttaaccatacaccataaaaagaagttagaattttactgtaaaacacatctttattaatgtgtaacactttgatctattaattctcaatattataatgcacctttattagcacatagattagaattctcaaaaacatcagtaggaaacagaatgaacacattttattattattttaataataataatttatttataaaataaaaaattaatatctattaattaaaactcctcctcttcttagttttaaagatgaaaagaacttttaaacaacttgtcaattggcaggcggaaaaaattaacatacatttctcctctaaatattatcattctcaaaaagtttattattcagggctctataaaatctccctattatttataaaatgtattcattattggttcttagttatattttcgcacttatttgttagataaattgaaatgt

SEQ ID NO: 29665 - DNA, 4843 bp, Bovine  19866880545441
  misc_feature (1)..(1): n is a, c, g, or t
ntcgctcagttgtgtccgactctttgtgaccccatgaatcacagcacaccaggcctccctgtccatcaccaactcctggagttcactcaagctcacgtccatcgagtcggtgatgctatccagccatctcatcctctgtcgtccccttctcctcctgcccccaatccctcccagcatcagagtcttttccaatgagtcagctcttcgtatgaggtggccaaagtactggagtttcagcttcagcatcattccttccaaagaacacccaggactgatctcctttagaatggagtagtgcagtggagtacccaaaattagccatacttgggtttaagggcataatcccattagctgcaatgtggacatgatagaagattaaagagctattttagaacacaaattaaacaaatatgaaataaatataagaataaagtggaagaaatgtaaaattatgatttataactgaagaagtcaaagtacctctccagaactgaaatgattcagcagacaaaatctttaaaagtagagactgtgaagactttaatgatgtgatcaataagcttgacttaataaacacctaaaatatagccatctaatacagaattttatttaattctaatctcatctaatctagaattttatttaatgtgtatctgtataaaaatgtcctaaatttttttaaaatcttgaattttaagggtggattttctgattgtgaactaatcgaattataactaaaatttttaccaactttgaaagacaccaatagataacataggcttccatggtggctcagcattaaagaatccacctaccaatacaggagactcaggtttgagggattcctgggtcaggaagatcctctggaggaggaaatggcaacctactccagtattctttcctgaaaaaatcccatggacagagaagcctggtgggctacagtccatgggactgcaaaagactgggatatgacatagcgattaaaaaacaacaacaatagataacttagattaacaaggaaaacacagaagtgaaattaaaattatctacaaagcaaataacagaatgtcttttatcaaaacatatgatacagaaagagcaattcatgttgaaaaatgtatagccttaagtgcctacatttttaggaaatgatgaaaaataaaggaatttggtatttatcctaaggaattagacattcacagtaaacaaaaataagtttgaagatgaaacttagagggaaatttttcgtataataaaaagaatacagatttttcaagaaatctaaaagctggtattatgagaaaaataacttctttgattaatttaaaaaatttactatgagcttggaaacttagaagaaatcctatattaacatggatcaaacgtggttgattgtttccatggcagaatgttttgaattctatttaaaatttcccaggtttttatcatggtaactaatttttaaaaaattaatagtagacaaaaaacatttgaaagctgaatccaacctgtatgtcaccagtttgcaacttgtacggtataaaatttattaagattgcagtcccaatttttagcataaatgtcaagcatgttaggtaaaatatcacaacattgtcataaaaataattagcctctcttgtagcctaacatctttattctaagaatacttctattaattacttggagctctcagtattccatttttaacttcaaggagaatggcattgcactgacttcaagagtgagagaaataaagtaaaatttcttcttaaaaaagctgatagtttaataatgatgaaagggataaacaaggacaagtttacttagtgattattagttctaaccccccaaattatacttttcaatcattttgtgggattggcaatttatgtctaccctgtccatgtcatgagatgttcaatactttgattcagctactttttccctctttgaccaaagtcatcacagaaacccaaaaatcaatattttgatttatttcagtcaggtaggatggaattagggttacttgacatggatttaaagccaatgccactcttctttctcatcaattccagatgaaatttagcattgccagggattaacaccatagcatattatttaggatgtggattagtcacacaaatcttcttgaatcagttctataaagatgacaaatggctaaaggtgccaagaggaagaaaaggacaatgtacaatctgtgaacaaaaacacaagccatttggctttgtgtgtaactgggtccaagcactttgccagaggagaggaagagctgggaaggtaaataatgagtccagagatccaagccccatctgttcagacaggctgaagctcactgggatgacagtgtttatgctgggcattgatagatgtcatctcaattggctcttgacatgagagatagttgaggatgtctgcattagaaattgatcccaagatcctgaacatgagccaaaagcagtgtttaggaaaatattgtagtaaaagacaactagtgttctcttcccactgtctaatccctctcaaaaaagaaatgtgaaaagaaatgaagaaaaagggaaagaaaaaaaaaaagaaaaaaaatataggatgctacccaaggctataaaatgtcaaaatagcatttgcctatgtacaattactaattattttcatattttttacctatgcattcctttctgtcacacttaccttagttttattgttcttaaacattaatttgttttctcttacattataaaaaggaatttatactcaatattgacaatttctgatgatgaattaatttattaaattaataatttattgttttgttttgaatagcatacaacataatagtccatccttattttaatttatatttctttaattacttgtgagatcaagtagtgtttaatatacttccatatgttagctaatcaaccatttactctttgatgatatttgttggtccaggtttttttttctacatatcttaggacatcaggcactggtcagacctatccaatttctgccaactgtaaatggtatagcctttgacagttttcttaattccttttatttcaatcagttttccagttaaatgggaataatattggtatggtaaaatgtacctctttattcactggagaaggaaatggcaacccactccagtactcttgcctggagaatcccatggacaaggagcctggtgggctacggtccatggggtcacaaagaatcggacacgactgagcaactaacacacatacacacacctctttattcataatgttatatgtatttttaaccaaacaggaacttgagtcttctgtctcctttattttccgttgttgctgttgttcggtcacctagttgtgttcatagtcaatccataactagcctttttggtttaaccccgtaatgtgcttttgtcctatttcagtgagtctaaaaccccatcaattgtaacatgcaccattactttaagtacccacatcaaagaaaaagtgctgtcaatgaatgcatcaacacattgtttgacttagatctggagcaccaggtttttttacacattattgccatcacaaaatttcactatatatcatttctaaaagaatatctctattgtctttttgattttgcaaatttccatgcacttacacaggcaatggcaattggataattaatatggcacagagactataagaagcatcctaatttcagagatgttaaagtgttttcaagtgtgccttagaatttcaaaagatagtatttctcattacctccattgccatcacaatagtcttaactgtcatcatttcttatacaattgcaatagttatagaagcagtctatctgtattcatcctgcctgccttcttctatccaatcctatcctatctctacctagtagccagtgtgaaaatctgataatgtcactagtgctaggttttcttcctctggttcccttcaatggctttccgttgtgtttagaataaagacaaagcttctctatcaaccacatcttgcacggtcaggcccccatctcttctccagcctcatctgcttttcttctcatccttctctgcttttcttcactctgcattctagaggtcagctcatctctgctccctgcctcatctttgtttttccctctgaccaaatgctattcttccctgtaactaagtcatccttgtccttcagatctcaactcaaattatttcctcagagaagcaatctttgacctcttcagtcaggttaaattaccgattaagttcatctatatagcacttgacgcagttgcagtgttataattatttttgtgattatttataatcactataagtcatataaggacagagccatgattacttttttccctcactctattgccaccaaccaacgcaaggtctaataaagaatagatggtcaccatgtatttattgaatacctgaaaaaaggaagactccttattaggactgaagatgataacacagattatgatagtgcatattgactgcttcatagcaagcatgttataaattttacctcttattattgtagtcattggcacattcctcatagagcatctctggcttcccatttactttagaagagttaacacgctttatatatcatcactaatttcaatgtgttcgcagtgcagtggacccaagtgatctcttaattgtaaaagaattgtacctgccctgcaacatttgttttcttgacatcaattatacttaaaactactgagctggaagcatatcaagttaatactatctattaaaaggcccaaatttgcatcgctagaagaatgaggaaacaaagagccaaattcactt

SEQ ID NO: 29666 - DNA, 1554 bp, Bovine  19866880578610
  misc_feature (1)..(1): n is a, c, g, or t
ncaaagggagtaagagggagagacaaaaatcttaacagtttaataaggaaaccttaatggtttaataaatattccaaaaccaaacattctgaaaccagatctgtaatcaacataaaatgtctttgttttgatggtggtgggactgactgttctctccacagaaatgatgatggttaattagagctagaatacagatcttaatttaatcagagatattaaatgtgcttgttcctatcaaacattggctttaatttttgtataacaataataatgaccaattttagaactgtactgaagttgaaatagttatcattattatcaatatttatagaagactaaaattttggatttccaagggcagtgaagaattaagtaactaatattcatatgggcacaccactttcctaagtatcataacaaaatcttatcttgcaagactcagatattatttactctagaaagccttctcagaattcttagccttatgtctaggttagacattcttcctctgtacactgatggcctgatttatcactccattataatacttttgtgaatttatttatctgcctctgtatggtaagctctctggtagtagaaacatatagtacttgatcatgatatgttccagttattgattgctgcacaacaaatgactccaagaatttgtggcttgaagcaatagtcatttattttgttcacaaatctgccattcggacaggacgtagcatggatggtttgtctttgttcccacagtagcaatgaggtagctgaactaggactagaaaatctgtttcgagatagcttcattgaatggctggtatgttagttacctagtattgtgtaacaatttaactcaaatatatcagcttagaaatgcaacaagcaattgtgtgttgttgtttttttcccacataatttctgtggatcaggagtttgagaattaactgaatggttctgctcactgtagaaccacaggttgatgacactgctatcaaaacactgactagggttgaagtcatatgaagccttgactgaggctgtggaagctgcttccaagatggttcacacaagcagatgatttagtactggctattggcagagttccaaagaatagcaaggagagataagaaagccttcctcagtgatcaatgtgaagaaatagaggaaaacaacagaatgggaaagactaaagatctcttcaagaaaattagagaaaccaagggaacatttcatgcaaagatgggctcgataaaggacagaaatggtatggacctaacagaagcagaagatattaagaagaggtgtcaagaatacacagaagaactgtacaaaaaagatcttcatgaccaagataatgatgatgggagattatgattattataacctagagccagatatcctggactgtgaagtcaagtgggccttagaaagcatcactacgaacaaagctagtgggaggtgatggaattccagttgagctatttcaaatcctgaaagatggatgctggggaaagtgctgcactcaattatgccagcacatttggaaaactt

SEQ ID NO: 29667 - DNA, 1386 bp, Bovine  19866880619737
  misc_feature (1)..(1): n is a, c, g, or t
nattaaacattcaggttaaattaaccaactccttatacctctttgtcatccttaaataaacataaaatataatactactataacactactgatatctaactatacatatttatttacacaaaaaattttctctactaaatcgtactgacccagggatcgaaccatagtctccagcactgcaggcagacgctttaaggtctgagccacaaggaagcccactaccatgaaggctgtttcacttatccccagtgcctggcacacaagcagatatttcgtacatattttctaagaaattgaatacataattatcttatcatttgcttaaaatattttaatagatgccctttgtctacaaaataaaccctgaactcatttcagtgggatatcagtttcttcctcataagtttcttgcttagtttagactctttgctatctatatatttattcatgatcacattccactaaggaatgtggctcagacagtaaagaattcacctgcagtacaggaggagcaagtttgatccctggattgggaagattctctgaagaagggaatggcaacccaccccggtattctttcctggagaatgccatgaccagaggagcctagtgggctacagtccatggagttgcaaagagtcagacatgactgagcgactaagcatgcattctactaaaatataagaagttcttctatataaggctgttagagtttcaggcttcaaggccatgggtcacccaggtccatagctgaactatttcagggcctggtcaatcatgccatccttgcactaagggctcctgcaaagagctcgtgggaactctttgttacctatggatctaaagatagtgggtgtgttgaaatgtaggccaacctttaaagcaaaatctaaaatgtccccagcctattttatatatatacctggccttgccaactctgtctctctccagctgaagttctcaaatgctttcctccccaccattcttacatactcctagatgttcaggtctttttttgtggaatcttaggttgcagatagcacccacttttaccactttgtcttcactaccatcccttgactgcctgctaggaagcagtatatataggctacttcatcccccatgaaatgtgtaagcgataagaaataagaagctgtgctttgctttcaagagaaaaggctgggagtgagctttctgcaaattccttacacttagtgagttaacttgacattccttgttttacgtgggctgaagctggcacgcagcaatgccagcatttcctctgctgctagcatgtaattaaatgctttgtgaagtatttggggacattcggttatgtgaaaaacatcacagaaatgaaggttgcctttgccttgtcttttaatc

SEQ ID NO: 29668 - DNA, 1620 bp, Bovine  19866880672800
  misc_feature (1)..(1): n is a, c, g, or t
nttgtttttttttttaattttgaataatttttgttttattgaggcaaagtgaacatagccatgcaactaacattcagttgggaataaaatattgagtgataaagataaaaatgaaaaaaaattgtaatgacttttctacacaattaaatgtatccagtgaaaagtgtgtcttatcttgaggttatttcttttcttttcttttttttttttttccatgtttctactgaggaatgatatttgtagatcttagactttcttagttgatgttttattgtctttaactagacatgataaaattattaaggcaacattggcttccctggatacctcttgaaatgcatgtctttcatcagctattaaacctacagtgtagctaacttcctataagagatgatggaaaagatattcattcattggatagatgaagcatagaacatcttaaaaagtatgctttttttttcaacctggaaatcaaaccaattaaataaaattttatttcaggagctaaaggatactttttttccctgtacttctttggctcatttgaaaaaaaatgtttttatctatctgtttgtttctctgaaagtgagtaattctaaagaatacatttgttttttattttcatttttatttaatgaatgtgttttcttatcttcacaaattttagcatacttctcagtagctcaagggatgctagaatctttaatggtaagtaaattatgatttcacatttttttaaaaagcaacaattacaagcaaattcatttttgtcttaaataaactatgcttctaaatttaattaagcaagcatagtgatttttatgatccaaacatctattttatgcttttaaattactttagagttggaaaacattttaaatagtattgtatactgtaatgaaaatttttttcctgaaaatattattaataacagtaaactgattttccatgattccatcttgtccagaaattttgcaatatgagaaaggatcattgcaaattgattgctactcccagaaaaacaactcaaaatcacattactgatgacatgttggctacattatctttgctttcagaaagataggagttaagagaatgatggttgagcagaactgtttttccaatcaagactcaggcagacatgctttatctagcagccttgagtaatgtcctcattttttaaaactctgttattatgtgtctgctaacgtccaggaatacagttatgtctcctttgtcattttgctacagataaaaagaaaaatttaccaatataagtctagataacagatttataacttatgaatctattatttcgcatgatggcaaaatagatcagaatgagacatccaggaaagaaggatattggacatatggtaagtggtttaaacagataagccgcaattttgtaccacgtgcaactacagcctttgcagtgttattcgaagagtgactaaaatacctgaaaaaaggaaagaaatagtgacatttaacttacgaaattatggtttcagtgtgtctgccctctgatgccctcttgcaacacctacatcttacttgggtttcttttaccttggacatggagtatctcttcatggctgcttcagcaaagggcagctg

SEQ ID NO: 29669 - DNA, 717 bp, Bovine  19866880687034
  misc_feature (1)..(1): n is a, c, g, or t
nctaaacagaaacctccttaagtgataggctgagcctcaagggcactcatcagaccctggattttgacatccatagaaaagatggagccagggagtatagatgtgttgttgttgctgttgacagaaaaataccctgcagtatcagaaaagagaaatggaaataatgaacaaatcaacccagagaacaggtgctgacatgtggcttcctatcagatagaacacttccttcactatgtgacaagaaaattgaggccagaacgcccagccatattacacaaaaacagaatctcaaaaaaggaacagcgggaggcataaaatgatagatgaaaggactctaggaggtggcctgatccagctatttgaagactgctgtggttgaaggctgtgtggtgctttactcctggtctctgttggcctctggggatttcacctcagctggcttttgcattgactgaaggttggaatgcagagttcttttgagtggaccaaaaaggatctttcagttttcagtgtggatttgaagagccctggatttttaaccatggaaaaagggaaaaactagggccaggaaatctattttagtatatcataatactgtattttatgacttatgtattctttccagaaagaatattagccagagattctaaaagtttgatccagggtttcttggaagtgcctgagaccctttaagtaaggatttaagtgcaattaaaa

SEQ ID NO: 29670 - DNA, 2231 bp, Bovine  19866880826423
  misc_feature (1)..(1): n is a, c, g, or t
nttctaatgtgatatcttttaaataagtcctattccttgtcctaacaacttgtctcttgattaatagtccatcaagcagtacaaacttggactggataagagacaggacattggagtcataggaaagcccaggactctcacccgcaaccataaatgctggtcacttccaggatgtctgtgatgacaacactttggaagtgctgactaaggaggcttcccattgaggaaaatgctgagcagtgaatgcagcatgcacgggagacaaggattgtacgaccagtaaaccttgaaatgttccttgttgtctgcaatcctttggacggcactggagatgaacaccaagtctgcagtggggcccttggtgaggacatccttccagggtaccgctcagtctagaaagtacattgtgcagccctttcctataaacctcctaaggcaactccccacccccatcagcagccaccccacgcaggtcgtataaatcatttctcttcccctaaggcctcaagccaactggcataatgacatatcgaacttttcttcccttgtgcccctggcagattatatattcactagcttttaagaggcgagtccaagctattgagtactcttcaaatttggggccaattcccttgcaaggtttcatccttattagaatttgaatggctgttggcactgtgtcgcacaccgtttgcctaaatgagaaaatccttgagcagttatcctgctttaatgcaggtaacatgcagcaaacccataccaaagcctccattaggtaaagaaagaaattaggtctccaaagagtgatgctcctttttaatgtcaagaggacgtctgggacctccctgaggatccagtggtgaagactctgtgcttccaaagcagggttcagattcaatccatggttggggaactaggatcccacatgctgtgcgagacagctgaaagactgagaataataatactattaataaaattaattaatggatttccctggtggcacagtgaataagaatcctaccaatacaggggacctggagttttgatccttggtccaggaagattctatatgcctcagagcaactaagcctgtgagccacagctactgagcccacatgctgcgactcctgaagcccctatgccctggagcccatgctctgcaacacgaggagccaccacaatgagaagcccgagtaccacaactaaagagtggcccctcctcactgcaactagagaaaggcccatgcagcaaaaagacccagcactgccaaataaatacatgagtacataaaatttatttaaaaaaaaaacagcagaaataagaattatgagagtaattatagcacagatcttaatcatttcctcatcttttggatgtgatttaaattaggcatttgttctcccacctttgtcaggttcaatcaatcctgcctgtaagtttaagtagtatctctcttatgcaaattggaggtgacaccataggagataaaattagaagagtttttacggagactttaatggaagctattgatctgctcattacttggcctttggtttttagacatcattagcaggaaaaaacttaacagaaaagcctcattagtataggaaaggcgcaatggcatgagaaatgcatgaaggtaaaaatcaggtatcagaattctttagacatgtatgaagtattccaggtggtctggaaaagtagaggaaatgcctctctaaaaggagctctcatttcacttcctgcaaaatgttattgtaaattcagatttagacatacatttgaaaaggacctcatcttttcctgttcttccccttcaaacctcagaaatttcaaaatgaatatgtaaaatgtatgaaacagtcagaggtagagtccagatttccctgatgctctactcaagtacagggaggcctggcgtgctgcaattcatggggtcacaaagaatcggacacgactgagcaactgaactgaactcaactgaatactgttactttcagttaacatagtttatgccctgaagtcatttatttctttctgagttacctggtaaggatgagtacacactctatttttttttttttccttcccttaagctagtatttcatcgtttactgggaagggttctattttcaagaagattcacaaatcttcatataaatgtcattctcaacatttaatgtcattgtactcaaggtagatcaacttttagagaaattgtaagtcttca

SEQ ID NO: 29671 - DNA, 1240 bp, Bovine  19866880944095
  misc_feature (1)..(1): n is a, c, g, or t
nttcttgcctttcttgaaaacgttacatacaacctcttggtatctccttttctcatatgtaaaattaggagcctgagatttaaaaattcctcaagctccttctgctttataatttgactttattattttatagtgttatcaatataaagatgtatgcaggcaaaaccacactgaccttcaaaaagatgatctttcaaatgacttaaatgttcttgtgttcattttgaagtctagagattgcttagaaactttgatctattttttctcttgtttctttaaagaaaacaagcctctatggggcttcttttctctccacatctctctctacagtttcctgttttttcctgaggtgaaaaaaaaaaaaaaaatcagcacactgtacctatttttcaagcagaaagtttgcagtcatggaaacatccctttaaatcactgttttgccttccacaatgagcagaatgtccaacaattcagcatccatagcacagtcttgtttaaaatcggtcactgacataaaattatacccagcaaataccatgggagcagctgagggtcaggtcctcatttgagacaacgtaaccattttgacctggagaggcctctatccacctgcatccattcaactctctcagaagcctctagtgctgctgtgaaacaagcagtctaagagatgtaagccaccttatttgaaacaccaatttcatgagcaataaaatttcacattttcccatccttaccagttgcaattgcttgagactgatgcttggttttcatgggctgcattttgaaatatgaagaacaaaagcctcccaggccttgctggaggtgccagctgtggctgtactataaggacttgtataatgctgtcttatttcataaaagaaagtgggagatttgaatttgtattgggcattttcccattccagctgcagagttgtttttttttttttttttcctaattcaaagttattttacttatgctgattcttctatccttatttggccattggagtaatttattgaatgtcatctttctagaaagatatcagtctctagaattaacagtcaagagaagtgggcctgtaaatccatcaagcaaaaatatcaagactcctgattatatcaagtttaccctgtaaaaggaagagatgggcccagaatatctactgatattcttaacgcctttcaagatgtcaggtggttatttctctccctggttctgtctcctcccaacaaaggg

SEQ ID NO: 29672 - DNA, 999 bp, Bovine  19866881055943
  misc_feature (1)..(1): n is a, c, g, or t
ncaaatacctttcaccttagaggataggtctcaacatgtgaattagggggtgggacacaacccaataagaccataataatattccagtctagaaaggagtataaaatgtcctaacataaaagggaatttgagatgacaccaaagagcactatttctaggtatagaaacacagcatactagagagctagaaaagcactctcacaggtttcaaaggaataaaattcaagggtaagcacatttgaaatacctcctgattttggatatcagttccttgttccgaatacccagtagagtccatacatattctatctttctaaaatgttctctgtgtaatatttgtgaatgtgtaaagtcctatttacaatgtaaagaactgtttaaaattttggagttgttattttcataatcataactttggctaggagtagagtgatatggtgaaggcaatggcaccccactccagtattcttgcctggaaaatcccatggatggaggagcctggtaggctgcagtccatggggtcgctaggagtcggacatgactgagtgacttccttttcacttttcactttcatgcattggagaaagaaatggcaacccactccagtgttcttgcctggagaatcccagggacaggggagcctggtgggctgccgtctatgggatcgcacagagtcagacaagactgaagcaacttagcagcagcagcagcagagtgatatggtaatagagttggacaacattgagagagaaattgattccagaagtcctctgaaaaggattaatcatggtagtgaacagtgtcattattccacacctccagagaccttccttgcatttcacagagatgaaccccaggaaaccaaaccgaaaagggaactcagatctcctctcctgctactaaggaatttggcatcaataaatgtggcttattagaatgaacaaatcaactgaaagttgttctgattctaatttgttactcgacacatcaagttagact

SEQ ID NO: 29673 - DNA, 1201 bp, Bovine  19866881076498
  misc_feature (1)..(1): n is a, c, g, or t
nttttaaaattttttctatgctacaaaacctcattaacactaggaatttaagtactaggcggacttaaagatagtattaatgactaacacttgttatgagttatattcaaattaatagtctatatcaatatacatattttcctctctgaatttttaaaaaggcatttgaaggaaccaagcaatctaaggagtttgcacgaacgacttctcttcttgcaagacgtagcaagatgtagtgatttctctaagcacagaggaattaaacttattaaagtgaaggaggaatctttgccaataaatgcttcaccaggattcataaactggcttgggaaggaaggaatagaacatcagaatctagctacgtgccattagtctttctgcccttgaaaaaacatgagtcatacactcacataactcacatgaactcttgagttgcaacaaattctgaaatcttggaagtgtcgataggtgagtagtaggagaaagcgaggattgagggactaaaagaggctgacgggctgtgtcccccacaggctgcagtccagctgatagtgtttaaggaatagaaaaaaacacaggtttggggggagatcttaaccaagacccacaatggatcagatctggccctcagagaaaaaagttagcaatttcaagtcacataccaaaaagtcaggtgtagggaagaacatacacagggttggtagacagcctggagacccaaccagcagagataataagcaccgtcacaaatatgagctggctaaggctaaacactgatgaattaatatgtgcccgtgatccactctacatgcatcaggactcagttgtgtccgactcttgtacaccacatggactgcagcacaccagcttccctgtgcatcaccaaatcccagagcttgctcaaactcatgtccattgagtcggtgatgccatccaagcatctcatcctctgtcatcaacttctcctcctgccttctatctttcccagcatcagggtcttttcaaatgagttgggtcttcacatcagttggccaaagtattgcaatttcagcttcagcatcagtccttccaatgaatattcaggactgatttactttaggatgggactggttggatctccctgcagtccaagggactctcaagagtcttctccaacaccacagttcaaaagcatcaattcttaagtgctcagctttacaat

SEQ ID NO: 29674 - DNA, 1118 bp, Bovine  19866881361055
  misc_feature (1)..(1): n is a, c, g, or t
nattacattttatgctggctcatggcataaaccttcagaaccaccagctgagttgtcattgtagtacaactgatttcttgattgatgtacagtgtctgagatggctttgttctcctggcttcccactggttatcagattatagataagaagaaaagaaaagagtgtaacaatcagagcaacactggggtctctaatgatattagaggttaccttctctttaagagagcatttgttattttaaaatgattggatcatccaaatatatcatgctgggcaagtcaactcaactacagactggggctttggaaagctttcttcctgatcccagagttcatctcatttttggctgcaggatatctgtgccctgagaaattagatgtctggaacgatctttaatctcagtggaaagcttttttgttgttgaaatgctgcccaattgtgaggaaaaacacagttttccttatagtgcagagaaagaaacaaaaaaaaaatttttttttaaaggaacatacttaatgctggcctattactttgcaaaaaagagataatattttcctctggctctgagcaaacttcagctattttgtttttctttcttccaaagtggaagaaaattgacatattgagacattctttggaaatcatgtaggacatttagagttggtttggagtctactggcctatcaaaagatccagaaataaactttgatgaagcaaccaattttgctgttttgaaaacttctctgaatccattattatgtaaaacaaataaccgtggcttttctttcaagtatgctttctaatatccactgtgcttcagtacaaattggaattgcaacttcctaagtgcgtatactgtttttctaacacaaatggaaattctatctcctccttaccctctcctattctccatggtacaatggctatgggagtgtgactgggtaaaacacttggtgtttaaaatatccttatgaatcccagctgtgggcttttaatcctaatggagaatgtggtcgtatttgtctcatgcaccagctacttggtgaaggaagctggcgtacagtcgtgacctctaagaagaaaacctcagtccaggttcgatgcacgatactggatg

SEQ ID NO: 29675 - DNA, 1041 bp, Bovine  19866881547654
  misc_feature (1)..(1): n is a, c, g, or t
naggaatcaggctgtgatgcagcccaagcagcttcagctgaccccacaggaagctctagactatacttgtgggcagagttgtcctgtattgggccaaagtaaccaagcctttatatctctgcctcaatagtcattgcatgtgcctgctttgggaagggcatgatcttgggcgaaatgactctctgcatctgaggccgtccttgaaggaactggcagctggcaagtatctgcctgcaacgctgtctatagcttagcaacaaggaccctgaagaggaatgtgggtggaccagcccatgtccaccaaaccatgcccctgccatcctaatacaaaatgatagcccttggtttcctatgtgttaagcaatgttatctaaagtttatgtgtattcccttttccctccccatctcagatacctttgaaagaccaactagacttaagaatcaatagcacatatatcttcatgccaggtagagcatcctactcatccatccttctttctttccccaagaaaggaatttattgaaatagtttatattttttttctaaaaaactttcttcagaatgacagaactatattaggtactccagtgaactggttgaacctgaacactatatttatatgtgcacatatacagtcatatcaaacatacatagagaaatgcacacatatgcacctaagctgttgtaataaacctttttcatacaactagtctaatataaaccctttgaaataatagactcctttatttaaagatgataaacgattattattattaacagtgcttaactatcttgccagatatctcatatagttaataagggcagaaccagaattgtagctcaggatctcaatactgtatagctttcttaagattataaagcccttcagagagctctgattagcaattaaagtaatttttaactgagaaagatgtttaggtgttggtgatagataaggacattatccaggtaatggcattcaccatttctaatcagaacattaccaatggtctctctgtagattgcagttgagaatcctg

SEQ ID NO: 29676 - DNA, 1332 bp, Bovine  19866881601009
  misc_feature (1)..(1): n is a, c, g, or t
ntatgaaaaataagtaaggaaaataaaatgactgcttattgcttgtttcacaaaaagttaaatgtcttaggacaaaatctgaatggatatgaaaaagttgtagacgtgtgtggagaaagaatcttgggaaagacattttatgtgtggtcaagctgattaagattagaatggatttatgtacatttttcaagaatgagttttaatgtcaacagtgcactgatgcaagattagaatttggttttctgttaaaaggacaaagctttcttagattattggtctgcttttaatacagaattataaccaaaggtttttctttacctgttaattaatctgcctgaacagcaaagatgtgtcataccaaaataatttactgtttttcatttatctttattgtgttaagtcacttcagttgtgtccaactctttgcaaccctatggactatagcccaccaagttcctctttccatgggattcttcaggcaggaatattggaattgatcgtgatgcactcctccagggatcttcccaaatcagggagcaagcatatccccatcttttacatctcctgcattggcaggtgggttctttaccactaccgccacctgagattgtctttattaggtttttgattacttaagaaaatctcatcttctcaatacttaaagcactagattttgttcacaactatgtaaccttcctatttgtctttaacatcttctgctatcactttggtgaaatagataactattatttcttaatgatgtgatatgttcaaaacatttgacatagtctcaagatcaaattctaaactaagtcttttttatctcaaatgaactttgagatttcctggagggtccctgggaaatctcaaaaggatctctctctcactttgtaaaagagagatattaaactattaataattaggtttatttggtatgttacattacatgggaagcattgtcaaataaaccttcttaggttatgtttgtatggatgcatgttagtaatatattttaggaactgtacaaaatgtaaaaaaatctaacatgtccaggtatgatgggatcagtcaaaattccagttagtatcctaaaatgttttatgtcacagaaataatgaaatttccttatcaattacattgtaatgaactctcaagaaatctttaatcatgggcgtgtttaaaagtcttttgtcagttacagacagttattgcttcactaaaaagcctcttgatgaaaattaaagaggagagtgaaaaagttggcttaaagctcaacattcataaaatgaagatcatggcatctggtcccatcccttcatgggaaatagatgg

SEQ ID NO: 29677 - DNA, 1360 bp, Bovine  19866881723330
  misc_feature (1)..(1): n is a, c, g, or t
ncataagtttattgtgagaaataaataatacagagcccaatggcacaaggtaaggcactgttattgctagtgtgagatgatagaacaataatgagggggaggcactatgagttatcagaacatagacttgtggaatcttaaggcagaagaggaccttatcaatcctattttccaagggttttatttttttttttttttttttggtgaactgggaatcagtggcccaaagaggttaacctaggtaagatggtagaaataagaattacacactggtctacaatcggagataagatactttttgacaggtttgttcttttatttttctctcacataacaagaagaaatgtttgtgattgttatagtcatatcacctgagtgacttttacagtaacttcaatccagggagttacctgaagacccatcacttaaatgtggcttttttaagaagtgggaacttttgtatcatcaggataaaaggaagcacagtgcttaaagaacagactctatccctgactctataagtctatttgtatgctttcaaaaggaaattctcttgggcagataagaagttggcagactgaaaggtaatacataaatttccatgctcaacagtcaggacttgagcaggcttgtctgtgatgcggcccataccatccagagctttcccctagcctctcagttcctgtatattactcatggctctgagcaacagatcagggcagtgcttattgttcagggtacaaattcatcatctgaggaggccgttctgaatggaaatctgcccccttctatcctccactctctctcctcctcaagatgcctcacagaatctgaggaggttgggaagcagcagaggcaggagcagttagcactgcattctgtgaccctctgaggcttcttactggacaagggatgctgtgttccctgttctgagtatctgcatcttataaataaatcctttcaaaaagtatgccggtaacttcctaggtgagtctctcttgaaaacctggagcaaggtggagacatgaaaaatccttattttgagacagcagctcagaaatgcaatagagatcagctgtttagttcctgagcatgtcctcacatgatctctgatggagaaatgtttgtttaatctcttttaggttattgggccaggctgttttcagggggaaggtcaaaaaaagaaaatagttttataataaagtaaaaactcatcacatataatttattagaatttattttttaattaaaagtcttcaatgttttatatatgtctgttggatgaaatggcagaaggctgttctattaactatgattcagatatcgggggggatgactttagcctgctgggcctcaagtt

SEQ ID NO: 29678 - DNA, 3897 bp, Bovine  19866880183042
  misc_feature (1)..(1): n is a, c, g, or t
ntatggatgtgagagttggactgtgaagaaagctgaatgcagaagaattgacgcttttgaactgtggtgctggagaagactcttgagagtcccttggactgcaaggagatccaaccagtccattctgaaggagatcagccctgggatttctttggaagggatgatgctaaagctgaaactccagtactttggccacctcatgcgaagagttgactcattggaaaagactctgatgctgggagggattgggggcaggaggagaaggggacgccagaggatgagatggctggatggcatcactgactcgatggacgtgagtctgagtgaactccgggagttggtgatggacagggaggcctggcatgctgcgattcatggggttgcgaagagtcggacacgactgagcaactgaactgaactgaactgactctactctgtttgcctttacaatgttcacctgtatccaccacattcatcagggaacaaatgcatcatccttcttctgtcttttgctgtcagtccgtttgaatattggttgtcttctcagccatgaagtttatcacggctttgtccttagttttgtaagaagagtgaatcaacattatttatcttccctgaaggctgttaaccaccttctagtaacattaatctgccatatcaccccaaagatgtaagtcagatatactgtctaaactgagacttcttgtgtatcgaaggagattatccactctcttactaaaatagctacatttatggtcctgaacacttccaagaagagtgagcatggaagaaggtatatgtgggggacgtttaggtggagaggaaggcatgttagaaagcaacatggaggagatcagtgtaaccagtcatttaccatttctgtgtagaagatttctgatgattttcttttggctttctacttcaacttttattttcacaactacaagtctctaaaccattctgtattcaattttgtcttgaagacacatgagttaggcttctaaaaatgtcactgaataattatattcttctggtgcgaaaagtttgtggttttagaataagcctcctgcttcttcaacaggctttaccatacttcaactgttctccctctgatgtaatcagggctgtagagactggtacaaaactttatctagccagtaaaacttttagggtctttcacttattaatagttcatttcatgaaatattcaaaccatatagtgtcttatataattccagcacagtcaatgctgtgctttgtttttatttatctttaatcaacaagttcactatttcgttttttagatttatttgtttttggctgcactggatctttattactgtgcaagggctttctctacttgttgttcagggcttctcgttgcaatggcttctcttgttgtgcagcctgggctcgggcacgtgagcttcaatagttgctgcacacaagcagagttccctcttggcatgtgggatcttcctgggccaggatcgaacccgtgttccacgcattggcaggcagattcctaaccactgaccaccagggaagccctacatgtgatttattcttaaagtgcccacacttatatatagatggatacatcctgtaatacctacctcccttaaaaaaaaattcctgaaactttaatgaatagacagcgtagtcctttggggttatttcagcccttttaagggaaaatcagcatttgcttgtgttcttaatttcagaggcataagaataatatcttctcctccagcacctcaggaggtagcataaaagagtggtagggagtgccatactttcacttgcattcatctggtcccagctgagttagtagatttcccacgaaagccatttttccattcctgaatcatatctgagccaaaggccctataaggcaaagattccctgcttcatgatgaaatgccagcacatgaccattctttataatgagtcacagtcaataaaaattgttctccaaatgaatctgagtatgcctcctcaccgagcaacatgaaagaaacatctttatcaaatcaaaacatctcgtttcctccactgagctcagacagacctttcacttctgtaagcaaaggaaatgagtttccacacaaagtgaaaatccaatctgtccttatttttgactcagctacacttgctatgtagtttgaggaaatgagaatgacgtgttggaaaatgtttggggggtttggtgagtgaggaggagctaccgaggaattctttgtacaataataatgaaatgattattcattagtctagaggtattttgaactcctgagagcctccatataaatattaggtgataggattcatttgtatgcatgattgaatgtgatcttgacctgaaaccacactggccttgctattaggataagtgggaatttattaactgtgcatttctcttctgttgctgctaaggagacttttagtgagcctagtgaggccacaagagatccccaagatgtccacacatcagccatggacaggctcacccttcaggcttgggaaaatggaagtaaagaaagcattgtaatgattgtctagaacttaacaatcattatgtgaaaagcataaagaaaaatttaaggaggaaatgcaagcaagtcaggctcatttaggggacaacagagagggtgtgaatttcaaggctggcttctgtaaaaggaaagaatgtgccccacggaggattcagcaaacccaggtcagagtgagatgcatttaattaactaccatcaaggctcaggggatcagtgacaacacagatcagtaagaactcacctggaccttgaacttgaccttttctcaagtattcccagtaaagttacccagtaaagaaaagaggtgggccagggaattaagttcttatccaaacatcaagaggttgtttgcttaaatttcccaagtgtctttggtaatgctgtgtgcttatctttctaaggaagaaaaaaaaaaaaaatgatacccagaggagggtaaccagaatggcagagaaagcctcccaaatgagaaatggctgaaaaatccaagagggcttggcaataagaagagaagcatgaataaggacaagagggtggccaggaaagagaggaggaagagggagcgtgtgttctctgtaacactccagaagacagagctgcccggcgtttccaaggggctctctgggggaaatggtgatcattcgaagggttgggatttactctaaggctatggtgatgggatatggggaggtggataaagatctaggggttggggagggagaagaccttgttaaggaaaattgactcttttttaaaaaattatttttagttggaggaaattgctttacagtgttgtgttggttcctgccatacaagaacgtaaatcggccataagtgtacatgtatctcctccctcttgagccctcctccgcttcaccccgcccctctagtcatcacagagcaccgagctgagccccctgtgctatacagctgcttctcactagctgtgtgttttgcacatgatagtgcacgtatgtcaatgctacagtctcagtgtgtcccattctctcctgctctccgcctccacggccctccccttccatctcttagtcaacagaccaatgttcattatcttctgaacatgttgagttgtgatcagaacctttcattgactgcccattacctaccaaatcatgttcaagcttttttgcttggtactcaaagcccacagtaatgtgactttaaaatccttctccacctgcatcactatattcatcatctccccataccctttatctttttgtatgtcatgcattttccaggcttcatctcccttccccactgaactcactgcctgtttttcacaaagctcccctcattcaatcctttctcatgccag

SEQ ID NO: 29679 - DNA, 1798 bp, Bovine  19866880220682
  misc_feature (1)..(1): n is a, c, g, or t
ncacacgtggagcccagaggagcccggagagaatgccaaatgtgtttccctccgttttaggtggagccttgtcgggatcagtatccccagcttctaggatactgttgaaaataagtaattactgaacgcttgctttgtgccgatcacggtccgggtgtccctgtgaatggaatacagtaaaatccttttaataaagttgttattgaggcaaaggaccaatacccatctcagaatattgcatatatagttgagggtttctcaggtaggtattggagaaaacaacagcaccgcactccagtattcttgcctggaaaatcccgtggatggaggagcctggtaggctgcagaccatggggtcgctaagagtcggacacgactgagcgaattcactttcacttttcatcttcatgcattggagaaggaaatggcaacccactccagtattcttgcctggagaatcccagggacaggggagcctggtgggctgccgtctatggggttgcatagagtcggacatgactgaagtgacttagcagcagcagcagcagcagcagcaggtaggtatatttccgaggaaactacctaacttgaatctgtatgaacggattcaacctgtatctacagggcctccttgatctctgggcttcagcttgagatctgtagagaatgatgagtttagaatagagtttagaagcccctccacccatatgagatcaatttaatatgcatgcagcagcagcagtcatagatatcatttccttggtgaccagctctgagctaaccactttagggatgaggatcccagttttccaggtttattgaattttggaaattaatataggattaccagctttttaaagtgccaattaaaaatataaacaagtcctaccatcttctgttaccaccttttatttttgaaagaaatactctattcttgcttggagaatcccatgggtttgcaaagagttggacactactgagttcacatgcacacactctttaacagcaacaacaaaatacaggaagggcctaatctcagtagaggctagtccttcatattgcatatatttagctttataaaaatttattatgttgaccatagcatatgggaatttctgctataagagatttaaaagcagcttctaactttactagcaatgtaagacaaaaactctggtccattacaataatgtagttggagtcttcggtgctatagagagcttcctcagactcagtcttcctgtctgaagggtgatcattagtcctcttccttctctttcagtggataaatctaattaaggaccacctgggaaattaactattgctaggcagttggcaaatgaaattcctatgcaataattcctttgccaactctaaacacccttttattagctgatgagaagtttgaaaatttatgaagccaagtgctgcctacatttctcaagtggagggagcacgctagaggagtgggcagagataaagagccaacaggtattgcaaaacatatgcaggtaaagggtgatctgaacccaagtgggaaggagttgggacaagtaaatacaattttatagcatttgggtttgggaagtatcttccttacatagatctaggaaatcatgggtaataatttcccctgtggtttaggtgactatttcagaccaggagagtggggctaaactttagttgtggcacaccacagtcttggtaggtaggactgtggcatctaagagtttgaaaagagcacagtctttgagattggaatagagctgggttgcaagctctggagaactgttgcagg

SEQ ID NO: 29680 - DNA, 2578 bp, Bovine  19866880282301
  misc_feature (1)..(1): n is a, c, g, or t
nccaggatgtctggctctaggtcagtgatcacaccatcgtgattatcttggtcatgaagatcttttttgtacagttcttctgtgtgttcttgccacctcttcttaatatcttctgcttctgttaggtccataccacttctgtcctttattgagcccatctttgcatgaagtgttccctttgtatctctaattttcttgaagagatctctattctttaccattctattgttttcctctatttctttgcattgatccctgaggaaggcttttttatctcttcttgctattctttggaactctgcattcagatgttttatctttcctgttctcctttgctttttgtttctcatcttttcacagctatttgtaaggcttctgcagacagccattttgcttttttgcatttcttttccatggggatggtcttgattcctgtctcctgtacagtgttatgaacctctatctatagttcatcaggcactctatctatcagatctagacacttaaatctatttctcacttccactgtataatcataagggatttgatttaggtcgtacctgaatggtctagtggttttccctactttcttcaatttaagtctaaatttggcaataaagacttcatgatctaagccacagtcagctcctggtcttgattttgctctatttcccaagaagtgatgaaatggtcaaagaaccctaaaaagtttgagtgagaaagtagagttcggtccacactcttcatccatctctggccaatccccaaaggagattttgactgtcctgtgacattagcaggttgttataatcccccaacagagtttctgccataaaccatatgaggtcacctcagaaccgtacattagacacagcccttggttcacacatgtgtctcttttaattgataacagatacaaacacaccgtagagttagtaaagtacagcagaaaacatgtttggtaggagagcaaagaactagagctccaagagtccttaccttgtcctgaagaatcccagacaacccctcaagatgaaaggttgttgctgaatcgtgaaatatgctgggattcttgtcctctagaagagaagaaatcaatctggggccagtgatgaggcttgatagctcagaaattttgtgtaatagagttttactaaagtaataaaagagacagagaaagcttctgacatagacatcagaaagggatggagaatgccctaatccctagtcttagcaagggaattatatacttattaactgtttattacaataaatcaaaagaatgtctcaatattgtaaagatcttattatacccagtcccataatatacattttaaggtggcaggattagttagaaggtttttaggaaggagaagctgtcctcaagcaggatacattgttttataatccttgctgctgctgctgctgctgctgataagttgcttcagtcctgtctgactctgtccaaccacatagatggcagcctaccaggctcccctgtccttggcattctcaaggcaagaacactggagtgggttgccatttccttttccaatgcatgaaagtgaaaagtgaaagtgaagtcgctcagtcgtgtctgactcttagcgaccccatggactgtagcccatcaagctcctccatccatgggattttccaggcaagagtacgggagtcggatgccattgcctttgtacagagtttaaactgagtagtttgttgtgtaatcatcagttccgggattaaagaaaaaaacattttatgtgactaagacaaaggaatgtagagaacaaaaaaaagacacatttgtccttttctccttcttgagagccctagacccctctctcctcctcagggaccccagactttctatcaacctgcctaggaattgactctctcaggagcccaagaaaataaagtctgtcattgtttccattttttccccatctatttaccatgaagtgatgggaccagatgccatgatatgagttctttcaaagttgagttttaagccagctctttcactctcctctttcatcttcatctagagcctctttatttcctcctcactttctgccattagggtgctgtcatctgcatatctgatgttattgttagtgttgacctgatcttgttagtgttattagtattagtattgtttgtgctgacctgagcttgttgtattgttggtacagtttcccaaactgagggaacaaatatcttccctgccatgggaactctgtatagtgagacagcatttttggaatttctccaaattcctgcagagttagttcttctcctgagagggtgtatagaacatgttttcataaagaaaacaaacagccttttttttttttttttaatcatccagagtctggaacaaatatggacttgaacaccagagagtagggagtgacatatgagcacaaagcttatgttgaaactgactcacttctcagaagataacagagttgcaatgtcctgattagtcacaccccctactctgctctaatgggtgattacaaaagccatactgtttttatgggcgacacccaatgagccagactgaacagggagg

SEQ ID NO: 29681 - DNA, 2520 bp, Bovine  19866880397749
  misc_feature (1)..(1): n is a, c, g, or t
nccacgttcctaatttcctagaattaggactcacaggactcgggaaaatgctattactaaaacaacttattataaaggacatgaaagaccagccagaggaagaggtacatagggtgaggtctaaaaatggtcctgagcgtagaagcctgcatctctgaggagttggggtgccccagcctcccagcacaaggatgtgctcaccaacttggtacctctccaaaccctgtcatttatggatgtttacagaggtttccagtcaaggattttcctgctttgggtgcatggagtcttaatccctggaatgccaaggaaatgaaccatgtgatggttaattttatgtatcaacttgactagtctaagggatgcccagatagctggtaaaacattatttctgggtgtgtctgtgaggatgttcctggaaaagaatcatttgaaacagtagacttcaatcccttgagggccctcataaaacaaaaaggtggagggagggagaatgctgtcttcttaaacaggagtgttcatcctctcctatcctcaaacatcagagctcctggctcttggatttatggactctgggacttagaccagcagacccctggttctcaggcctttggacatggactgaatcatgccactgactttcttggttctccaacttgcagaaggttgggtgggggagggggcacacagctcagcctccaaaactgtgtgagctagtttctacagtaaatctccttttacaaatatgtctttatagggcttccctgatggcttagctggctaagaatccacctgcaatgcaggagatctgggttctatccccgggttgggaagatcccctggagaagggaatgtctacccactccagtattctggcctgaagaagtccatggactattggggtagctccaaaactgtgtgagctagcttctacaataagtccctcttacatgtatgtctatatatcctattgtttctgtttctagaaaaacctgactaatatgcacacttacattattcccagcataaattacctgatggaagttttaaggaggcaagttttaattaagcatcagaaaagagttcctgaaaattagaattccattagttgaaaattggttttgtctcttgagtagttagacaatgaactctctcgtctccagatataagcagagggaggctaaatttatcagggttgtagagattctcacctttttttttttgcaatagttaagcctcaaaacttggagctctccttaccaactttaatagtctcgactataaaaaaaaatattcaaagggttaggatttacattttcaaagagccattcttttaaactgtcaaagtagatatagatcacatggagaaatttcaggtttttcaggtaccttgccaaatatcaaaatgacagcaggggttgtcctcaaccacaagccggctaagaagaaaaaatacacagagtcagcattccatgtcaacaccacggctattgcttcaccaatgcaatccccacccccagctttgtaaactcctgcacgaatttctcacaaacaagcaaagagttaagtctgggggaagtgtgaaggatggccaggaaaatctgactaataagaagggtgtagagaatcttccctgcaaggcaaacctactggtcaatgctttcttttgtcttcagaaaaaccctttaaacgaatttggtctgaaggtgtattagttgctgtttgtttcgcccctgattcctctccaagaatgcatataactatggtcaaatcaaaattcaggcgacctttgttaaatgataaacaggcatattaaaatttttaagttttttttttttttttttaagcaaacgtcaattggaattgatgttgccaaacaggaagtggttaggaatgttccaacaagaaggggcaggggcaagactttgataggccaaaggtgtaattgaagccaggaaattatttgattggctgtagcttaagttttgggcttccccagtggctcagcaggtaaagaatctgcctgcaatgcaggagacgccagtttgatccctgggttgggaagattccctatagaaggaaattgcaacccactccagtattcttgcatggaaaatccatggactgaggaatcaggtgggctacagtccatggggttagaaagagttagataagattgagtgaccaagcacagcttaagtttgtcttaagtggaaaagctgagattttgtgtctgtgattggataacctgaggaatctacagggtccttggatttgctcacacaggctgctatggtttgtattagaaccttctcagtctaatggcctccttgttttattaacattttctacttctgtggtcaaacacctttgattactggacccacaagcttcttcagggaatcactgatctttaatcagctccattttcagagtatagaagtagtgagattgttcttcagggggcaagctaacaaaagtgtggccaccacatgctttagaacagaaagtacacattag

SEQ ID NO: 29682 - DNA, 1998 bp, Bovine  19866880419085
  misc_feature (1)..(1): n is a, c, g, or t
nctgaccggcagcactggcgagaggatctgcagccggtggttgagcaggtactggaagtgggccttgcgccgccgaaggttcttgtccgacaccccgtagtaggccgcgtgagggctggcggagcggagctcaaagtcccgggccagcgcctcgtccaccacatgggccagacggctcagcccctcggcgtcgtgcttctcctgcagggcgatctggcggtggatgtccagacacttctcctccagctcctgctccccgcacaggtcagcgtgggtgcccacgatgcacaccacggcgtggggcacccgggcccccacccgatgcaagaaagagcccacggtggtgggaaagcggagtggctcgtaggtggccaagttcaccaccagcacgtacagggcccctggggagaggaagaagggctggatcacctcgtagcgttcatccccggataggtcatacacgatgaaccgcaggccccgggacgcatccgccgtccagctggtcacctcgatgcccttgctcccgggaggcggtgaaggcgggtaggtcttctcctggccccctcctccaagcttcccctccactctgtcctcagtgaggcagtgccggagaagggtctttcctgccgccttctgacccatcagaagcagtttgaggcgcggctggaccgccggctgggaatgagccagctccttctggtaggcggcgatgtacgggatccccttcatacagacctcgtaggggggctggatcagagggttgtccttgatcttccacaggcccacgcgggagagctggccaaagttgtctggcagcacggcgatctggttcccctgcaggacaagctcctccaggccggtgagctcgacgatggaatcgggcaggtagcggatccggttgttatccagccacagggtgagaagacggcccaggcccgagatcagggatggcaccgaggtgagctggttgcgactaaggtagagctcctccaggccagccaggggcagcagggcggccgggaactcctccaggaggttggaggagagattgagcattttgagtcgctgcaggcggctgaactgggcgggcagagcccgaagcccgttgttgtccagcatgaggctctccaggctggccagctcgcagaaaccgctcggcagggtgccaagctcagccccactcagccagaggatcttgagggcacgcagggcactgatatcctcgggaaggccccgcagccggttgctggacacgtccagctcctccaagggccaccagctgcaggagctgccggggaaaagccgtgagctggttatggtccacgtcgaagggtgcgcaggcgagagaggccggcgaaggagtcgggcaggtgcgccagccggttgaagctgacgtccaagctcttccaaggtggaccagcgcacccaagctgggctggcagggcagggagctggttgtggctgaggttgagcttccgcagctcgcgcagggcgcccaccgcctcggcgcccaggacgctcagccggttgtggctcacgtccagctccgtgaggtggtgtcccagctcggccactgcctggggcagctgggcaaagcggttccggcgcaggaccaggacacggaggctgcccagcgccgagcccagcccgtcgggcacctcctccaggccgttgttccccaggttcagcacctcaatgtccccgatgttggccgggagcaggagctggggggcgtcaggggagtcgagctggtcggttcccgggcagcccccggccgagctgagggtgagctggcgcaggttgctccgcagcttcctggcgcgcagggcggcgtcccgccacagcctcaccgtcttcaggttcccgctgtccgtccctgccatggcggggccccgggccgacaccctcgcgcgggagcccgcagctacatgccgcgctgcgccccggcgggcgccagtctccggggccctttcgctcccgttcctcccttcccaccgg

SEQ ID NO: 29683 - DNA, 2095 bp, Bovine  19866880459710
  misc_feature (1)..(1): n is a, c, g, or t
naatgatgctatcattgggtttgtccttaggacactttgaatgttgttaaccaagccagcaccacaaaaatcagagctgtttagagaagagttccaaataaatggacccattctcagacacttagtataccaattaaccaggctcacaaaatccccctagttttggaattcttccactcacctaaaacattaggggaaaaaaaaaaaaagtcttctggaaaacactccccaaagagaggggaaaaaaaacacaaaacttgtcagtttcttatccattccatttcttacaaagcacttccataaagctccactctctaacacttaaccaaaaccaggcttaaagatgtcggtaaagcacaaaattaccaggaaatacccccaaaactccccttagagatttcagtaatctttcatgccccagagtgtactgggtgaaacagagatcccagaactgagtcacgccttacagactgacatttttgtctttactaatcatcattcaccctgattacaaaacattcttctctggagtttaagaaaatggtgcaataatttctacattatggtcacagtctgaacgtaaacaaaagaatatgatgacagatatttcaaatttggagcaccccttggatatgtgtctaacaagcattacagcccatgactcaacatcagacaccacccatctgctgtgcaaccatttgaaatttccttccaggaaaggcggactgaactgggaagacggaaaaggtgatccaaaatgtttggaccagaacccacttcagaagtctttcttctagaagagtagaatcctaaggactgtatttcatattgttcacatactgactgcctctttctggtcgccaattcccctctatttacctcgaaaagctttgctgggaagcaggtgagattaagcaaacagtctaacacaggagaaacaaacatcttccccaaatgcatattaagacaccccgcagaagaaccaggtccctctgacctcttacctgggaaagcgtgtggattaggcgaccctctcttaaggcacttagaacagagaatgtgcacggtgtagtgcagtccaggccattcctgaagtaggacattcagttcctctaccaagggggttatggcttgccatgccgtccatatgttcggtaaggatgcgtggctggcaatggacagggtgtccggctgcaggacccccttggcaggtctgtagctcaccaccaccggggactttcccccctgtaggcgaagatctgaagtttgccatccgacctgtgcaccacgtggttgttgatctggacgctgtagcgggcgaacaagccgggtggaaaggtgaaggggaaactgtattcaatctgcagctgctcagccacaaaggactgcccggccaggttggtcccgttaatccaggcttccgcatgcggcacctcgttctgcacgtagcaggggaacttgtaccacgccgtggacccattcaggggcttgcccttggctttgttgaggcaataacagagtcccatcttctccagcagctccagcagcagctgcaggtcctgctgagcttggacgtgaggcttcagcagcaaccggatgacgtgggctggcaggagcccgtgcagcagaaagccctccacgtagtgatggagctgggtggcccgaagcgcgtcctggctcggggcgggcggcgccatcagcggggagctttcagcccggccctcggcctcggcctcgccgctggtccccaggagcagcttgtgcagtagcaaggaagggtccctctggaagaagacgttgaggatgtcgatgaggcgggaaaggttgtggaagacgtgctccttgagggcggggctgtcctcgaagtacagcagcttgccgctctcgtgcaggtaggagagggcgctctgcagccggtcctcggtcagcccggcctgcagccccagccgagccgagtcccaccagctgagccagagccgctgcgcctgcgggggcttgaaagtgcagctcctccagcacctgccaggaccgcggcagcacgcggtgtaagttggggaagatttcgcggtgctcggccacagagagcagtttgtcg

SEQ ID NO: 29684 - DNA, 728 bp, Bovine  19866880483107
  misc_feature (1)..(1): n is a, c, g, or t
nagagacggttttctcgtggtagagaccatcatgctcactcttaccctggattaccctccttcggccccaggccctgcactctcgcatcccggctacaagcctttggctcaaactgtttagaaatgttcctctccacagaaacacctccacctgctaaatgctacctgctcctcgcagcctcccaggatttccgaggcaagacggttcccctctttcttatactacctagcactcctgtggccattgcggccacacttctgctgcagggctcattgttcacacgcctctctcatctttaggaacttgaactcgttgagcacaggatctgggcctgattcctatgcctgaaccttccccatgggccgccccccctccaatgcatactggtgaaaccaaattcaactcgacctgtaaggagctaggggggagacagtgaggaggacacatgccctgtggtgatgctgtgtccacattcaagtccatggtcaccgtgtctcctgggaaagtacaattacaccgatgaccagcagctaaagactctggtccagttgccttcctccacatcatccctagctcatgggcgagctggttattttccagccctggcacgtggtcagtgtcgcccagccaggccgaaggcataatgaaatacttccaagtgctttgaactgggcaaactgtgtttatacaattacatgcaaacaagctaacgtgaggctttgctgag

SEQ ID NO: 29685 - DNA, 1813 bp, Bovine  19866880542493
  misc_feature (1)..(1): n is a, c, g, or t
ngggttgtgctggattgtcattgctacacgtgggcttctctagttgcggtgagtgagggctactcttcgttgcagtgcagggactgatcgtttgcatggcttctcttgtcttggagcacgggctctagggcacactggcttcagtggttgtggctctcaggttctacagcagaggctcaacagttgtggtgcagtggcttagttgctctgaggtatgtgggatcttctcagatcagggatcaaactcacgtctcctgcactggcaggtggactcctatctattgtacccccagggaagtcctctcttacattttctatcaaccaagggcctatttaggctaacaaattactcttttaagaaacttcattacttgctgggaaagctaagccttatttacccttcagtgcaaattattctaaatagaaattttgctgtggaaagccacatgctgggggcagtgagaatactttgttgtttgcttattgaagtataactgactcacaatgttatattagcttcattttgtcttttatttattgaagtataaatgactcacaatattatattagtttcaggtgtacaacagaatgacttgatatttttgtacaatacaaaatgatcaccacatggagaagcgtactttgaatggaggactctccaggcatataggttacagctctaatgctaattagtgctcctgcactgcaatccacttttggcccggattcctggcctgtgcaaagccattctccatggtgtaaagaatccgggcatctttgccaggcaaagctcatttcaaatcttggctctgtcacatcctggctctatgacttgggtgcattactcaaattaaagagagactattttttcacccataaaatgtgagagtggtttggtggtaggatgggaggcctcgtggataccagtcatgtacagcacactgtggggccctgaggtttgatcagctgggggcgacacactttccaggagctccaggagaatcatcaacccacaatctgcccctgaccctagattctggagggtcttgcagctaaagatctcttccattcctagcctacttaactatggaaaccactgcactttataaagctgtgaaatactcagaattttttatttcagacataaaacgccaggatcagttttgcacctgtaaacactctatctcacctttggaagtgaagcccatagaaggttatttctcaaagtgggtgttcagagcagctacacctacgccccatctcagactctctgaatcacgatctctgagatggggatgaagagcctacactgagtcaggtcctcccaggtaatcctggtgcacaccctgaacccttgcttctgcaagtgcatcacttgagagcttgtaagaaacgcagatgctcaggccttgcccagacctactgaatctgcacttttaaataactgcgctaaaataggcataacacagaatctgccatcttaacgtctttaagtgtacagttcaggagtgttaagtctattcacattgttgtgtgaccaatctccagaagtctttccatctcgcaaaactgaaactctgtacccattaagacaactctgcatttcctccctgcccccctcgccagccagtggcaaccacacagaacttcagtttgacaagctccccagctgattcatatgcccattaaaggttgagaggcactgccctaagtatgagacccacacatcataaaatcaggagccactgtgactttcttgaggcacccaggctgtgatcttgagtcaggcaatggaaaccagccagcagagcaa

SEQ ID NO: 29686 - DNA, 1280 bp, Bovine  19866880586775
  misc_feature (1)..(1): n is a, c, g, or t
ntcctgttttgaaattgtttgtactaggggagtctcttgggttcctctccatcttagaggctgtggctatgttttaaccttccattccttggcaaaactggaagcccctccctacaattctttctgtaccaaaaagcattctgtactccccactacccatgtgcttctgtccaacaagtggctttgtgcttggaggtcagaggtgccgaattcacttacttccttattcagcatccagagaacttagctgggcctctgggtttgttaaaaacactcctgctgctaagtctcgtcagtcgtgtccgactctgtgcgaccccatagacggcaggcagcccaccaggctccccagtccctgggattctccaggcaagaacactggagtgggttgccatttccttctccaatgcatgaaggtgaaaagaaaaagtgaagtcgctcagtcgtgcccaactcctagtgacaccatggactgcagcccaccaggctgctcagtccatgggattttccaggcaagagtactggagtggggtgccattgccttctccgaaaaacactcctggctggacacaaattggtgtaattcattttatagctgtacagttgggctctcagtgtcctatgggtatccaatctgtctcatctctggacagccaaccctgaaaaatggatgatctctgcagcagccgtgataggcccctgaccaccccccaccaccctcactaagagctttcaacatttattctgcgtatcagttcgcccagacagcgacggaatctgccacctctgcggcaggtgtgagggtcacctcaggtttcccggcagccaatgctcagcacgccgctctgcttgccagtgcgtctcctgcaccgaggcggcctcatcagatagtgagtttcattatgcactgtccgctggggactccactaaaagcaataaattcatttcactgtgctagtctctggactactaaagcattttagtcctgtttctcctttaacctcccaggagccaaatattcactctgacaaatgctattcattacaaagttaagatgactttgactctgtttctctcccttataatacaatgaaggctctttgtcctggattcatctacagcctgacggtattagggataaaaacatgccaaggcaggcagccttctctccaaaatggattgaaattacctctagcgagctatgccttgcttagataaagggtagcgaaaaaaaaaaaaaaagaaagaaaaaacaggttttctgctcatttttaatatcc

SEQ ID NO: 29687 - DNA, 1623 bp, Bovine  19866880621744
  misc_feature (1)..(1): n is a, c, g, or t
ncagaattggattgattgttggacactagttggtatccagagaatcagagaatatgataaatctactccatcttttacaggaaaatccttcaactattttttagccttctcatatcaaaaatcttttgttcttcaaactctcacactgatgaactgctcatcacccatatcaatcttctccattacttatcagaagttctggtttgtaaaaagtctatcttaaaatgcaatacttaaaatccagcacacttctctagatgtggccaaaagagaacattataggtattctgtgcttagtcactcagtcgtgtctgattctttgtaatcccatggaccatagtccaccaggctcctctgtccatagaattctccaggcaacaatactggagtgggttgccattttctcctccaggagatcttcccaacccagaaatcgaactcgtgtctcctgtattacaggtggattctttaccctaggctcaggttaataattttatttctgttctaatggacatgccctaaatatgtgtctgttacatggagtggggctggaaggttgaccagcaacaatggtgatcctctttattaccctgatcagttcaggtcttgcacaatcacaaacaccctatctggcaaacacagtcctatagataactgcacctacctccttgaaagctagttagtgaccctcaattataactcaaacatgtcttagagacctcagtcctcatgccagtgaacttatcagaaagtatgaagttcagccaagaaatctggtaaatgacattttctccatcttcttacacatcctgtatgttaagcattttatagtctggagccctgaataaaatcataactgacacactctttaattcagcactagttctgactgattatttcctgtatgtggggttactatattgattgtgtggatttaaaaaaaaaatcctatcacaatgtagctcttaggagattgtgaccaagttaaacacagatttttcttttcagatgaactgccaagccagtctcctcctactatatttatatgcctgacttctatgagcctgaatatagaattttacacttagtctagttgacattcactttgcaagaatcaatgaaccattttaatttgtcaaaaacattttgaattttattcaaatatgtcactctaggatattttaggcaattagatttcctcattaacaaaaacttggaggtagaaatttgatcactacattaggaaaatttctttccttacattctagagctgtgccatctaaacagtagtcactagcctcataagacttttgaacaacttaaaatgtagctagtacaaattgggaagtgctctaagtacaaaatagacaccagatttcaaaggctgactacaaaaaatgtaaaatatctcattaacaatttttaaaatatcaattacacgttgaaatgatatttggggtacattggattaaataaaatagattatgaagaatatgcgggctgtattgttaaagtgtggctagttgaaaatttaaaattacacttgtggctcacatgatatttgcatcggagagtgtagctctagaggctgaagtgacttctgtccatagttgccctcttctg

SEQ ID NO: 29688 - DNA, 3401 bp, Bovine  19866880665689
  misc_feature (1)..(1): n is a, c, g, or t
ntattatcgtgctatataattatttatgtttttctcccaggccccacagaggtctcttcagtcctttgcacccgccttccacactctcccctctgtgctcatttctgcttcgggccactcctctgccggtcgcggccgcacggaacctagacagaccccgtctcttcctgaagccttccggccgcacatcggctctctaatacactgtctcctctgtttcactcctgtggctttgtgtttgcatgtcttatctcctctctaagactctaaactcctgcccaagggggttcttatctccttttctgctcttcagagcacttagcagatttctaggtacataacaggcacttaataaataattcgttcattggtaccgacattcttcacgttctgagagatgaaactgggatcctctaatcttggtactccaagctcagtctggagtaacagcccccttggcaccttctgggaacgtggtagaaatgcagaatagccagcttgccccagaacaactgactcagaatctgcattttaagaaggtccccgggggatttgtatgtgtgagaagcactcactgctctaaatgacactatttgccaagtgcttgaactttccttcctctcttggtccacggtttctgcctctcccaaacctggctcttcccatatcctccccacgccctccacttcccttccctagtgcattactttaactattttatttccaatatcctcaattcacccactcctcaagtttccctttcccatctacaaaatgccagcaattcacctcctccattcctttctcattctttgatcgcccagtgcctacacactaaggtctcctgttttgttgactcaatacacaccttgctcatcaaacagctacctgagagaaattcagagagaaacctgagcccaatcttctcttgaatgggttgtagctcttttcactgtttctgtttatcagtttactcctaactgaataggaattaagaattcattgacccacaaaaaatgtaacgtggcagggaaaactgtgctcgtccatttataggctcaactgcttaaaggaatttgagaaataagcagtcttcatcagttaagcctaaaccttcaactcaaagaaaggtatgcttcacttaaaggtgatcaaacacagaaaattatacttaggagaaggaatgccagggtttgctttaaactataattcacccacttaaaagacttcaaaaggtctttaacggagtcatttttgaagtgactttaaaaactacatttgttcacatcttgataagagcatgggtgtcttaaaattcagaggagacaccttcagtttgagttgttagagtttatgtggaatccaggaaaaagcaagtttggggactgaatttcaaagaagaccacctctcccatattttgtagcaggagctaagcagttaaacaccgctgctgaagatcatatattttctgactcagatttcctacctgaggcttgatttgcaatgataattttctttaggtgttttgaaaggcaattgtttataaaaaagataagttgtatagagtcttccttaaggccaagggtcaacaataattgttgtttgatttctattcatttttctaaaatctctgattgcctgcacaataactttcttcctcaatcaattagtctaacaattcataccagtattttatttttaatggccgactactcatttcattaaaaatgtaagtgcattacctctgtgtaaaaggactccattgggataggcttatttaaatattcataacataaaaattaataaatctgagctcagtgtttgcattttaaaaagtcaggttactgtcagctagatttgatcctggttgagatttagtaaattaaaagccctgagcatcattttttttaaaaattgattcttctttacaataaaacaatacaagagaaatgctatgagaacagtactgctatccaataactcatgacttctttcaacttcatccacctataactagcttcccttcctttctgtctttcctattaccctccacttgggattctgatcactaaatcagcctgtctgaaatcaaaggagttatgtgctggataggaattatatttatttcctgttaattcaatctctctttccactcctcccccaacttgtgtcaaaaaaataataataaataaagccaatgaatcataagagtgcccagcaagaactctagagaaaactgtgtccactgggattcctgctaattggaggaagaggcatacactttgccaggttaaagtctgcttgttgtatgttggttcatgagtgtacatagccttagaatcagcaaacttgataaatctatacattgggttaagatgtggaagactctgatagagtctagagcagaaatctctgataagctactgaaggcttgagaatctcctttacattattcacaaaagcaaacttgaaacggactcaagacttaaatataagatctgaaagaaagaccttataaatcacctagagggaaacataaggaaagagccccttgattttggtcttggtgaagatttttttaatatactactaaaagtatagacaaaaagaagcaaaaataaacaaataggactatctcaaactaaaaagcttttgcacaactaaaaaaactatcaagatgaaaagactacctatggaatgagagaaaatatttgtaaaccatatatctgttaagggtcaatatctaaaacacataaggaatgcatacaactcaataaccaacaaataaataatctgattttaaaatgggtgaaggtcttgtacagataattttccaaagaagacatgcaaatggccaacgggtacatgaaaaggtgctcagtcacgctaatcattcctgttgttcagtcgctcagttgggtctggctccttttgacttcatggactgtctttgtttgaattctcacttccttttaccaaaatagatgcttttcgggatagaaccctttcagatttcagatttccttgttgatgttcagtcactcagtcgtgtctgactctttatgaccccatggactgcagcacaccaggcttccctgtccttcaccatctcctggagcttgctcaaactcatgtccattgaagtcggtgatgccatccaaccatttggttctctgtcgtccccttctcctcccgccttcaatcttttcctgcgtcagggtcttttctaatgagtcagttctttgcatcaggtggccaacgtattggagtttcagcttcagcatcagtcctcccaatgactattcagggttgatttcctttaggatcgactggtttgatctccttgcagtccaacagtatgaaaagatactagtcataaggggatgcaaatcaaaaccac

SEQ ID NO: 29689 - DNA, 2889 bp, Bovine  19866880741747
  misc_feature (1)..(1): n is a, c, g, or t
ntttctgactgtattaatccacgcatgtggtctgtgccttgggcctctgtgagtaaaatgaaaccaagtgttatctgaataattcaggccagatttctcattcagtgacttggatgactttgaatttcccacttcagtcgttattaaagattgaactaatgaatgttgctgaagttgcactcattggatcccattagctcaattgtgcccattccattaaagctgtcaacatcctttttatgaaagtgaaagaggaaagggatcaggaatggggaccggcaaacccctgctggtgtggaaaggaaacctgacatgtgatgaaagtggaagttggagtaactgctggatgatcagccttgactacctctctctgtgtgttttccacgcacacatttgaaggtggtgggtgagatgttgcagagcgggcccagtgccagttctgcagatggacgctgtgggctcatcttgctgcctgtcatctgttattggaaaggagcacactttttgcaccagctgagtcagggtatgtcctcctgggtaatctcatggactctcatcactcacattcacatcatcccttgtggatcttagggtactggggtgctctgtcggtgatgtgagtggctgagcacctccacaaaacagactgaacccattccctgaccaggttcttgggggattcacagcattcctgctgtcttctcctctgaagtgcaaacctacattgtttcctggcccacagggtcagaacgtggagtggaaccctttcctaaccgtatgccatttggcaggttccttaatatcagcacatctcagtttcctcaaatgtctaatgcgaacttcaccattcccaccccattctcacttttttccttgtcctccaagtttccctgactggttgttcctttgttgcctgaaaaccataaggaaggagagtgagatggatccaggagactcagaagtgattctcatcttccagcactcacgtggcctccagcatggggcctggatcttattccacagaacttcagagtcattggacaaaggctgaggcagggggttgtaaagcctcttccgtggactgctggcgctttgctggccccccaggtgttgtgacattcacagcgagtatgtgtttccctgtgagaatgaaactcaggggtcccattggctctgggtggggatgcttggttctactttaagagcctaggaaagttctgattttttccttcttctctgagtacttatctcagtcttcctgagagcccccatcatttattgttctccccacctcgtcttcactggcagcacaaaatgacaaggttcagtgactaaagtaatcccttgggtttttgttgtttattttacacccctaggaagaagaaggggattaggcaggagaggccacttagctttggggtgaagaaataagaggtgtggtgagatgggctcaggtggattttgctggtgggaatgcaaataagttccagaggaggaggacgtgaatatgagcagcaaggcagagtccctgcagttaccctggagaacgcctcctgacatgactgatggatggaaaagagggagtgctgctttcagatgaagggtgactggcagcaagatgagatcacagcttgcattttttgtttttttgagttggcacatgtctcactctgcatcacctttcccatctgttccacgtgtatgtgtgcaacacatagatgtccgtgtccactcaagagtgggtaataaaaatcgcaattgcaagcaaacctaatccaaggacccaagatacttgcttgacccaattactcaggaactcaactgctccatcctccttttatttagagagagagaaaaggtagaaggtggagtaatgagaggacatgtgaggtgatcgcaggtgtactttgctgatgggaggggcataccgataccgtatattagaaagaaatgtgcacaaatataaacacctttaaaagtcctcattcattggtccaataatgctagttctaggaatccagccagaggaactatcccattggtgatatagagtggtatgttaaggatactcactgtagctttatgtattatagtaaaatattgagaaaatacagacatgatcaaggatgggaaatatcaaaacacgttcaagtacttctatatgatggaatcagacttccagtgaaggtgatgctttagatgtaattgttttctaagttgaaaagtaattgctctgtgacaacctagagggtggcatgggatggaaggtgggagggaggttcaagagggggggacttatgtgttcccatggctgattcatattgatatatggcagaaaccaacataatattgtaaaacaattatcctgcagttaaaaataagtttaaaaagaaacacaagtaatacatgcatattgtttaaaggtttaaatagtgcaaaagagctgaaataagaaggaggtctctcaactcattggagaagaaaatggcaacccattctagtattcttgcctgggaaatcccgtggcctacagttcatggggccacaaagactgggacacgactgagtgactgagcttgaatgctttcatctcagactcatcctctgcagatcagttatagattgtgctttagaaaagaaaggggtgaaataagaaaatgattccagagagaacaagaaggtggaggagtaggttgttgtggaggacatctctctccacagatacatcagcaatacaccttcagacacagaagtgcatgcaaaacaccagctgagagcggacaggagtgcctgacctgcagaaaagaacatgtagacccacgcaaaactcggtagggtgaaggagctagggggcaaaacagcagtggaggggacggaccttccctcggc

SEQ ID NO: 29690 - DNA, 2636 bp, Bovine  19866880754060
  misc_feature (1)..(1): n is a, c, g, or t
ntactttgcatacctgcttttttggctaatacagcttccttgttcctgctctcctttgcttgtatcattcggagctcctatctgctcaattgggtgctgcccaattcaggggctgttgaataaagccacctgttagtcattcagtcgtgtctgactctttgagaccccacggactgtagcccaccaggctcctctgtccacagaattcgccaggcaagaatactggagtgggttgccattctcttctccaggggatcttccctacccagggatcgaacctgcatctcctgcactgcaggcagatactttaccatctcagccatcggagatgccccaaataaagccaataagatcttttaaatttactcatgtgccacagctactgagcctgtgctccagagcccaggaggtgcaactcctgagcccactgaccctagagccacgctctgcaacgagagaagccaccgcagtgagaagcccgcaccccacagctagggagcaggccccactcgctgaagctcgggaaaagccagtgcacaggaacgaaggcccagcacgatcaaaaataaataaatacaattataaaatttacttggcagactaaaaaaaatatatatatcttactgccctctgaaggaagcaaccctatgaacactttaccattgaattcctagccaccagaacttgagaaaataaatgtctgttgttgaagccacccagttagtggacctctattgtgtcagcctgacctgacttaataaactggctgtactgtaggcatccagcgccctgcgttgttgcacagtcacagaagctataatacctgatggtaccattttatctgtaaagcatttatgattagagatgtttctttgaaattacggttaccaggaaggaagggtagtgggggaaggattgttagagagcttgagattgacatgaaactctgctatattttcatgtaatataaattgcaagtaacaaggctctcaataacatgactttttaaacaactttttacaatttatggctgtgtggggtcttcattgacgaaggagcttttctctagttgcggcgagcggaggctactcttattgtggtgcgagggcttctcactgtggtgccttcttttgtgcggagctctagggtgcctgggctttggtagttgcggtgcacaggcttagttgctccacggcatgtgggatcttccaggaccagggatcgaacccatgtcttttgcatggagccaccagggaagccctaacatgattttttttttaagtgacatggtagtagaaagtgagctcccgtaaactcctgcctcagtatcacctgggaaagcccttcccctaccctctgtagtaactcagcttccttgggtgagtcttgtggccattgaaatcgaagaaccactgatctaggctgcgcatcagtagagatacagatatcaacccaagcgtgcacacacagcagatcagctgcatcagaaacaatgacttctttcttccagatccattctgctcgtgcgacaacaccttctgagagcattcgttatcacagcaaagaacgtctcctccaggctcttggctgtcactcccctgacctgccaccggtgtggtatcccatcaggcgcctgtcaccgactgacgtgcgctggagcagaagcttcacagcacagggtgagaagaagaagaatcagaaacaaaccgggacacagcttttctagaaaatgctctccaatacaaccaagtctgtgagataggacttcagggcaagcatggtcgcggagggaggcgaagcccggcaggtcaggtctgagactgggatgtcatgatgatgggggagaaagatggttggtccaggatgagtttctttgacgtgtatttccctccatgtgtgctgtagaacactacttctgcccagtgccccaggaacatagggactcatggtgaaaacccttttttagatattctaaatcatttttatctatttttttaaaaataattacaggctctctggtttttgtctctcttctgctctgagacgtgggcattggtccatgggctgacccgaaggacggtgtccacagctgacactcacctggctctctgaccttgactcttgctgtaagaaccaaagggtgccttgcttgtcttcctgaggcgcttcagcccctcttgcaaacagatttcctgtgggctctcttgtcatttagaaatacttttctttatctgaatcaccgttccggttccagccattcccaaaagaaccggctattcccaatgtatgagaaagtaaattctgaaagtaagttggtacaccagtcatttagaatttgggcctcacctcccagagctacaaactgatacataatggcaaagttcccaggccagcccacaaaagcctaacttttccaaaatgaaacattggtgggtggtagagtggtgagcatggccgcctttcaaaatgtagctgctgcttctgctgccaagtcgcttcagtcgtgtccgactctgtgcgaccccatagatggcagcccacgaggctcccctgtccctgggattctccaggcaagaggactggagtgggttgccatttccttctccaatgcatgaaagcgaaaagtgaaagtgaag

SEQ ID NO: 29691 - DNA, 1865 bp, Bovine  19866880831567
  misc_feature (1)..(1): n is a, c, g, or t
ntggtgctctggacagtgctgtgcacacgaaagtgtctcagaaacgacttattgaaggaatggcaccgtgattggtttagagcatagacttcacacaaaatggtgattatctttgctcctgttgaaagtaaagtcaggagactggaagattcattcaaacagaaactcagaatatcacgtgtctggtgcagtattctaaaccctcaaccctggtacatggtctccccccatgatagcaccatggcttacatttggcttttttttggttttatgctcccttatcagtacacccattaccacatacacacacacacacacacacacacacacacacacatacacacactatgtacgtgtacctctctgctttgcttctatattcttcatcttcccttttcctgaaacatgcgattttacaaaaactaaactgagggccttgggtgaaacccattgaggtgatatttcccaggaaccacacatttagggagtggataattaagatctaaaaattatattttagcattttaactaaacagatctagaactttagagcaccaaggcttcatacattgtatacattgctttgccttttatacaaatacaaattttataagcactggaagagccaagaaagcagagacctctttggatgggaacatctattacacacgctcttatagcaccctaggctgtctgggacatcctgaacaatggaggcaattgaagaattcaagtgagtaggtgatcgcttacatctttacaaggcatctctggaataccccagcactgggttttcactgggcctgagacttccttcctctggcacgattttcccaccatgatgggccatggttcaagactttatactacacatgcccaggcaacttctgaatttattctcaatgtctttagaaaacaaacaaacaaaaaaaaacttattttaaaaagaaatttttttgtctcctacacacacaaaaaatgcactttacttcacagtacctgttatggctgaattctatctcccacgataattcatatgttcaaattgtaaccctgactacctccaaagatgactgtgtctggatctagggtctttaatgaagtagagtaaggtcatatgactggactctaattcagtatgtctcatgtccttacaaaaagagagtaagatacaaagaaatatagagggagtaccatatgaagacacaaaaagaagatggctatctctaagccaaggagaaaggccccagaagaagccataccttctgacatcttgatcttggacttctagcctctagaactatgttgagaaaacaaaattctattgtttaagccttcccagtctatggaactttgttatggcagcttgagcaaactaatatagtacttctgctcattttctcaacgtctttgagaaaaattcattttgaaggtgaaaagcaacccaagaagggatgtatccaaagccatggagctaaacagggctagtaacaatgaggcttttcaaagtcctatataacacttttgtttccattctacattaaaaaaaaagaaggttatttgaaacactaaaattgatttctgtggaacaacggttctcacccccagcttcacattacaatcaactaaagagatttggaagaaaattaccggtctctgggctctacctccagagtttctgggtgattcgtttgcattgggtggcagtactccatccacccgtatggtgattctaatgtcagttagaggtgagaaaaagtgctctaaaaaatcagttgattagaaaacatcagagaatttacaaagagaatcactctatctcaatcttttaaaagcctcagacgtcctaaatcattgtaaattgt

SEQ ID NO: 29692 - DNA, 1688 bp, Bovine  19866880873681
  misc_feature (1)..(1): n is a, c, g, or t
nctttggagtatattagaggtgagacataagcttttattctccaatgctatcccaccaaacttccagaagacaaggctaaggagaagaggatatcacgacactggatcctttcaattttttataagtttttctttttcttttttttaaaatgtggaccatttttaaagtcttcatatttgtcacagtactgcttctgttgctcatgttcttgttttggggccatgaggcaatgtgggatcttaactccccaaccagggatcgaacccacatcaccggcattggaaggtgaagtcttaaccaggtcaccagggaagtccctcctttcagtcttgaagcacaaagtaatctagtgattgactcataacattagctcaaaagagtaccatctaatctccatcaagtggaaatcacaccacttttgataatgaacagaaaaatgaacaagtaccacaataagctctatcacttatgagaaaatttatcctggtttttatgggaggaaaaaatccccttatttcttgagttgagaaattacaccaaattatattcaggctctttaattgaagcccatttgtatcagaggctattagtctaataaagccatttcaaacaaaaagtacagacagttgccaatctacatacatttgactttcaaaaataatacatggccccattccgcttagcagtgatgcttttaacaatttcacctaagtaagctttctattgccctgcgttttgtgccagccctgagcctcactttagccatgcccccaaaccccatcccagctcccagatgtgggagacactgccatattttccttatatcttatatctcttacctattcgtacatcctcacctatgcatcttgctacggaccggagtgccaaggcgttgcggccaccaatactgttagaaacactgcaggtttacgtgggcttcgtgcttcagtcagagcatcactgcctcaggccgtgtcttctccttcagagttaaagaatttttggaacacagccctttgtacattaaggacaatccatataatccaaaagcaaacttcctctacaacccacaaatctatttacagagcttccaaggcacaagcaatggcagacattcatatttcaactctaagtgacaccagtcttctatacctagtttttgctcactacatccctacctttgctgcagtgctagagctatcgagatttctaattctctaagagagaggagaaagatcagaaagaacgtaagtactctgacacactcagaaagttagctctgccgcttacctactgtgtgaccttaggtaagctacctagcctctctgagcctcacttttttcatctgtgaactgtggatagtaaatgtcaaatacatacctcacatatgtgtgctacaagaattaaaatgataatatttggaaactgacctaacccagcacctggcacataatagcagctcactacgaactgactgacgtttatttcttcctcacaaccttgccatctgaaacataaaaaacaaggtttgagcaaaaataaacttctggaaagagaagagccttagaggagcagttgagaaggccctggctttcctaatgccttgtctaaaattcctgttgctgcttttacacgatacccatctccaaggcagcactgatctcgaagtctgtctagcacttccgca

SEQ ID NO: 29693 - DNA, 1087 bp, Bovine  19866880916702
  misc_feature (1)..(1): n is a, c, g, or t
nagttctttatttaaaagctgatatagtagaattgaaattagaaaaggaagtaataatgactttgaatgttaagtaaaaaatgtattttttttgtcatagaacatttcttagaaagtaagcagaaatctaataggtatccagagatctgtgtatattggacttcgtaaatttaacccagtccatagaaaacctttgacattttaaagaattatcacaagacttcccctacctcccagtttagagcataatattgtggcatgtaatttcctctacgtgtgcatgtgtgctaagtcacttcagtcgtgtccaactctttgcgactctgtgggctgtagccctccaggctcctctgtccatggggttctccaggcaagaacactggagtgggttgccagtgccctcctccaggagatcttcccgacctaggatcgaacctgtgtctcctgcagctcctgcattgcaggtttctttaccactgagccagcgaggaaacccataattttctccataaaatgtagtgaaactgaaaacttaaaaaaaatagaactacccatcatgttgaaatggatctgctctgctgggtgtcctcctaattttgaggctgcctcctgcacatcagccaagatacaggtgtgagtcaggcttttttccttctagttttattgagataaagtttgctttatcacactgtatagtttttaagatgtatggcataatgattgatttatgtatgtcatgaaatgattaccagagtaagtatagtgaatatctgtcatctcatataaatagaaaatgaaaaagagacaaatgttttttccttgtgatgagaatgtttaggatttactctcaacatctttgatgtgtaacctagagcagttgtaactgtatttgttctgttgcacattacatccttcatacttacttacagctggacttgtctgtattgacaatctttattcagttccccttcctgcagccccacccgatctctgataaccacaaatctgatctctttctctgactttgtttactttttaaatacagttgacctacgaataatgcagtgaacatagtggtgaattccgt

SEQ ID NO: 29694 - DNA, 1482 bp, Bovine  19866880936170
  misc_feature (1)..(1): n is a, c, g, or t
nttcttgcttactaaatgtaagaaagaatttcttctggggagaggccagttgtgtttggttcaccattggattcctcaggtccccatacagtgcctgctccaaaggcaaactgtttacaagtgaagaaggaacggaaaatcattaaaggccaaaagtgacggccgcttagtcacgtccgattctctgcaaccccatggactgtagcctgccaggctcctctgtccagggaattctccaggcagaacactggagtggattgtcatttccttctcgaaaaggtcaaaaagtaatatggaaaatatgtattctactctactctactctagtatactatactctaccaggggagggagaaagagccgtgtgattgaattgtcataaaagatttcacgtgtagagaaagcatgaagtgtcctcaaggacgagaaggtgtaaacagtaagcgaggaaaaaggtacctccagggggagcgacagatggagccaaggcacagacgtgatggggccacaggtaggaacaggaggcttgtctagattggggccaccctaattcccatcccaaaggcggtattcaggacatgcaggatggactggtgagaccgaaggaaacagactgcaggcctcagacggagaatggcaacagaggggaagtgacaggcacttcaaggacaaaatgcacagggctttggattcactcaggggtcttctcacagtgaaatgcatgacccaaagtcaagatgctggactgcacttcccaggctggccccagacctccacatcctcttccttatagtaacgtttggcatgatacagcgtgctactgtccaagtgtgtacatatgtgttctcctggcattgccacctccttccacgtgggtaatgccctttaccccatggaaaaatgtggcaattgtcttgggggtacttggccctggtttagggcttgagaaaaggccagtcccttaactaagaaccaggtgcagctgtctttagatgcccttgttctgatgtcccactttccccctcctctaaggtcctgtgagctggggctagatctgtaatcccacatctctttctcaactcagcaggaaggacttaaagggcctggctttgttgtaaagggtaaagagaggaagcaaagcaactgcaaaggtactgtttacttttcattcaatgccaaagccaaacagaacgtgtttgctctctgctgaacgccgaggaatgggagagtttgtatttgaagctcatgaatgggacagagtaaatgttcccggagcctcacgtccgcagcagtgcgttcagattgtgctccaagtttaccaagtactttcacagacattatctcatctgatccccaggtccaccctatggggatgcttgtggttcccatatcagagatgacccagtgccctggagctggaggcagggtctaaatgggtgtttctttaatgaagttactaaggccaagtgacatgccccgggt

SEQ ID NO: 29695 - DNA, 1605 bp, Bovine  19866881089273
  misc_feature (1)..(1): n is a, c, g, or t
ncttttgaagaaatgatctgatctaatgatgttactgtagaaatacatcacatattttaacatcagtaagatatgacattcaaggggagagccaataaacctttgcattttaaacccaaaggaacacatgttggacaccttaaattataaaattcaattctaagcaggaactgttactgtgtaacaaatactgctcatatcaaaagtgctggtgacaaggaattcaatatgccctcccacggaatctgttcacatatgtatgcgtatacctattattgtaataagattttaaatgtttaaggtgcttaaattttgcactgcaggactaattcaataggtattcatctgctacctctttgtagcagctccagttacagtgagtgatccacaggcaaaagggcaaaaatgctgttattttctggaatgtggcatttgtggcgctggagtgccctctattggtagtgaagaggacacactcattagctgccccgcatgcatcttctcgttaacccggagttcacatccatcctgcagcattcgaactgctattcgtgcaatgttcttagagtcatcaagaccactgtggggccgcccgtcgtaatccattccgagtttttcaagcattattgtcagcttagtttggcttcgaggaacctgaaacacgaacagctcagtgaataattctttagtattttgtaagtctcaatgaagtggaaaataagaggccgaaaattaacagtaataggcaaaatagtaaaaatttaggcaaagggcaaatactcctagatcaaatgaagcaaataaaattctcagacttagaaaaaaaatgatcttagagttttaaataaaaatatacataaacagatggagtccataaaacaaaaagtttgcagcttggtaacttaattatttatgaaaggaaatacattgttctgaacagctaagttgaagccctactgttttaacacaaactgttttgcatggtatttttctgtaatgtattattttaattgactgacagtatttataatttttatatatcaaatgatactatcaccacagggaaaaggcagcccacagaatggaagaaaatatttacaaatcacatatatgaaaagggattaacatctagaatgtataaagaattcttaaaatgcaacaacaaaaaaagcaaacaatctgattgaaagttgtgaacactctccacagtcattagaaatgtaaacactgaataatgattataaagctaatgtgactgggttagaaagatgcagggaggggaaggataggcaggaatggtcgctttttaatggagctaaatcttcgctgttcactgcatgaactcaacagataactcagactgaaaactcaagaaatagcataaatatataatttagaaataggaaggttaatatgagaagaaatagcttaaaaaactgcaagtgtttgggagaaatggaaccagtactggtaagagccatggggggaagactgctatttaagacctgcagtattatttagtattttaaaaaaattcatactgcacacacatattaattttgctaaaattaaaaatcagtatgaagtggtttgttccagaagcaa

SEQ ID NO: 29696 - DNA, 667 bp, Bovine  19866881136769
  misc_feature (1)..(1): n is a, c, g, or t
naaaatgccttctttatttttattagggaatacttctactaaaacagtctctattttgtctaccgtgacatctctactggtgagggtaattagtacccatgccaaccatgttttgtttctctctttgagaaaaaaatttttagtagaaaggggtatgtgtaaaaaagcaggtggtaaaacttaggagttcagtttagctcagcttagccaccctcttctgaactttggtttctcctatatgctcgcattaagtcactaggctgtgtttgactctgcagccccgtggactggagcccactaggatcctccatccttggcatttcccaggcaagaataccggagtgggttgccatttctttctgcagaggatctccagggatcaaacccgcatctcctgcattggcaggcaggttctctaccagttagccaccagagaagcccctggtttctcctatactcatatccaaaagacccaagtttcctgcagttttccgtatagacaagttgagggataaaaaaaggagtgagtatgaaatcattttgctatgagtatgattcattattaaaattcaatttagaagcgaaattacaaacgtgacacttcagtatagccttgtaagaatctaaagtgattcctctgtctttccaaatgaaccaaactttacag

SEQ ID NO: 29697 - DNA, 1176 bp, Bovine  19866881161410
  misc_feature (1)..(1): n is a, c, g, or t
ngagccccacagtcgtcggctgtccgtaaggttcccagggatacctaacgtgatgaagtgtttctttgatgtttctcagtctcagtctttgctggattcttggggctttgtttccatgcaggcccttctagcaaatagaaacatttatatcattatgtcccatggcattgctgaagttcaacaaacagcacttttgaacaggagcagatttgaatggctagcatttatttgcctgggtgatgataattagctctataatttacttctttgtcttggttagtgctgagatctctagactgggatctctaatcccctggactgggattagattccctaatcattcaaaggaaaattcagagattatctctacttcactgtggatacgagcatctgaaggacgtgtgtgcatgctgagttgtttcagtcgtgtctgactttttgagaccccagggactgcagcccaccaggtttctctgtccttgggattctccagggattgaacccacgtctcttacatctccagcaccggcaggcaggttctttactgctcgcactgcctgagaagtcccatgctctcccctaattcttgaatacgaagcaacagctcttacaaatccttcattaaataaccatttagctatcaaggtcatgaaacagaatgaaatgaaggacttagtcatttaaagctaggctttatttgtttatttttaaaagcaacattcattgtcactgttataactgcttctgctgacggaaagggaaatatcactacctagtttctttctgcccgagtgttagagtgaagcgacaaggtaggtgattaaatagttaatcccactgggggactgtaagtaggagaaactatgggagactcctataagttaatgattactcaagaatccaggcttgcttgaccacaaaatcaagcaggcttgcttagcaacaaaaccatgtagcaaaggtatgagacatgcccccaaacaataaaacaagggcggcatgagccccacctcctgcccagtgaactcagtgagttaatgatccttaggacataaaaaacaatcatttgtggacccagtttgaccacgtagggacaaggaaactctcctgcccaacctggaggcaaagctgatgatggaaatatgatctctactcaagaaagacaaataaattctt

SEQ ID NO: 29698 - DNA, 1429 bp, Bovine  19866881239827
  misc_feature (1)..(1): n is a, c, g, or t
ntgtggaggctccatgctgtttgtgggatagataagttgttgatacagcaaaccctcctcctcctcctccctcccttctcttcttctaaccttttctcctctcctttctcttgggggcccccttggccttgggcacagaacccaaatgttttaaaagatggttaatatttaaaggaagaaagtcaggcatagcccaggcgatgactggttgctcaactgacaaacaaacccaccttcttctgttatttcctaagccagcaggaagcagccaggagactgtcacctcgcagccacgccaggcccgccggcctccccacccacgcagcaattgcgaaatgttgctgcaaccacctgaggctataaatagtctttattaagaagccacgttggggactgagcaggcctgatgggcggcccctatttgctgccccttcaaacaagtggagaaaaaaattttaagtgtcacttacaataatccaaacctggggccaagccttctaagtctactttggagttctgtctgcccactcccctggcccccaccccaggtgccaactaccttttagagtctctaaggctttctgcttattgttggccaatatgaaacttcatcttgctgatgcaatgatcgtaatgaagataatgataacgaagtagtttttttagcagattttcctttccccccaaccattcctacggcccccatacttgtctctaatctcatgtgcagagacctctatagtgttttccataccaattcatgccctctgccctccagtctacaagctcaattcttctacacactccctttctttcatggtctttccctgttcagaatttttcagtgacttcttgtatggaacagtagcctagaatgttttaaatgcataccttcgttcttaatgtatataccaatttactactctagattctgataaaatattaggaaagcttattttcattgttcatcttttggcaagcacaaatagcagttctaatattttttccctgtcctccaatggatcattttgcataccccactgtggaaaccactgacaatggctgagatagcatcattttgctgggtcactaaggccttctaagacctagtcccaggtcattcattcattcactcaacatttcttagtgactgtgatggccaggcatgggactaggctcagggcgtaataataagtaatcagagccccagcagatcaggagcttacaggccagtggaaaaggtagactcgtaaataaatagctcctggagagacatatctatcatcacagtttgcacaaaaggagaatagggaaaggaaaaggcttcatgaggactactttggctgggtcttgagctaggttttcatttctaaagtgttttccttcatatggaaaatggtgcagatggtcaccatctctacgatgggtc

SEQ ID NO: 29699 - DNA, 3176 bp, Bovine  19866881324289
  misc_feature (1)..(1): n is a, c, g, or t
nttgtcaggttcacttgagtctgggctacaacaaacaaaatatcctatttatatccacagactggttaattggtcaaatagatactgatgttagttactccagtttcctcttgccatggacaaacagataggaggctcaactgaagatcacgtggcatcaaatgaacaatgtttctcccttcagtccttcactcacttaccactttatttggataaacatgaaggttgtaagtggatagtgccagcaaccttgaggaagcagggctatgggcagtgatctagaattagttcaaagttttacttcctcctaatttgaattcttgattcctggtgagatatataatatatatttatagacgtactttgtattcaattgctagggccactgtaacaaaaatagcacagcctgggtggcttaaatgcacagtaatgctgtaggaagacttcaagaaaaactccatcacccaatcagggtccagggcaggccaaactggccttcactatgcttatctcccttcaaaaaatagttatacatacacacatgtatgcacacatcagtctctgttatacgttgaattgtgtcccctaaaaatcatatgttgaagtcctagcctctagtacctcaggatgtggatagaatagggttgttcagatggaattagttaagatgagctcatcctggagtagagtgagcccttaatccggtatgactggtgttctcataaaaaggaggtatttggagacaggcacacagagataaaacattatgtgaacatgaaggaagagattacggtaatgaatctacaagccaaagaatgtaaaaaaaaagaaaaagaaaagccagcaaatcaccagaagctggagagaagcatggaagagtccccagcccccatcacagcatagaaggaaccaagcctgctgatacgttgaacttggtgtgcactacatacatttgtggcatagctgtgcaaacatacattgtggcattgcctttcaaatttgatttctcatgtatttctatgtttttttggcaataattatagccacatatgcacgcataactagcacatgggccagttaaaaagcttacgagatgttgtttatgatttcacagaatttctcccgtttttcacagttgatagtgtcatttacttcttcattttggtttagaagttttatttattccacacgagtttagtttcaacttgggcgatcatgtatcgtcagagcaggtgctcatgctctgggtcaggtaaatgatagagatggctcatctagaacttaaaactttctacagccttgtggtgactgggaaaaaccttttatggcttttctggttggcctcctcacagcaaggcgcccatgggtaacaacggaaatgctgtgataatatcctgccagttctgatgaggcctgatctcatctgttctttgaagtccttcatggagaagctgatgggtgcagagtagctgttacatgtttcctggtaccagtccttcagagaactaatctagattaacttcttaccaggggtcaggaaagcatcacgtctgttcaagagagcaaaatacacgtctaaggaaacagaacataagtcctcaagtattctagacagcctaatccaccagaaaacagtggatgagtgtaggattacaaatagcgctctgtgtgctcagtcactcagtcatgtccgactctttgtgaccccatggcctataacacacgtggctcctctgtccatgagattctccaggcaagaatactggagtgggatgccacgccgtcctccagcaaatcttccccatccggggatcaaactcgtgtctcttacatttccggcattggcaggcgggctttttaccactgagccatctgtgaagcccccgggtacagatatgagaataccaagtgagaaggcacagcacccatataataagagacttcacaaatattttttcaaaaagagaggtagttctgatttttaagagagagtgttaatgcactttaaatgttacttattattcaaatacagaaaaaaaaaaaaaaaaccttcaaagaacttaggtaccccacacacctatctgctagcttccacagttattaataattattataaattaattgtttaataatcaccatcacaatagcagtcattagcgatctaaaagttttgctgaagaattttacaaatagcaaacaaagcattgaggaaaatggaaaaattaactgagataataagctccaattccagcaacaatagcctgttacattatggacactgagggtcactgtagactcttttgtaaggaatccaggcgtctggcagagtctccaacagcgggggatctcaccctcccttgggcaacagcccagagccctctctgcaggacttaagacttgatagtttgcctagcaatttctccccctgcagttgctgtatgtactgcatctcttagacttctgtctgtgaacctctttgatgaagcaaaaccccttcaaccatctaccctacctggtagctctgaccacaaggggaacttgcctttgctcattctttctgtccggtgttttgacagacgatgcctttccagcaacccaactgctcagaataaagaccacatcttcttttctcctctctctttgtgcttggcaggaacagaaatgtgtttctcattatttggtctgttttacaatgtacgttcctgctggggttcattgctgtggggattactaggtatttcatctcatacaagactggcccttccttaatgtttaacagcagcagtccattccgagacaggaaatcctgaagtgctttgctgaatttaaagactcaaccaaacattaaggttcagaagatctttcctgttttttttttttttttttaaggtgttatttccttctggctggtgtgtatatgcattatgagggtgttgggcagggtatgagggtatttgaaaaggggaggtgagtggtaggaagaacccagagataatttgaaggttaaaagccattatggcataatggaaagaagacaggccctagagctagaagatcatcccaagtctttcttactggctcttggaacagctagtgactttgggaaattgactttaccttttgggtcttactttatcatctgcaaagaagatgatgtaacctactcctgagggttg

SEQ ID NO: 29700 - DNA, 931 bp, Bovine  19866880347742
  misc_feature (1)..(1): n is a, c, g, or t
ngctggccgcttagggggcaggcccagaccctgagttagggtgtggcacgtcgagtatccagtggccctgggtagaagtcctacagccaggagcccaccgtacactgaagagagaagggaaagcttcagttctgtcctctcccatcacctgcccctcaatctgaagatgagcacaagccttcaggaataccccttctgttaaacacccccatccatccctctccccctgccaggtgatggatggtaagactcagttcaagcttttttttccccctgccccccaccccggctttttctcaaacccaacctaattgtcaccagggttcctaagtaattagggaatcccagcccttgcccacctagtgttcttcttcatccctaggttctgaggacgctcaaggctcagtttgaaacagttacatatctctgcccgacctggcgggatctggagatcctctagtaacgaaaacctgtgagctggtgaaattcctgcttggtcacgtattatttttatttttcagtaacttgacaaacttggactagatcaagaaaccttctatgggccaagcctattctaggtacacagcgtgagtcaagttcagttgggttttttccaacagaaaaaatctgtgtttggacaactagagcttaaaatgttatgcaaacaaaagatgaacctacatcagcccaggagaaaacttgatagacttgctactgaaataactttcagtgactctttgggggaaaataaagccacttactgcagctctagtgttgagggggaaagctgaagtgttttgaaggtgtaattatggggaaaagtgaaaacctaccagcattctgtaatcaaaaaggccagaggtggaaggaggggtttggaggagataatttgctactttgttcacagcatgagaacacaggaagtgaaatg

SEQ ID NO: 29701 - DNA, 1727 bp, Bovine  19866880362119
  misc_feature (1)..(1): n is a, c, g, or t
ntgttttgcgatccccaagggtggctggaggaaaaagagttgggaatgaaagtttagcagcagcaggagggaatgagtggttgagggccttgggcatactcgccagtggacctcttggccagtcagaagctggaccgtgtgaagccctgctcttgacaaagcactgtgcaataggggctgtttctcccccaagtctggtgacctccccgaccttgccagccacacttctggtaaccgtctcctacgcagagagcaggaatccttaaagccaaagtcttctgacttgcaccggattttgtgtcccttcgaagagactctttcccattgcctgcatgccaagcaaacaaaccagagtcccttactgccaaggctaatcacaggtgtcttgtttcatttcaggatgtggttagtaccttgaggaactgcaagcaccagagagaaagccttagacagccaggctggattgagagagagcagatgcctgggaagagctcagtttaaccccaagtctctctttaggagggaacaaaggaacaaaagtgaatcacaccgtgatgccaagacgagggagttggagtgacccaggtgattctgagtgagtcagtcagggaggccttcctggaggaggtgagtcttaagcacctggcagcatctgataactaagttttgtaggcatatggtgttttattgtgctttacttcatcttgcttcacagatacagcgttttttacaaattgaaggtttgtggcaaccctatatccagcaaatctatcgctgaaattttcccgaagtgttattttttcattacagtatatactttttttttttttggaaataatgctattgcacacttagtagcctatagtatggtataaacataagttttatatgtcctgggaaaccaaaaacttgtgtgacccactttcttgccgtggtctggaactgactgcacagtaactcccaggttatgcctgaaccatgcctttgtttctaactgtgctccctctttcttgttggagcggaaagtagacagacaggtatcaggggaggtgccatgttcagatggttcaacattgttgtagcaaacactttcccattctgcggcgctcggtctgtgcttagctggggcagttgcagaattgatgagatgtcaagttcaggcatcaaccagcccagcaacccctagacaggacaccgcctctacattgaatctctgtttcctccttgaagccgtcttcaagccagcggggtactctccttgtctgtgctcttactcagttcgaattgtattactttttgaatagataatgttgtcagtgttcaaagtgcaaaagggtatttagaaatagatttttttcctgttcctattccctcctgggaccggtgctccctgaacccagtgccaccagttcttggtagcactccagctagattttaaaatctggtggggaaagaggtggtctcacacctctctgtgtccctctgtgtcctggctaggatgaactgtcccgcctcatcacccaaggaagttcccctagcaccacaccctccctcctcatccgcactgctgctatcttgggtcagacgcccctagttcctcttaactggtcatccggctgccactcgggtgcatctcctagacaccctccaccagctgtcacactactcttcttgtaatgttgggctactaatccttactgctccccatacctcgggtcaagggcaaa

SEQ ID NO: 29702 - DNA, 1533 bp, Bovine  19866880410052
  misc_feature (1)..(1): n is a, c, g, or t
ntgcatttttaatgaagcacttgagatgattctgctgcttaatagtgtagtgagagggtgcaccggagcacagagaagggaaagcatggggagaggattctagaaggatgctggctatcatccttattgttacccacgttttccttcttgcttcatcccctctcctttagctgctttctgagcaaagactgccaaggatggattcccgcccttaccccagtgggcaaagccagcttgtctggggttccttctccagccaccagccccactgcagagtgcttgccagagtccccactgtattgcgggaggggcatgagacaggaggtcaggcagaggctggggacacagctgcagcagaccagggctccgtttcctcccccagccctgggcctctggggcagaggaagcccaggcaggaagaccagagctgccaccagtcagtgaggcccatgaggcaccccccaccccccagtcatcctgccctcagagtctcagcatcatggatcttcatttggcatcattcttagactaggggccttctgcagcctatatggccctatgcccagccctccagccttaccatgttacgccagaagacagttctcttccctcatgtctgctgcccctacctgggcattccccaggcacacacctgctacttgccaccattcagaaagttcttcttgctgtctgacctcggtccttctttctgcagcctcagccctaatcttttcattctaagcctttgagagatgaagatggggggtcacttctgaagcactagctggtctgggacttgagatgggactatcatagaccagaattactcccctaataatccccaccaaacttttgaaaaaaattcaatcttaaccaaccacagaaggtcaaacattcaatgtctaagtatgtttcacttcccttccacatcactggccctacccccactctttcccaggacctcaaaggacagagagaagcaggggagtggctcagagaggacatcttatagtctaatgagggtgcagggaggttccttagagacagtgcggcctggcactgtccaggcttggtatggctgatagaaccccacaagctcagacatgggctgtcaccccagattgggatatggagtagaagcagcactggactggggagtctggacacctgggttgtactcctagcactgccactgaaccccatttgaccttggacaagcctgctctcctggctgagccttgatccccatcttctctgaaataaggaactgggctctgtgattcacagggtgtacgaggattccgtcacgggggtgtcccagccccaggtggctcctgcagaccctgtagcgactccagcctgccctgagaccatgtcctgagctccctgatgtgcgtgactcctgcctgttctatccagaccccaatctaaacaatcttgattcctgttcccagcttggcgggaccctgaatggcaggaagtgaagacaggagcctgtttatgtttgaggcagccaggcctgagtcggggggg

SEQ ID NO: 29703 - DNA, 759 bp, Bovine  19866880519243
  misc_feature (1)..(1): n is a, c, g, or t
ncccttctttcttgctctttcttccactgctgaaagcccactggctcctcttccatctggtcaaaataacttgggaagcttgatcttgatacatccaaacaccactgacctccactgagccacccacataaattcgcatggtaacagacccagaggctgagtcagcctctacagctttgactctcccaaccaaaggacaagttttctctggggattgtacaactttgatgaaaaaaaaagaaaaaacagcacgggaacaagcagtacagagagaacatttcacatgctgtctcaatcattagaaagttgctgtatcatagccttcaacgttgcaggaaatgctatagagatttcacaaaggcttctgagccaaatgtgggttcgtgttaaagttatcgtggacacaagcctttctttaataaaactgagcatcaccagcactatcaggacactaggctctgcgggaaaaagcaggaggacagcacatgctggtcatgtggggagacgggggtggggaggggaagaagagcctcgacagagagacagatggacagagtaggtcaattaaaaatgcctcttccttcccttccacttcagtggatttttatacaactctgtgctgtgggccctcagcaaatatgccacaggtgtgtgtgtgttttcccttttcttgtttagatgaaaacaccagacagaaatgggtattaaggggaaaagcaaacattgcaaatgggataaaaataaggttttatgtttaaa

SEQ ID NO: 29704 - DNA, 1952 bp, Bovine  19866880578412
  misc_feature (1)..(1): n is a, c, g, or t
natgataaaaaaacaatgcataatccctattaaattgcatttagagagatactagggattttagctatgtctcttgattaatcagttcccctttgtatgagaattagagcccagatggtccttgctaggaccatctactcaataaccataggctagggatgaagtgaaaatgctgtcatcaagtagagccttcagattatccagggccatttgaaaactgtcagaccctgtgatataggtccctggacctggtacccactccatgttttgggatgtgaataggagtgattttctgcactgaatgcctgcgagtctggacttcgtaggcacacacgctcagaaggtatccgtaggctttattttggatccagaaccctttaaatgagtgggtttcctgtttatatctttgggctcacaaagaatgtagacccgctggactcagattggtggcccaaatagctctttgagatgccactggttagcacactgccgtcttcctgattggtcctttgtcacctttgtccacttccctcccatagctgccctctgcccaatcaaccttgtcttttcctttcagcctcctcccccgggatgccctcccaatgctgctcagctggcagtcatgcagggagccaatgtcctcgtaactcagcggaagggaaacttcttcatgggtggttcagatggtggctacaccatctggtgaagaaccaaggccatctctatgccgggaaagacatcacataccttcagcacttctcacaatgtaactgctttagtcatattaaccctgaagttgcagtttagacacatgttgttggggtgtcttttctggtgcccaaactttcaggcacttttcaaacttaataaggaaccatgtaatggtagcagtacctccctaaagcattttgaggtaggggaggtatccattcataaaatgaatgtgggtgaaccagccctaaggatcttcctttaattcctctggagtaatactgtaccatactggtctttgcttttagtaataaaacatcaaattaggtttggagggaactttgatcttcctaagaattaaagttgccaaattattctgattggtctttaatctcctttaagtctttgatttatattacttgttataaacgaaccgcattagttgtctgccttttcctttccgtcctttgcccctggtcctaccctcaacccgtgtcttccactccttcccaccgatctccattgaatcaatggtgcaggacagaaagccagtcagactaatttccttctctccttgcacttccccccacttgtcatcttttaactagtctttcacaaaggatcctctgaaacccgctctgtgccccaagcacaggacccattgcttctgcttttgcatctcaggcaaaagcggagggtgccttttggaccctcctcataggttttctcttcagacatgaaccaagcccaaatttgttttggtgccagaaaaactgaaccttgttttaacaaaggatatcagtgcaaactaccgtaaacagctcctgaaagtccctctgaatgggccaggacaggagtgcgggtgtcttggctggcaccccctccctttcgtcataccctcctgaccacgaatcacccctgcagtccttcacggagacagtgtgctttcttcttggtgatcagtaactctggggtcaccaggacccagagaatgattaacagggaagaagggacacgggtctggccagagaggagaccctatcccccgcccccgcaaacacaggccctgggaaggaccccccttgcctgcacaactgagacaggcaaactcaactgaatctaaaggttgagtcctgaaagctccctgggttgagtggtggcccagaaagtagactatctaaccctaatccagctgagtggaaacagattcccacaagagatgtctcagccctgctactagt

SEQ ID NO: 29705 - DNA, 1927 bp, Bovine  19866880589031
  misc_feature (1)..(1): n is a, c, g, or t
natgactttcttgtattatgattgcatataataatatcactcagaacattgaatgttgttatcttcttcctctgaaatttcatggctaaactgagattcactgagagaagcaaagaggttattgattttctttactccaaagttttgagaatggtagtccatatctaactgaagaattcagtctgatctcagaaagaaactaggatcctaatctgcccatttagtggtttcaacatcaggcttgtggcctcaagattcatttctgaggtaagtctgggaacccacaaatctcctaagtacaacctttctctgattgcctagatcccatggctggatttctgccttggtttcctgaagaagtgaagtaaaatttgttcagttgtgtctgactctttgcgaccctatagactgtagccttccaggctcctctgtctgtgaattctccaggccagaatactgaagtgggtagctgttcccttctccaggcgatcttcccaaacaaaggatcaaaccaaggtctcccacattgcaggaggattatttgctgtctgagccaccaggaagcccaagaatactggagtgggtagcctatctcttctccagcagatcttcctgacacaggaattgaactggggtctcctgcattgcagatggattctttaccagctgagatactagtgaagccctggtttccggagtctgctccaactcttcctactgaatctcatcctttttggcaacagttcaaatacactgtactctttcttctcttttctgcttgaacatggtccttcttcttgtcccatacaccatccccaaactgagtcagagtacattcttaattagtccattatgtaattatcccagtaagagtacctgtcagaaaaaaaaaaaaaaagacaaagagaagtaattgccttaggttcaaatagtttatgtaattgtgaacttaggtcagctcttattttcttttagcctcatttttctcaaagtaacctatagatagtaattatctgagataagaatcaaatgacacaaatttgtaaaatgcctagaactcagtggtgttcaatggggcagaacctggaacaaatactgtgtataagagtaataggaatcatctcttctgacagtggtaaagactgaatttatgcactattttatagacttcaaaggctaaaattagaacttggatcctttggaacctaggagttaatgtggcatttaagaatttgtttgactcagaattttcatatatcatcaagatggacgagtacaattaacatttacaactcttagagaggcattggaaaagtataagaatacatagaccctgtaagaaggcccctttaaatgaacaattcaaagaaatagagaaaacaatagaatgagaaagactaaagatctcttcaagaaaattggagatatcaagggaatatttcatgcaaggagaggcatggtaaaggacagaaatggtaaagacttaaaagaagaagagattaacaagaggcggcaagaataaacagaactatacaaaaatgtcttaatgatctagataaccatgatgggtgttgtcgttaacctagagctagacgtcctggagagtgaagtcaagttggccttaggaagcattactacaaacaaagctagtggagattatggaattccagctgcattatttcaaatcctgagagatgaatgctgttaaaagtgctgcactcaatatgtcagcaaattcggaaaacttcagcagtggtcacagggctggaaaaggtcagttttcatttcaattccaaagattgttcaagctacaatataatggagttcatttcacacactagcaaggtaatgctcaaaatccttcaagctaggctttattagtgtgtgaactaagaactagcagatgtacaagctgggtttcaaagaa

SEQ ID NO: 29706 - DNA, 478 bp, Bovine  19866880612949
  misc_feature (1)..(1): n is a, c, g, or t
nccacctacccctgcagggcgcgcccgttcgctcgcggcgctccgcgccgttcgccggtccgctcgctggctgtcaggccggcgtccccgcgccgcccggaccggatccggggcgagggagcagggcgccggtagggggcgccgcgccggagcgcctcgcaagcgtccccgggcccgcctccccgacgcccccaccaagccgcgcgggaggggcagccgggcagagcgccgggacgcggccgcctaacacgctggcgggctgtcagccagcacgcgggcgttgaaacccgaaaggtgctatgtggactccagggccccgtgatccttgtaaatgccaagtcttacctttttcctgaacggcagtcgcagaagaaatgtccagcaatattgcagtgctcagtttttggaatttctgacatctgtaaacacgaggaactcaatttatccgatcttggccatcggaggaaaaaaaaaaaat

SEQ ID NO: 29707 - DNA, 2280 bp, Bovine  19866880622974
  misc_feature (1)..(1): n is a, c, g, or t
ntgttcattgaagccatttattttatgcaggaaagggctgcatggaattgtatttctaggaatccacacaaaccatgaaaagcatgagtagttcttcactgagctctgttgttacctggcttgggcaagtccctgttccaggcttatttcagctttccagtctgtgaaatattctgtgtacatttacagtcccatttgagagaaatgaggtaaggtgataaaaacgttgagtatatagaattatacagatgtgaagcactgaatctgcagcaaccttaaggatatcccaggcctactggttaaacatgaaataagaacttctgtacaggctcaagagatcttatccccaagaagataagacagggagtaaaaccactgtaaacacacttgatttctaagcagggtgaggtttggttagaaacggataagataaatgtatttaatgaatacaaatgtgttcaaatctgatagcaagtacttggcaagtggtccttggttaacacctacttctcctgaattcctgaatagacttcctatgtggatctggaagtcccaaagcttctttcttcaaagcttacttttctgtttcgttctaatctctttctgtttcttatctaatctgtttctgttttgtgctaatccctctattagtcctttccttctgcctctgtccaaatatctcagttgtgaccccagagaaaggagaaggaggtttttgccagtttgaatgggttctgtctaccagagcctttctggggcaagagtctggagcaaggtgtaaatgagtacagtataggcaattccttttctttcacctatcattgtatttcatatttatttatttttggtgctcgggcttttgctgtgagtgggggctattctgtagttgtggtgtgcgggcttctcatttcagtggcttcttttgtttcgagcaggggttctaggtgctcaggtttcagcagttcacctgggcttagttgtcctgaggcatgtggatcttcctgaaccacggattgaacctgtgtcccctgccttggcaggcagattcttatccattggaccaccagggaagccctctttttaaatatatactttattgtttgtttattttaattttagttgttctgtatcttcctgctttgtgtgggctttctctagttatcgctagcaggcactactctttgttgtggtgctcaagcttctcaatgctgtgacttttcttgttgtggagcacagactctaagtgctcggccttcagtagctgtggcactcgggctctagagtgctggcttagtagttgtggtgcctgggcttagttgctccacggcatgtagaatcttcctggaccagggatcaaacttgtgtcccctgcgctggcaggcggattcttagctgctgtaccaccaaggaagtccagtcctctttttaaaaacttttctggccatgccgcacagctagcgtgatcttagttctccaaccagggattgaaccccaggtccgtggtcgtaaacgtgccaagtcctaaccactgaacccgccagggaatcccccagtgtaggcgatttctatggatgatgttgatgatgacgaatggagggagagtgattttcgcaggcaagagtcagtttgtgtagcattttgttgtttttctgtatgatgtatagtgtcccagggctggcagcctgctgtgaactaagaaaactgtattctgtagtctctctagatatgctgtgacttggcaagggctgactgcgtaccgtgcacctgcatggccttttcagcttgacaaagaatagtgtctctctccggctccccgctccctccacaggaaatgctcccagacgactgcacaataagccctaattaagtctttcctcgaatcctgatgtcttttcctccaacctttccttggtttttgatgtataattaagaggaatgtggagaaaccaaaccaggcataagatgcagctgggattgggtcactacctaatggcaagtaaagactaaaacctctgccctggcagctcttttgacagtttaaactgggcaagaaacatggtacatagatggagaaattaagatgcttttgatggaaaaattggttgcaattatgtgagaacatttcctcagaccttttgagttacttgtgttgcgtgccttttttgtctctgaataagagaatctcaatgttttccagccaatatttaaaaataatacaggtaaggtggttagtgcttccctgggcaggctgtgaacacatccttacaatgagatgcaaaa

SEQ ID NO: 29708 - DNA, 734 bp, Bovine  19866880714872
  misc_feature (1)..(1): n is a, c, g, or t
nactggagaagcagctgctgctcctatgttattttattggggtcactggggaaagggtgggaaaggattgtagaagtattttttaaagggccaacagaaccaaggagaccagccccagctcgatcaggggacagtcttggggcagaggaggctgcatcctgagctttctgggcgttcggaacaaagaactaggatctcataggaggagctgggtaattcaagcagcaattcacgtagggaccagaacatcagtttgaacagcatgacaaagccccttcctctcttctgagctccaggcagggttaagctcaccttcctcagcagttactctgataccccactttggtgtatcatagtaatacagttggaatcgtcagctggttgagtctagagaggggctgagagtgtctctgcttctgtacaaaacccctaagatctataaaaattcagcctaccttccctgaccccccttttttggtaaataagttaatatttgacatttttgttctctgacctgttccccacactggggattcctggtcttaacttggaagtgtttctttcacacatttttaggtactagagttaaacttgtctttcccccgcccccgctttgtcctttttcctttgaagggaaagagctagattggctgggatgtggcatcaagagctagtcttccctttgtgtctaaccgcagctccatcaggcagcttaatctggggctcacacatcc

SEQ ID NO: 29709 - DNA, 1785 bp, Bovine  19866880728339
  misc_feature (1)..(1): n is a, c, g, or t
nttataaaatgatactaattaataaagaactttcaattcaaagctagaactgatagcttataattaatatcagggagaatgaagtgggaatatatagatggagccaataaagaattttaaagtgtgaaaagaagcaccagaagaagcttacatctcatgtataatttgttgcattctaaaggtttttgttggacaatatattttaaggggagatgtcatagggataaacaataagctgagtctgggaaagaggtatatgtctgggttctcttccagttcttttttagttatttttttttttcaaaagagaaaatgtggtccctgaagtttgtttgtttttatttaaagaggagattttgtgagcctatgcacagaaataaggaacacagtcattcttggcaaagacatgggcagtgaatggcagagaggaagcatgcaaaaaatagattgtaatatataatcccatttggtttctgagttaaagtactcatttggtattgaaagccctccaaatgatttattatcttggtgggagagaaaatattagaaatacttatcttctttttttgctggttgaaattatctatgatgacaccaataaacaggttcaaggtgaagaaggacccaaagatgatgaaaataacaaagtaaagatacatgtatagactttcctcatacttaggctggagttccacctaccaaaggagaatactttttagacattataatacatttgatgctggaagtaattgttgctttttcatgagaatagataataaaatttttagtaatacttaagcagtacttttatttcttataaatcagctacttctaaaaataatctctgaaattagcctttaggataattttttaagtaaaaaaggaggtgttatgtaaaaaaataccataaaatgatttagaaattattttttttctaactacaaatacaaccaatatgttgccatttgaacagtagtatactaaatttggcaatttttaacatactacatttttataatttaaaaattactagtgaaaacattttacatcagtaaatatgtatagattatgtttagaaataatcattcctgatgtgtgaatttatttagcaaacaatttagttatttatttatttagatgtttgacatctaaataaataggcagtttgacactgcctataacagtgtaacagtcactgaatttttcagattaagtagacattaactggcactagtggtaaggaacctgcctgccaatgctggagacattaaagacttgggttctatccctgggttgggaatatcccctggagaagggcatggcaacccactccagtattcttgcctggaaaatcccatggacagaggagactggtgggctacagtccataggattgcgaagagtcagatccaactgaaggggacttagcatccaactggacatgccatctgctaaatcctcaaccagtaatttaatctctagagtgtactcatgagaaataagcatttgagcttttacttagcatgtaacaaagacataaatgagtcactataagacaatgccctaatatattcatgtcctcctaaagatattagagttaaaaaccaaccaaacacacaaaacaaaataacaaagtaaaataactctggaggatatcaggaaggtactcaacacaaaactagaatcatttatggaaaatgtatatcaggaaagataaaagggagcttcttaggtcagtttaaagattatgggggcaaaggtcatccatcatgtttataggctaaa

SEQ ID NO: 29710 - DNA, 667 bp, Bovine  19866880735037
  misc_feature (1)..(1): n is a, c, g, or t
ncccccacccccccaactcccgctttctttagaagaataatcagtgtgaggtggtatccttggctgaacatcttcctccttccaggtccttccacacctctttgctggccaggctgagagcggcatatttgctcctttccaagctgtgtagagagctgaaggtgccggcagcctagtgcctggggcctggagccaacgagctcgccttctttgggacggagaacacaaaacagccctgggaggggagagcctgtctctgcagacagacagctgcctcagggcagtcttgcagccgcctctgcagccaattccttttgtaatttgcacaagagaccagaagatggggctcttgaccctggagtcaaaagccagaggctctgactttttctacatttgaactggagtcaaatcagacttgtagagctcttagtagtaatcctctccctcctgcttcttctctgtgccctgacaactcgtgcccactctcatgagagcaccatgagctggctctttagggagtggcaaatggagggcacatctttcttctggtcaccatccttggcccctccagaaatgccatgttgccagtcagcctaaatgaccccctgcctcagcttcccccctttaatccaccttgcccccaaggcagatttcaccaagggtacca

SEQ ID NO: 29711 - DNA, 2439 bp, Bovine  19866880741969
  misc_feature (1)..(1): n is a, c, g, or t
ntgagcagacctgtcttatcccagtgacttatgtagttatggcatcttttcctttcgttacaagggacacatacttagtttacaattgttggagccctgaaggagcacggtgcttttccacagttggacaccacactcttgtatcaccaaggtgaccatgagatgactgaccccatagagaagggactaaagtccttaaaagatctgaaggggcaccgtgtctcttgtctttaaatctcagaaacctcaatggcctcatggaggtcaggaggaaggagcccaacctagcttttaccagtcagtccaacacaattgtttgctggaagatttcagagacctttgtaattaaggataactcccccttagatctaaatcaggttgtttttgtaggtcagcggttcttcaagccacagtaactgagggctcatcagtcactcagtcactttcccctgtttgggtgtgtgtgatgtcatcaaagggtcatgattgaactcagtgaaccaggatgtatgtggggtctctcacatttcatgtggtcaattgtttgacctctaggacttccagctgactctaactcatgaaatattacaaggaaacttgtttcagctagtcaaaaaatgactgttgctattacctctctagtccagacaggtagaccgagccaataagcaggaagttcaagaagccaataagtacttcttcattgattcctgcattgctctctttgtttcctttatcatcaacatctttgtcatctcagtgtttgccgaagcattttttgagaaaaccaacaagcaggtggtaagtaagccagggacctgggtagtagtgaatgtgagggtaaggaggaggctaactggggcaggaaaacgtgacagtgacttagagctcaggggaaatggatctcagtgctgcccctaagtcactgcgctagtcaggcttatagtctagggcagtggccaagtccacacccatcattctcagctttggactgggaagtcagataaagactgcctcatgctgtggtcagtggcttcatgtctatttgctctttctcatccccttttgcttccaactcctgactgctttccagccctgccatttggtgatgacaggttgggaggagtcaacacacaggaaatagaatctgtggctagacagactgttttatcacgctgaattctctgtcctcttgactcctgattgccaacctagttttgatcactcctttgtttcccatcgtaggacctctgattcctggctctgctttgaataaggactctattctgggtgtcctttcatatttgaagccttctaaggaccctcacttcatgtcaccatttaaattgacctaacattcatgtattaccatgcatactgtaactcaggaaaagtttttgatgacctgggagtgtagaaaaattatcaaggaagacctcaaggccattgctgccagtctctgctgtcatcaatccatgcccagtgtctcaccttcagcatccatctcttagatgacctgtgtgtgatctataggagagggcttcttatctgagtcctggactcaaaattaaaaattgttcctaaactgctttggttccaggttgcggtctgtaaaaacagcagcagtgcccatgctcaccttttccctgatgataactcaacactgactgtggacatctacaaaggggtaaacctgttcagatttctgatctctgctcctggatcaatattcttagcataatatctggtctttgccgtgggttcacttcagagctcagcatatcttctctgaagtgttgttttttttcagaggtccagataccagataagacttttggattatgtagaaggaaatagaagatctgctgaaaagatgagttaattgaatcagcaattcccaaacttgtgctgctataggcattaattggggtgactagagaaagtgttcttagtaaagtgatttattttttatacttgttccccacctagccccagtggctggacactttatttatttaggccgtgctgtgtagcatgtgggacctagttctctgaccagcagtcaaacccataccccctgcactgggagtacagggtcttaaaccaatggaacaccagggaagtccctgtagagtcatctttattgtggcctctctgtccctttatgctggttacattatgaatttccaagagtagaatatgtagcatctccaaaattcatttgtgctttctcttcattcctattaccatcttccagaatactgtgttaaggaatataatgtgggaaatgtgttgtaggtttttttaatagttaacatataagttgaggataaaggctttaggagcctagagaagagaagggactaggctgaagaggaatgggggcccatccagcagaatttaggttgaaagcctctagaatggggtcaggacccgagt

SEQ ID NO: 29712 - DNA, 1089 bp, Bovine  19866880757236
  misc_feature (1)..(1): n is a, c, g, or t
naccaactcccagagttcactcaaactcatgtccatcgagtcggtgatgccatccagccatctcatcctctgttgtccccttttcctcctgcccccaatccctcccagcatcagagtcttttccaatgagtcaactcttcgctagggtggttaggctgcttcagatgagaatgcagcaggaaaatactgaactagcgccttatagagtatttaatgagactgtgctttgactaatccttcctgattctaaatttctctagacttagcattctttttctgtaaatttcctccttagttcagtaacacttaaggtaaagtgagtcagttccctatagaaagaaaactgcaaagatatcttggtaaccctgagattagagctttgtggttaaaaataaccatttgatggctacacacactgagtttcctaactttcttgtcccttaacacttttctctcagaccctctgtctccctgcatttaaaatgagcagcaaaatgcaggaggaagggaaacaccgatgattagtctgtgatgaaccctcctgtcctgagggtgataactacgctcctccccaagctgttcactgcagatcttagtcagatggcaaagggttcctgtttggtggtttccttgcagcttctgattttagcctgaaatgtggcaggattttgcaagttaccaattttgggggaagcctgatggagatataatgtccaagggtgatcctttgagttcagttcagtcgctcagtcgtctccaactctttgcaaccccatgaatcacagcacgccaggcctccctgtctatcaccaactcccggagttcactcaaactcatgtccatcgagtcggtaaatcctaccaaataacggatggagggtggaaagggggagtgtcccattagcctatttccttctaaaagttaagattttaggttatcagtgaggctagtctgggggatgttatatattgagccctagacatcagtgattttagaagaaaatgaaatgattctaaaaattggcaaatgataatagaagtgtgaaagtagggggaaaccgtttgtgagattaatgttgaaaactgatgt

SEQ ID NO: 29713 - DNA, 2445 bp, Bovine  19866880767225
  misc_feature (1)..(1): n is a, c, g, or t
ntctcctgaaacgttcttcctggatgtctgatgtgttcaatgaatagagaggattaaacaaaccaattaacctcataccaaacaagaaggcaattagccttaacactcctgtctttgcaaacttctgaaggtcacacagactttttaacaaagaaaaatatgatcattttattaatgtgatttgtcagtgtatccaaatgatatagattagatctatttttttagttgtacaagtaatgcatgctcactgtacaaaatgagaaaataaggataagcaaaaagaaaataaaaattaataccccagggataatgaatataacatttggtgtcttatatatgtatgtgttgtattttaagattttcctttcataaaaatggaatcaagctatactcaattttgcagtggtttgtaacctacttatttcacttgccaatgcatgctgaacatatagattcgattacaggggttcagtgtgattattcaggtacctttctttgtgacctacattaaaaatcctctcctaaaaattcttcattttctgtttttggcatctctttgtcatgctttcaggtggctgaagtttgaagaagatgtcgaggatgggggagaacgatggagcaagccttatgtggcaaccctttcactgcacagtctctttgagttaagaagctgtcttattaatgggacggtccttctggatatgcgtgcaaatagcatagaagaaatctcaggtaagattaggggagagaaagcagaggatcgtttgtggtgtggtgtggaggaaagaaagaagaatgtggctgtttgtgcttgggcaagtcacttaccttcctgacctcagcaccttcagctctgggatggatttcttccctgcctattccacaggcttgttctgggatgcaaatgacatggagtgtggttttccatttgcctgtttgtttagcaaatattattttctatctatgcttgattatgtactaggcacaggatacgatacagtttctaccctcaaggagctcaccttctagtggggaaaatgtgtgtgtgtgttattctctcagtcgtgtccaactctttgcaaccccatggactgtagcccaccaggctcctgtgtacatggaattctccaggcaagaatactggagtgggttgccatttccttctccggggggtcttcccaacccagggactgaacccacgtctcctgcatcgcaggcagattctttaccgtctgagtaaagatgaagcttttactcagggaagtaaagtaaagtaaagggctttcctttatcagggaagccccagtgaggacaatagccatagggcaattaaaataagtgcaacaaccaagctctggtttggtaataagtgtgactgggagctctgcagagaaaagtgaaagaaagatttttcaatatggcaactaggaaaaacatgtatgaaattgagccaaaggactccccacttcttcagcatgatgtaaaggggagatacctgatggagtttcctagtacaggagagtataagtcattgtgtttggggaatggagtttgagaaacacctgggtgcatgtaaggcttttcctcggcttggctctgtttggttggacagatttttaagtttcttccagcttttcttcattacaagtatccaagtaattctgcctgtctgggatcacatagggacctgaggagaggtcttaccgatgggatcttgtgttagcaccttagttacatctgtgaagactctctttacaaatgagatcatgctcatgggttctggggagttagtatatagtacacagcatcttttgaaggggcgccattcaacccacaacaaaagaagagaggagttcagttcatcagtgtcggatgctgcagagaggtctgatgaagtaagaactggaagcatccaccagatttagcaactggaaggttgttgatgattttatcaaaagcggtttcattgaggcagccacattgcagcaggtgagaaatttttcttttgagaagaaatagagagcaagtgcatgtgcgagaaagggaaggcaacagataaagggagacctgggatggatgttcttcttctgttttttctttcccaagatgaagtatcctgaagcatgtttatattgtgggacaaggagaaccaatcaatctaaaagttaaagagagagaagcttggatctttggcttgagtatttgaaatagattttcttttatttattgcttctaacacttggatagtcatggatggagctggagttgagaataggttggagtttgagagaggcggtggcaggggggtggatatgtagggtttaagtaaaacagctatggttcttcacattaggaacctgaggtattcatgttagtgataagggtgggtaaatggtctcacttgtagtgaatcagcactttatatatcttattaatttttcacaa

SEQ ID NO: 29714 - DNA, 841 bp, Bovine  19866880839796
  misc_feature (1)..(1): n is a, c, g, or t
nctcttgcccactgccctctgtctagctccctggggtggcccttacctggggggcagcttgtacagccagtggcgtcagggtctgtgatgcctgaggctggcatggagcttggctgaaggtggcaacggcaggggcagggctcgaaggcatccccggaagtgacttcacttcatgcagcattgggagagagagggacaaggagtgaacctggcggagtgggacgactctgtgccgcactgcacttctgcacaacccgaggccgatctctggtcttccctggcccaaagagggagttcccccaaagttactggtagtgagcatgggaggctgcaaagccctatgccagacctggaaggtacaccaccctcgtcacacatgcagatgaagaaaatgcagacccaggcacagctgggtatcagcctgtcatctcctggcttggtaggatgctaggacctatcacataaccagcagtagaaatgaacatgggtcagggagagaaggtgccagaatcaatgggattgattggctcatccagcaactggatcaatggtcactctacccccaggctactttggagatgcagtgttggctcagggaaggggcaggatttctgcagggtgaagcctaggaagtgacatgtcagggccacactcaggatcccggggctctccaagataacttttctctgctgctccttgaggtctgaagtctgatgagcagcttttaggaggttctaaaggagcttccctgcagaaggtaatggcactccattccactactcttgcctggaaaaccccacgggacggaggaagtcgtggggctgcagtccatggggggtca

SEQ ID NO: 29715 - DNA, 761 bp, Bovine  19866880844024
  misc_feature (1)..(1): n is a, c, g, or t
naacatgggctctaggcatgtgggctcagtagttgtggtgcacgggcttagttgcccggcaacatgtgggatcttcctggatcaggaatcaaacctgggtcccctgcattggcaggtggattcttaatttttggaccaccagggaagtccctagatgtgattttaaaggcaatgaattggaagcagctgtcactaccagaaataagagatgaaaatgctgcttgaggaaaataattcttcctatataatacattttgaggaaagggaaagggggaaataagcagaatcctcaaagaaaaattacttatgaaaatttgattaagcaccttggcaagtgtcaaagccttgaaatctggctgggtagtttgggagtaatatttatttattaagttcacctataaactggttgcacgtgaaaggtagggcacatgaccagctggtccaacttctggaaaacgtcactcactttgaatttccgtgaaagtgaaagtcgcttagttgtgtccgactctttgcaaccccatggactatatacactccatggaattctccaggccagaatactggagtaggtagcctttcccttctgcaggggatcttcccaacctagggactgaacccaggtctcccgcattgcaggcagattctttaccagctgagctatcagggaagcccaactgccttaatcttgtccttcttcttcctgttcattttagacacccaagtccagcttcagacccaactgtatattcactgttttt

SEQ ID NO: 29716 - DNA, 919 bp, Bovine  19866880859853
  misc_feature (1)..(1): n is a, c, g, or t
ntctttacttgagtttaaaaacagtgcttcatgcatttacaataagttactacgggtcactgaaatacacagagaaaagctgaacccaacttactaccttagtgtagacctctggggctgggcagtgattagtaccttaacaggactgatccatggaccaaagaaggcagccactgtcagttacagatggatcgctgcgacacagtggaggtagcaaagagtttaagatccacaggggctgtagtacagcccagaaattaagacaagggaagtgaaggctgtaaacacttggggagaaagtcaagaagcacttgcatttccttttatcttttccattagaatgttcccgtaagttattcacttacagaaaaaaaaaaaaaagtgctcaaaggatttgaaaaaacaggaagtggttattccagtcccagtgaggggaacaacagaagcagcaaatccctatttttggtcatatcaaagtgttgagggggcacccaagtacatgcgtggatgtaaaggctccagtataagcagtgctcctcccctcaccagccgggacctgtctggaacaaaaacagctgtgaagattagagcagcgagtaagtcctaggccaaatgaggattccctcctggggcaaaagctcagcctcctaggatctgaacttaaaacaccacagttaagaccagtagagaggctactgccagctccagcgaattctgaggaagttgggatggcacctctcgtgggccaccccactaggagggtttctttcatttccagctcccacgtgggcaccacgctgtgaagcccatggcacgggttcctctgtctcccagacctaacagtgcatgcagacttcgctgacaagtgctgtttggtcccacgctgctgggctggactgcaggacgccgccagccactt

SEQ ID NO: 29717 - DNA, 952 bp, Bovine  19866880888097
  misc_feature (1)..(1): n is a, c, g, or t
nagtcccccgagactgagggcatgtgggacggacatccagcaggtagtggttttcattctctaggctttccagcttgcttcaaagaagaagaaatgcctctgagaatcaaaagtatctgcctgaaaacttcactgttcaggcccccaaatcaataccctagaaggtgaaatcatttgctagagaattagctattccttttgatcaaattaatcagatttctagtttcttatgggttttcttcaagtggtcttacttaattttttttcttttcatgaaactgcttccaaagaatgaaagtggaagttgctgagtcatgtccgactctttgcaaccccatggactatacagtccatggaattctccaggccagaataccggagtaggtagccattcccttctccagtggattttcccaactcagggattaaagccaggtctcccacattgcaggaggattctttgccagctgagccacttgggcagcccaatggatatttgggatagaagaaatcccaaatgggatggtacaagacggggctcaggaagggggcatggggtaacagccagtgcaaactgcactccccgtccccctcacccagcaatagaattctgccaaggtcagcagaccctgcaccacgcgatggagtctggagatttaggcccccagaggctgctccccctacattcctgggcataactggaccacattttctaccctctttgatcatccttcaacacatggtgtgaaataggcagattaaaccagccatggtctctcatcagctcagccaaccaggagaaggtgtgagcctcacaatctccataaaaaacccatacaagaggcacacagccgttgacacaatagtcccactcctggctccctgccagcttttttctctgatgaacacaggtggtccaaacccaaacaggtcccctgctgccatgtataag

SEQ ID NO: 29718 - DNA, 891 bp, Bovine  19866880958401
  misc_feature (1)..(1): n is a, c, g, or t
nctactggaaatgccccagcacagcctccctggtcagcttctcgagcgttccttcccaccatcagagcagcactttcccaggctgcctcccagcattgtgcaaggcccagaggagaagcaggaagtgaaactgggtgaaacagaaagctgcatgaacctgccaggttcccacaacatcgcaggatactttgcttcctggcagagtcatgtcttctgggtcactggaacccacctagaccaggaatccccctgaaggattttatctgtactggatttggggggcaaaaagtctccttaggctccaagccagagactgaaggcagcagctccccaaagggtggaaaatccctaagaagagaaagtctgaggcaggaggccaagtgatgggggagggttgagagaaggggccagagttgggagaacagctatggccagagtaggagacattggtgaaagaagtctgcataaggctgctgagttcaggatggtgttccaggcccaatattggtctcttagcctggaggtactgtttgtgggagtgcttaactcctgcttagcacatgagtgagtgaaagtcactcagtcatgtcctactgtttgcgaccccatggactctgcagtccatggaattctccaggccagaatactggagtgggtagccattcccttctccaggaagattttaccatcccaggaaaggaaccaggtctcccgcattgcaggcggattctttaccagcccaagaagcccaagaatactggagtgggtagcctgtcccttctccagcagatcttcccgacccaggaaccgaactggggtctcctgcattggaggcagattctttaccaagtgagctatcagggaagccgcttagcacatagtaggtcctca

SEQ ID NO: 29719 - DNA, 848 bp, Bovine  19866881034682
  misc_feature (1)..(1): n is a, c, g, or t
ngagagggctgagaggacggggcgggctgggtgggatctaagtagactctcctgctgaccatgcccaggtacactcccatccatctcaagtcttcataccagactcatccgaacaaatctgccaaggagaggaaagaacccaaaagaaaccctcccccgactcccactccttcccacacatggctatttccacagtggtgatcaaacttaaaaaatcctttttttctccaggtttcaagaccatctccatggctcagtggtctttacctgctgtgttatttttcaggctgaagccacgtcacctataactatttctcactccaccaggaactgttccttattggactttctaactatgatgagtgcttcttcttctgtctgatcactgaagcttttttcttctagtcaaatcagcatttgaatgagaatgaatgggaatttcaggagcagggacaaaggtggcttcacttccttctgagggtggagaaggggagtgtttggcggctgggttggtccttttaaaataggtttcattggtgaactgcctacggagcccctctgggctggcacgaagcagcacagaagtcagaggcaccaggcactccgcaccagggtgatctctgctgggttaatgcactcctttcccaacacagcatcctctactccttccgagagctgtcactgtgctccagtggggtgaaggaggtcactgcccttagagtgaagagggaggtcttgccccagggtggccggcatgagcgcctctagccagaggtggcagccccttgtgacggaagggcctctgcctcctcccacagatgggaagcatgagttctaggaggtgagga

SEQ ID NO: 29720 - DNA, 991 bp, Bovine  19866881035310
  misc_feature (1)..(1): n is a, c, g, or t
ntataacaggcctcctcctctttttttttttccctatgccattcatgtgtagaagaaagtaggtaatttgccctgtagaatgctgaatgactctcttcaatgactccactctttaaaaattgcccctgtctggacatactcctccttcttggtgtaggacatctccctcttgatctttctcatacctgggaagtggagagggatcttgaagtcctgccaccaagtcctcttgattctgcctcctaattggcacccgattctcttcccaacccatggcctccagccttgccccatgttccattcatgacactctcactggagtgatcctttcagaatgcctgcttacttatgctgcttccctgtttaaagtccttcactgcttgacacactgttgggataactttctgattcctttttataaggcccttttgtgacttagcttttccaacatctctagccttgtctattgatattacccctcacattgccttatccagtcataactctttcagcaccttgaacgtgccaagcgctctcacctctaggcgtcatccacgccagcccctctgcctcatctggtgctcctggtccattcttgagtcccagctgaaacgcccttcctgttctttgcggccatggcaccctcacaacactgtctgtcctctgtgccagactgttcaccctagagagaaagggctgtgtttgccttgctactgttgcgtctccagcacctggcacagtgcttggcatgaagtatctgttactacttggcaactgcatgaatgattatgctgatttctcaagtaaggtgggtagttcagagtaagaatatacatgtgataggggctttttatctagaaaacatataataaaactaacagttttaataccatgatagttttgttcattgcttcctaacagctcagaatttgaagtttgaagctaatacttcatttcacgttaaatttggaaactttttatgaatgggtgt

SEQ ID NO: 29721 - DNA, 1143 bp, Bovine  19866881070905
  misc_feature (1)..(1): n is a, c, g, or t
ncccaggaaactcttactggtttcttttgattctttttagaaacatagggcagagaaggagtcatcctgattttagcaagtaccataaatagtaatttttcattatattatgaagaggttaaagttattttaaaagcaatcaacttattgagctttctctgtggttctgatagatttccagtggtctctcttgggttttctaggtagatagaatatcaacagcataggatttttgcaaagtgaaaagagttttggagtgagacctgggattgaatcttggctttgtctgattgaatcaatcaaacaactcagttgctcagtcatgtccgactctttgagaacccatgaaccgcagcacgccaggcctccctgtccatcaccaactcccggagtagcctttaaaaaatgttggcactctgcagtggcagcccataagtacagagggggcctttcctccaggtgcggttggcagagtgggcagaggccacaccctgccaagtgctgctcctctgccctctcctgggtttgttttacctgaatctgcagatacatccggagggctttgatctcaggcatttctaaacactcagccatcaggagagactgaaggggaagtcctaaactaatacaatcatcttttctttctccctgaatggaatgtgtgttatatttgctgagggcagattaaaatagattttactgttgaaatcatggatttatagttctttaaagagttgctgattatcagcaaagtctacaaccccaccccacctgcaacataacagtgggaaaaaaacagtccagcgcggtgggaatgtgtaaatgttttctcacacatgggacctactgccagataggaagatggtggtatttggtgaggagtgatactaagaaacacctatagttagtgaggaaaaaacccacattcttacttactcatagaattttataagtttgaagggatgccccagaacatctctgatccctttttgtactccatggaaaagatgaatggggatgtagcttatctagtttattggaccttcaaggaacctgaatgcactcctttacatctgacaccaccaggaaaagacaggcccgagtgtgtgcctgattgaagtgcatcctccagactgcaggaag

SEQ ID NO: 29722 - DNA, 878 bp, Bovine  19866881088538
  misc_feature (1)..(1): n is a, c, g, or t
ntaaagtctgacactgtttccactgtttccccatctatttcccatgaagtgatgggaccagatgccatgatcttcgttttctgaatgttgagctttaagccaactttttcactctccactttcactttcagcaagaggcttttgagttcctcttcactttctgccataagggtggtgtcatctgcatatctgagattactgatatttctccccacaatcttgattccagcttgtgtttcttccaggccagcatttctcatgatgtactctgcatataagttaaataagcagggtgacaatatacagccttgacggactccttttcctatttggaaccagtctgttgttccatgtccagttctaactgttgcttcctgacctgcatataggtttcatttaataacctttcttaatcaaatgctatcatttgttgaaagaaatatctatctcataggagaaatacgccccccccaaaaaaaaattcccttgtttttccatagtatgcaaataatagtttcttaaaagtgtttagtttgacttcaaaaagtggaaaccataagtcagaccataattaaaaggagattgctagagaatttgagtgtgcatttctcattccaagaaatcatttttacttactctacattctttgtccagtctggaggattactcaaggtcataaatacacagttggtcaagatagtgcacatgataagcatgctgaataaagtagattatagttaaggaacaaatgctagtacaattttgtggcaatttacaaataatccaatgcaaagaaaccaagttacctgtaaaattaattttaccttattttgttttaaaaacaatgacaaagaaaaaaacgaacctccgaagtctat

SEQ ID NO: 29723 - DNA, 1257 bp, Bovine  19866881116739
  misc_feature (1)..(1): n is a, c, g, or t
ntgttatggaagttcagcgttgtatgtctctctctacactgtggtgcacttaaccttgtggattttttatactaaaaatgtagaataaagactattttgaagatttgaataaagtgatgaagttgcattacacctcacttcaaggattctttactcaactttttagatctcttctgtatataacgttttttatatctcacctagaattcagataagtgttgctgtcattgttttgttttttttcttttaatgaagtctttgaaataaatgcaggagtacaaggctaagatttgaccatttttatgagatccattctagatttttagatttttttcattttatttcctaagcactttcagattcttaaaagcctattaggccagaggaattcagaacataaacttagaaataagggaacaattgagtctcctcatttggaggagtctcctcctgcccttaagtttgacttgaggaaaatgtttttttagtttgacaacttgttaagttgtaagttgagtgtgatcttcggtttttccaaaattctgtttggagaaatgctgaaaactggaatataagttgctaagatgaatttctcaactcttaggtcttaccttgggtggacttgagcttgaaaaatgaacacaatatagttaagaccttgaaggaggtttagtttaattccaaagtaaacaatgcatggagagttaatgatttctaccaaaacgctgtaccttttaaatatgcctcattttgagatggatgaaatgagatagaaagggcactggtgggaaaagtcacaggttgttcctggttccctctgtgtgtacacagaatggatcagggacatcctggcccttgccaggatggaggctaaacaactcatctcccagggtctatttctaatgatcctcttctaggacaaacttcccaggaccatctctgctgcaaacgtgagattgttctgggaacttctgaaacttccctggggccccctttgcttgggagagaacacaggtaagagttgagtaagcaaaaaatggacatgaacttgagcaaactctgggcgatagaggacagggaagcctggcatgctgcagttcatggggtcacaaagggtcggacatgattgagaggctgaacaaaaacgacagagcaaactgtcacaaaagttccagcaaagataagtcgaagtataaagatggtgatttttttgcacatgagaatctatttctgtatcaataaacaattttattccga

SEQ ID NO: 29724 - DNA, 750 bp, Bovine  19866881154733
  misc_feature (1)..(1): n is a, c, g, or t
nagcaacttaagaagcaacaggaagaagcacaggttggtgatcaactctttgccgtagtccttcctgccagatcatggtgactaaggccccatctgattgccactccagttgatctttttaggcacactgtctaacagaagtcattgatctgattgaaataacccaaataacaactgcagatggtcagtccaattgttacatttgtcttaatggccaaattgtttgtgaatgtgatcttctgttgaatctctcgaccgttcagtgcacaactcctgtgatagctggagagaggaaaaaaaaaatgaccagagcagtttatataatacatcatgtaagcataggtgtttttgttgggggaaacattaggatctccttcagagattgtctgtgttcataacgagtcctgaaaagaagatacaagtaaaatattgaagtaaaatttaaaaaagaaacttgtgattctactaataccctaacatcttacttttttaagaaaaaattatgaaagtatggtgatatttacaggagacttggaaaataccgaacaaaattacatatagttccactgtacattacagttatttttaaatagataaattaagatttttagttagagtttcaatatcaaactttcaaaaattaatagaacaaacagataggaaagtagaaagatacagtagacctggaaagcactatgaactaattcaacataattaaggtttatataattttcactcaacaacaggatg

SEQ ID NO: 29725 - DNA, 1295 bp, Bovine  19866881186480
  misc_feature (1)..(1): n is a, c, g, or t
ncatcggcctcctgctcttcctggtctgttctctatgccatctttggaatgtccaattttgcctatgttaaaaaagaagctggaattgacgacatgttcaactttgagacctttggcaacagcatgatctgcctgttccagattaccacctctgctggctgggacggattgctagcacctattctcaacagtgcaccaccagactgtgaccctgacacaattcaccctggcagctcagttaagggagactgtggaaacccgtctgttgggattttctttttcgtcagttacatcatcatatcatttctggttgtggtgaacatgtacattgctgtcatcctggagaacttcagtgttgctactgaagaaagtgcagagcccctgagtgaggacgactttgagatgttctacgaggtttgggagaagtttgatcctgatgccacccagttcatagagttctccaagctctctgattttgcagctgccctggatcctcctcttctcatagcaaaaccgaacaaagtccagctcattgccatggacctgcccatggtcagtggggacaggatccactgccttgacattttatttgcctttacaaagcgtgttttgggtgagagtggagagatggatgcccttcgaattcagatggaagatcggttcatggcgtcaaatccctccaaagtctcctatgagcccattacaaccactctgaaacgcaaacaagaggaggtgtctgctgctatcattcagcgtaatttcaggtgttatcttttaaagcaaaggttaaagaaggtagtaaatgagtataacaaagaggcgatcaaagggaggattgacttacctataaaagatgacatgattattgacaaattaaatgggaactccaccccagaaaaaacagatggaagttcctctaccacctctcctccttcctatgatagtgtaacaaagccagacaaagaaaaatttgagaaggacaaaccagaaaaagaaagcaaagggaaagaggtcagggaaaatcaaaagtaaaaaaaagaaacaaagaattatctttgtgatcaattgtttacagcctaagaaggtaaagttaatgtgtcaactgaactcccagaggaggtctatgccaaactgactgttttaacaaacactcatggtcagtgcctataacaagacagtgacctctctgtcactacaactctgtgaatcagagtatcaacactgacaagaggttactgttttctttaccagctgacactgctgaggagaaattcaaggctacctagaccataggg

SEQ ID NO: 29726 - DNA, 1857 bp, Bovine  19866881265834
  misc_feature (1)..(1): n is a, c, g, or t
nctttccttttcctttcatgcattagaaaaggaaatggcaacccactccagtgttcttgcctggagaatcccagggacgggggagcctggtgggctgctgtctatggggtcgcacagagtcggacatgactgaagcgatttagcagcagcagcagcagtggaagaaaccagctaatgccaaaatataggattaattaatttggggattgctgtttaaaattcaacaatgatctcagaaaactggggtatatttgattaacctctgtgcagaagaattgtaagacttttaaggctgtgactgtgcagtttctgtgacgtgggaaattgagactcaaaggcattccgaagacatagcaaggaccactgacctgggatagggagactgtcttgatctccctgttctgcagaactttatcccagggagacatctctaagcaaagtattgatgtctctttccatagttctggcaggatttgtatggtttgcaaatatgtccgtatttgttccaaagcctattcatgcactccagaggtggtgataggtgattcagagtcccgttaattatggaatattcagatgtccaggacacaatttagactcctctgccgggcttgatcatttcaattgccttatccttctcctctccccatcattttcttattagagccatgaatgagatacagataatcttgaatttgccatgttttgaaaaaatatcctttctagagcaaggaattacgtctatggaaaccctgagaattataaccactttattgaatggagtcgtacagatagcttccaatgactataggagagctattaggtcaaggctactcagattgctccatcattagtttgcttcctttttttgaagttactatgataaattctgtttgatagaaaagagaaatgttatgttgtttggagaagaaatttccttatatttccttacataatttccttttccttacataatttcatctttttttgtgtgttgccaggtttttgtttatcctattgggtccagtagggaaaggtcagcagtatcatgagattggcagatccatggccaccatcatgacagatgaggtatgcacaccacttctgcttttcatgtgttcatctcataaatatttattgagtgtttactctgtgccaggcattgtgctagttgttgggggtataataattattgctgagaagcaatgcaggtcatgtttttgaggatcaaggcctcttggatttttcttcctctgtcatctctcccttttggaataatcaaggatgcagagaaatctttttctgggaaaactattgccaagtaggataccaagtgggaaagatattaaggctgacttaactttctagagaaaatagttaatgaagtatacccaagctatttacataaagaaacctcactcccatttcacgtaaatgagctgtaaatgagaccagcttgtcagggggatgctcttgggcattgtcatgtgaatgtgctagggttactagacatttcggctgcccctgctgcatccctggtgaggactgtgctgctcaggttagttgcagagtagggccttgaaaagacatatgtcttagaggcaaagggagatggggctgtgttttatcagctgtctttggttggaagacatatttcatggaggacctttattagtaattccatccgttttttctacccatcatgatcaggaaaattcctcatgcatcttggcttttgttccattctttgaggagataacagaattacaaaactttagagtcatgtcttatctctttctacactgatagacatatatttagtttttttttactcatctttagattcattttaaaact

SEQ ID NO: 29727 - DNA, 1330 bp, Bovine  19866881328157
  misc_feature (1)..(1): n is a, c, g, or t
ntgctgactggaataagtaaagatatgaccttgtctcaagagagcagatgtccgtgctagtgactcaggggcctgctttctgcacttggagagctgtgtgcatagacttgggagtggtctgtctcaggactggagcgctgattcctcttctcccttgggcagaatcctaatgcacctggctacctgctggtgagcaggggctttggggccgacgtggtgggctcccccaaggaaacccctttgaaaccaatggatgcattcacgggctcgggtctcaagaggaagtttgatgatgtggatgtgggctcatcagtttccaactccgatgatgagatctccagcagtgacagtgccgacagctgcgacagcctcaatcctcctacagctgccagcttcacacgtgagtgagccactccctcccagcctgcacccaagtcccccaggcattggagccctttgcagctctcaccacagcttctgtccagcttggggttttgtccttagttgtaatctctcccactcttagctccatcgtgctctttggaggacctcattgctctaatatcatagacttaagtgggatttattctagctgattttacttgggctgtggtttttgggtccccagaatgggtcgaattaaactgaagaaggaggagtccaggagtttaccctttcccaccagaatcccatatagttccacaaaattgtagctctagcaagaagtaaatgcttactgcctgataaggcaactggggcatctcaaggcttcttaattcttacagctcagttagtttcttggaaggaacttctgaattctgtaaatcagggcttatctgtggggtaaatctggcccactgcccatttttgtaaataaagttttattggaacacagccacaatacccagtgtctacagtggctttcatgctataacagcagagttgagtagttacaacagagaccttgtggcccacaaaacctaaaatatttattacctggacctttacagaagaagtttgccatttactgctatagatcagcactgtccagggaggattccctgctgatctggtggttaggatttggcactttgattgctgtgacccagactcaatccctggtcaggaaactgacctacaacccgtgtaggccaaacatactacataacctgtgtggtatggccaaaacaaaacaatgcggtccaaaagaattttctgctatgacagagtgttctgtatctgtattgtccagtatggtaggcattagccatatgtggctattgagtgcttaaagtgtattagtgtttacctgaggacctaattttaagtt

SEQ ID NO: 29728 - DNA, 1369 bp, Bovine  19866881337310
  misc_feature (1)..(1): n is a, c, g, or t
nttgtacataggttttccctagataataatatttttctctaaggacctgtcactaaccttctcctcaggaacggcgatcttctcatcaaagtaggtggtaaagggctcctctgtgtatacctcgggggactgtggaattgaggagttactgcgggcagggttgatggcaccaagactgacagagaccccatggtctccagaagcactttctgaattaacagatttgagaagaaatgagttaaaattaacagaatacactggtattagtaatcatcatagaaatactgaaattaaacctttttaatacctaaatgcacaagattaacctgactctatatcaatttttggttcagatcagttcaatcgctcagtcgtgtccaactctttgcaaccccatgaaccgcagcacgccaggcctccctgtccatcaccatctcccagagtccacccaaacccatgtccatcatatcggtgattccacccaaccgtctcatcctctgtcgtccccttctcctcctgccctcaatctttcccagcatcagggtcttttccaatgagtcagctctctgcatcaggtggccaaagtattggagattcagcttcaacatcggtccctccaatgaacacccaggactgatctcctttatgatggactggctggatctccttgcagttcaagggactctcaagagtcttctccaacaccacagttccaaagcatcaattcttcagtgctcagctttctttatagtccaactctcacatccatacatgaccactggaaaaaccatagccttgactagacagacctttgtcggcaaagtaatgtctctgttactttatttttatttatatttctaataaattaatttttgaataggcaacacattcacatggctgaaaatttgagaaatacaaaattgcttatggtgataaagctccctctctaccctcttccccggtcactaagctctacgtgagttttcaacactaagctcacaaatggtctccccctactttcacgcttcttttgtactgcactgtgaaagacactcagtcatgtctgactctttgtgaccccatggacgatagagtccatggaatttttcaggccagaatactggagtgggtagctgttcccttctccaggggatcttccctacccagggatcaaacccaggtctcctgcattgcaggcagattctttaccagatgagccactggggaagccctcacgcttctactgccacttgccaatttttagaataattttcttctaaaatcactgatgtctagggcttaatatagaacatccctagactagccgcactgataaagtgaaagtgaaagtgaagtctttcagtcgtgt

SEQ ID NO: 29729 - DNA, 1130 bp, Bovine  19866881361556
  misc_feature (1)..(1): n is a, c, g, or t
nattttacttattcctagagatttggcctttttcctccctttatttgctgcatttggtgcatgatgttctgactgacactgctttgcatatatgtatgtcaggtgcaaaatggagcccaacttcgtctagttgtgggcctcttcctttcttcggtcttataaagctcttggtctttacaagagaattagcattttggccattcctccatagtgaaatgtttggtttatttctaccagtttgtccctgttgctctgtttctctgcagttctgtgactacgggaaccttttatttcagcgagcagccttgtaaaggacgttttagacatcagttaagctcatctgcagtgatgccagtagaagagctatggccaagttcacacatgggaagcagtgacacagctgctgccgggccaacagtgactataagaagattctcgatttcagagatgttagaatgtgaaaaaaaaagtgcatcttagaactgatgaatcagtatgttgaaggaaaaggcagagtcagaaaattactatttacagaattagaggaagtcttacatacttgcataatttgggctgaaaataagaagtgatgtatttcaaggacctagaataaaatcagggaaaaggttaaaagaaaatagcacagtttgcctaaaataagtatactatgtttgatggaggctggtattcattaacttgatctagacaagcacagttggtctccctctcccattgggaggcaaggtgatgtgacaacttagagtgctgaagggttgataaatgttcagcaactggctttctagaaaaatgtgcatatatatgtttattagaaattttactaatagaaaggataggtagcacacagcttacaaatattattaaatataccactctttgttgtaaatgaccatatagcaggaagtgaagaggaactaaagtgattcttgatgagggtgaaagaggagagttaaaaagctggttaaaagctcaacattcaaaaaataagatcatggcatcagtcccatcacttcatggcaaataaatggggggaaaaatgaaaatagtgatagactttatcttcttgggctccaaaatcactgtggactgtgactgcggacatgaaattaaaa

SEQ ID NO: 29730 - DNA, 809 bp, Bovine  19866881365317
  misc_feature (1)..(1): n is a, c, g, or t
nccacaaagaaatggaatcgttggtccttaataaactttctgtaagttgccattcaaggagccagagacttagcgttctctgtggtgaagtgggagccatgctccttttctagcaggtgctttctcctctcttggccttttagaaggaaacggtctggcatgaggaaaacttcagagtattggggggatgggggtttctaggagaccaaggacaggattcaaggtcttgattttccacttatgcatgtttgaccttggacggtctcttaacctctcttaacctgacaagctttgttttctacatgttcagagtgaggatgttaatcctctctgatgctgtaatcgttaagataccacattgtaatagacctttgtaaactacaaatggaaaagatctggccatgtaaatgagaaaaggaacaaagagcgcttagccccatgcctggcatgcagcgagcactcagtcagttgtagctcctggtgctgccactatgggcatcacagtgctgtcaccagcatcgccagaggggcccttcagaggtgagcagaagtgtgcaggcagggctggccccttgccagcaccccagcccagccctcagctctgactcacgggccaccttgcctgtcgaattccaaccatctggttcctagtgctgtgagagctatgagacgagccccctcagacttcatcttttcccttccgctgggtggcgggcatcacagactgaggtatatgtcttatttatatatgtctgacactgactgtgctaagcattgatttcagatgtgatccctctgagattaatata

SEQ ID NO: 29731 - DNA, 1299 bp, Bovine  19866881410064
  misc_feature (1)..(1): n is a, c, g, or t
ntcttggtgccctcaaccctgcctacagtaattcctcaattcctcagtcctccgggggcctctcagaggagcacttcaccacctatctggatgagaataatgctgttcttgaggagaaggttagtgacaggtccttggaggaaaacattattatctggggaaaacctatgaattcagagtctgctggacaactcaaaatcaacaacctcagagtcagttctggcaggcaatctctgaagactgaatttttgtagtcagaataaatggaaactgttaaggaaactaaggtccttgaaaaacacttgccaggttgtactagtgagtattttttgatccagaaacgagaatttcaggttccctttttacggtgccttttgtccaatttggatagtactgatattcttgctggggttttagaatgaaaggctgttggaaagggcaagtaagagaagggttggactcttatttggacagagttgattgtcttattgataagctgtggaatagatggcaattaaacttggacacacccatgtccaactttggaaatcctttgtttatgaaactgatactgttgctttttatgtgataaaataataaattagatcagcagtttggaggtgggtgataatttttttatttctccaagagacactttattattattattttttaacgttttattctgtactggactatagtcaattatcaatgtgacagtttcaggtggcagcaaagggagtcagccatacatatgcatgtgtatccattctctcccgaaggtgacattcattttgctctgttttcctctctcgtacagcactcttgttttagctttcgtaaactctgggtcttcacgggaccaggacttcttatgagcgttgtggatccaggaaacattgaatgtgatttgcagtctggagcactggctggatttaaggtgaacatggagtcctccctctttcctttttaaacacacacagcgcaccacagccttttcctctgctctgcctgctgggtatcagcccttggtggctacatgctgatacttcattggccctgacgcttaggtgaaaagtacttttccatctgtttttaaactttattttgtcatgtagttggtttttaattttattttacccaggtagtttccttgaacaaaagtgaaacagcaaatgggaaaaaataagactcagaaaggtgcaagatgacctagcaagttctgtgcagaatgtgatagagaactcagtcattggatccctgaacggggcgtctttgctgagtgtactgtttcccatt

SEQ ID NO: 29732 - DNA, 684 bp, Bovine  19866881469074
  misc_feature (1)..(1): n is a, c, g, or t
naactctgtatacagagtctctgtatacatcttaatagttcctaacagactcagtctaataaactgatttggctgctactgattctgaatcattataggaaagttacagtctattcactcaattctatttagactggttgggaagtttttaaaaaatttttttatataaaactgtaattttattttttatatttatttattggctgtgccaagaggcatgtgggatcttagttccccaattaggcattgaacccatcccccctgcactggacatgcagaatcttaaccactggaccaccagggaagtacttggcaatgagtacttttaaatagactgtgaatgaaaatgaattaaatggaataaaaatctgatgcttcataataataatagctaacatttactgagtatttgtcatatactaggaaccgtgctgaaagtttaactcatacatgcatagcagggcttagcttcaattatctgaaagtattcaattatataaaatatttcaatactcaaagatactggtcgaggtattattgtgttattacagttctacagtatccagtcaaggcttgtacttacctacagggacaaatgggggagtctctagattttctgatcagtcgggataactggccttcgtcttcatctgctgaccactggttatctgaagacattcttct

SEQ ID NO: 29733 - DNA, 1332 bp, Bovine  19866881491755
  misc_feature (1)..(1): n is a, c, g, or t
ngggatgtgagtgaaaaagcggtcccccgccctctcctatgtgcacgtccagtttcagaagaaccgaaccaactgagacagaaggtcaattaatgaaaaattagaaaagtggaaaactagaaacacgttgtaacaaactgacaggaggcactggtttttgacaaagttattttacattattaaacttataaaatgaggaggctgaactagatgatgtctaaggccaccatattctaattttctatgattctaggttgactccaatttgcaagaaaagacagacatgagaacttgaaggtaaactgaactttaggagaccatatgtacttttttaatgcaataggtatgtaccctatttaaaagcacataatcaatcctataatttggatttttgtttataggactttcttacaagagagcatatccactgaacaaaaaggatacacataacagtcactggttttcaggaacaggagaaagagtagaagctaactctgaaggccttctttcaacttaatccatagattttcttgctgccaacttaagacagctcttagaaatatacaaggccgtttaaaattcaacaaattgctataagcaaacatggcccattctttttaactttgcataatatttcataaaacaaaaaaatcaagagtcatttaaccactcactatacagaaaataaataatttttaaaaattcaacaagttattattaagaattggagagtatagtttgtagtgaagacagaaagactaggagcaacagagaaaaagtccttggtttgattcactaaagaaagtgtggaaggggagaaatgaactgaaaatttaccctgttaaaacttaagattctacagtatgaaagaagggaaaacaaataacaaaattaagactttaattgactttaaaaaataacagaaagaaaaccaagaacaaaggcattcacgtcagttcaagttcctaaaaataacttgtttgtttttgcttgtacatatactgttataaatagcttccctcatagctcagtcagtaaagaacctgcctgcaatgcaggagacctgggttcaattcctgggtcagtaagatcccctggagaaggaaatggctacccattccaggattcttgcctgaagaattccatggacagaggagcctagcaggctacatacagtccatggggtcacaagagttggacacgatttagtgactaaaccaccaccaccatactgtgtaaagaaactctggaagatactactaacagtgcttacctgttcagggaggcaggacatgcacagatgagagatgggtataaacgggagacttttta

SEQ ID NO: 29734 - DNA, 2125 bp, Bovine  19866881511791
  misc_feature (1)..(1): n is a, c, g, or t
nagaattaactcctgccctttactccctgatccccttctttttttttttttcctgatccccttctatctaaggcacttgtatatccatttacctctggattcaattatctattaactttcatgggttctgtgggtaacatcatacagacacactgcaggtgtgagacagaaagtacaatcttgtcagacctcattctcactcaaactaatcagctttggtgaaaggaactgtggtaggagataactgttaggaaacatacaatttatgctttctgtaagatactcaaaaatatattcgtgaattaagtagacttctgggactgtgtatacatatcatctgaaataatacctacagaacaagttctgaggaattaaacttcaatggtctattagctagattgaggggagccattagaaagctctgtgaaacacatcattggttataataggatagagcttaatataataggataaagctgaagaaatttctctgcttatacaaatctttagaagtatattgagacaaatattttaatatgtgataattgacattgcaccatgattaatgttataaaaataataaaagtataaaaatgtaattgtattattatataataaatcatactataaaaaatgtaagcctaaactgtacaataaaactacagtatataaacatatagttcatggtgaaatctaatggtcaataccattaatttatagctagatttatttctctacagcagaatttattcttttttattttatagaaattgagaattatggaactatcccaagttctcaatattagagctgctagaaagctcagatccaagggaaatttatgaaaatacaacataataaaaattcacactgttgcaactttctgtatatttgagtggttttgaaataattaaaatgaaagcaacatttcattgccaaaaaagaacaatgctcttagccttatttcaacctattagcaactacagaggtattcttacttgcatattcttcttcatcgagggtgttcaatatgttttccattgtttcattatttgcaagcgaactctgcacgcatttatgcttcaggttgcccataaagagctgcagcccaatcagggcaaacacgctcagacagaacacagtcaggatcatgacatctgagagctttttcacagactggatcagggcccccacaatggtcttcaggcctgaatacagcgaagaaaaggtgttcaaaatgaaataaagtttctaaatgaaaaacaaaagcaaaatacaagctttcctagaagtgcatgcactttatcaaatcaacgatcttaaataacctagttcaaaaaaagtctaccagctcaaaagggggatctgctgttttatatattttgtttatgtatattgcagcaagtgactaaaaactttaaagtatttccagagaataaccagtcaaaatgaataatttggttgctcaaatcatagccacactcacttgaaaaaataacttgtgtcagttcagtacatgtctgtcagacaaaccatctctttgtaatgaccaaaacagaggctgaattacaggatacagtgacaactgttttcagtaaagaaatggtttgttgaggaaagaaaaaagcattgtgtcatgcaatcctccccatgctaatatttttatatctcttttcttcactctaagaaaagcagtaaaacaaattgaaatttttattcctggataagcaaaatggaaaataaactgttaaacaggaggaaaaatttcaagttgagatgtgaaccaaatggccatcttcatcctctaagactcatgcaattgattaaactcaaaggctgacttttcataacaattatgaaagacatgagatcaaatttaattaaaattatgttaagattaagtttttattgttttttccttcaaaagatcaaagtcagccctggtgtttaaccccactctcacctggaatgactgaaattgttttcaaagctcggagaactctgaaggttctcaacgctgagacattgcccaggtccacaaactctgtcacatatctgaaataggggagtttatacacaaacacgggacaacacacacccacacacacacacacacaaagaacaa

SEQ ID NO: 29735 - DNA, 1025 bp, Bovine  19866881577545
  misc_feature (1)..(1): n is a, c, g, or t
nacagcctcttttattcccatgccttagacttcgtggtgctaacttggaagtgaggacccaaagacagggggtctctggccctaatggctacccctttttgggtaggccagatattaatggcagtccagtaggggactgactcttcatgataggaaatctgattttggcctttggcctcaccacagggtaaatagtttatggaaaggataactttaattgtgtttttaaaattctttaaaaaaaaaaaaaaactgaaatacaccaccatgcagaaaaattcttaaaatataaatgcttttatatatatataaaatataaatgcttagtttaatgattattataaagcaaataaacacccatgacaagagagagcattagtagcacttcagaggtattaattttatttttaaataaggactttttcagttgattaaagaaataggcttgtttaaattcacttgcatatcttcaccagcattactaatacttcttactaaataggcctttcactgggctggattagcaaggtctcccctatgaggaagcacactgggaatcaacccacaaaccaaaacatcctgagaggagaaatgaccttaagtaaggacattctttctgtttgtttctcaagggctgccttaagtaattcttgcaaagtaaaatctcttttctttgcttaatgctacaaatggatttcttaaattttttctttttggttctcgttttctacctcattgatcatttttgggactcatggaaactggtttctcatttccttctctctttattttagaggatgaaggaaaactagttccctattagtaaagttctggtttcatccattgtagactttacagtgtccagggacacagggccatgagatatgtgtttcccattttcaaggtactgttgtacaagctggccctggtgtgagctgtcgtgagttacgtggggccctgaacagtggtattcatggaacttttcacctgacttccccagagggtcctccacaatccagatcacc

SEQ ID NO: 29736 - DNA, 1058 bp, Bovine  19866881593963
  misc_feature (1)..(1): n is a, c, g, or t
nctctagaagaccgagcggcctccaggtccccctcctggataaacgagtgtggagagtaaaaatcaattgtttctcatccagctatgggctcagtggtcctgaaaattctcccggggcttctgggatgatgggtaggcatatttgttctcaagactcacagctccaaagaaggtgggcttcaggtcagggacaaacatctccgggtaaacgttgtccaggaaccaggaaaagttgtgacagtttagtcgctccctcagctgcagtcgttccgaaatgtcgccaaaggatttctgtcaattaaggcagcccccaaaaggtcagtttcactagtcttggccttcctgcatgggcagatgtagcctaggggttctgggactactttctcccagaatgcgtctcatgctcattcccagtcagttggggtccctggctcagctccacatctaatcccaaaccccttgccttggctttgggatccccacccatagcactccccatctcctgtgaactctcagttttcctccagtcttcaattcctagtttctcagagcaaagtcattcttccaataagaggttcttcttccaaatctcgtctccctccccttctaaaagatgctagggctctccaggcagggacaacaaagcctgcccttcctcattctctagcctccaaaatagagcctgggctctagctcccaaggcctgaggggtaaaggcaccaggtggaggagctgagtgggcctccatcatcatgaagccctggatcagggtctgcaattatgcccttctcttcatctgaacatctcctgagcatcccccctctcacctctcgggccatctgtgctgcctgcagatttctcctgtagaaaatctccttgtagccatccatccagacctcagccaggcgcacttggttgcgagcaatgacattgatgcccttggggaaggtgtgggggctcttggtacggaacacgtgtccgaccacagagcaggggataatctctagctggccgccgcactgccacacctgccgtaagatgagacgggatgggggttt

SEQ ID NO: 29737 - DNA, 696 bp, Bovine  19866881643214
  misc_feature (1)..(1): n is a, c, g, or t
ncaaaaaggcaccaaaagaggaaggcttatttctcagttggcagggtgacagcaccttgcactgtttggattcgggtggagtattgcccaagcaggtaacagcaggggttgagaaatttcagatgaattagctgatagtcatctatcattgtacctggttgttattttagcagtgttacaacaggggaccagagagcatgggcagaggggtaggggatgaggaggaaagctttgctatcagacagaggctgccagtccttatgggactgggctgagaacaacaaggtgcaataagaggaatcagaatagaaagaaaagcatttcttttcccagggtcatgccaaattctgttccgtccccatttccaggcctaccgtcccagtttccagccccttctcagctgctttctcagcgactccaaggccacggtccccacctggcccacacccctatccagcactctccctgtctgtggcctctgcttttcagtgagtctgtgggtgacaattccccttctttgcacctggtgattctccctattaaatcaacagcccagaaagccgccccaagtgctacaggtaagccaggccaaatgagaatagccaatgttaacatggtctgcgatggcatgttgttgggggtggggccagtattaatatgatgaggcagcttaatgtgagtccccttcgcacaggg

SEQ ID NO: 29738 - DNA, 1008 bp, Bovine  19866881806567
  misc_feature (1)..(1): n is a, c, g, or t
nagtcttctcctacaccacagttcaaaagcatcaattcttcggcactcagccttcttcacagtccaactctcacatccatacatgaccactggaaaaaccatagtgttttggaggtgactaaagatgattcttttttctttttcttacagcagaaaccaatgatagctatcatatcatactgaagtagatgtggctgctgcttcgttcacctatgggaaattctcctcttggaggggatcacaaatggagatttgaacggctgtagcaacctgacctgtctaagttggggagtcagaggcataggcagaaccccagccatctatgttggggcacacatggatttctgcctgacatgcatttctgcaactgtttcttagttaacatttctggattctattgttgttgaatatcaatagaaactccacatcatttagggtgtgtgtgtagggcataatgatgatgagaattgtgtgatgtttaatggaaagatgttaaattttgtggtatgcagcccatgtaattttttttctaacataaaagcaaacatctatattccataagactagatcctcaatcttttttgcctgtgaaaactttatcaaagaagagaaatgtggagaaagaacaaaattcttcttttaattcccccctaattcaatgacgaatagtaattttggctaacatttattgcacatttagttgtgccaggcagtgtgataagttctttaaatggattatcttgtttaaatcctcttaataaccccatatgaagtaggtaatgatgatccctaattgaaggtaaggaaatggagacacagagcggctgaagagcttgctgagtaacaggcagctggtagatagtgacatgaagcgcagacccaggcgggctggctcgtgttcactgctgtgactgccccctcacagtcctctgtgcgtgccatcatttcttactgtggctcccctggtgaatcacactctaacagtgagcaagaattgacagagtaaca

SEQ ID NO: 29739 - DNA, 947 bp, Bovine  19866881811542
  misc_feature (1)..(1): n is a, c, g, or t
nggtgggggtggggtgggggcggccgactgggtgggacaggaaaagaggagagaaaccgccctctgcaggttccctctgcccgccgggccgcctcttgctcccccgggaggaaaggctgcttttccttctccgtttgtcactttactctccatccggagccgcttcctcccccgcctcgaggcttctgagggcacggaatctgatgagccccgggttagtgcgatccatccgctttccccgccaccgacattatttgaattttcagcaaatgaaaagttacatttcacttgagtttgcatgtcatttacgtaaataggtctgtgtgcagaagcttggaaccttaagctaacgtagtgggcacacctcgggccggggagcatgggggtgcggtggggagaggaaagatgcccgaattcttctgaagagatgtggtacagaggttaagagactcgtggacttgggactcaaacagtcccagctccgctgcttcttagccatgtgactttgggcagattagttaacatgtctaaaatctgatccctcatccctgaaatgggggactgaaaaatcatgccgtttcagtgtggttctagcacctgggaaacacctccatttgagactaattaatgccagactttagttacctcttgactcacttctttgtggcaggaaatgttcccaattagtgagctcgatgagtaaggctgtaatgtcagtgttaacacaggctctggaatctgccctgccgtttgatcttggacagttctgtttcatttctcttatctgggagcagtacctgtctcatagaattactgtggggatgggaacgagttcatatatttaaagcattagaagcttacctggcacaatagtgagtgctcagtacatgtcatcttggcttcttacttactagttagaactcttacgctgctcgtcttccctctaa

SEQ ID NO: 29740 - DNA, 907 bp, Bovine  19866881869988
  misc_feature (1)..(1): n is a, c, g, or t
ncccacatacgggaaggcaaaggcccaaccactggatcatcagggaagtcccctagagtatattcttattggcaaaaaactataactgtgacttatcaaagtttagttcttagccattttattaataaatccatttgacagaaaatccagctcattctctaggtacctttctgaagcttgttgatggcagcctaccccttaagcaggccttgtctttttttttttctttttgtaagacatcgataccaccaagtctttactgtcatttttcctttggtctctttcctcctctggcctcttttaaatatgatgccgtgttttctgctcacttcccccagtgtactccgcaaggcatctgtccctttatgttcttgtgatctcaaaacttctcttccagaactaaattggaaagctctgctctcctcactaactagggcagcagatgctatctctgctccagctcttagcctctgtctctgtctctgctgtatgattaacttctgaccacagcatttctgcaagatagctctgactgatgtcacgttatttatccttaatgttctagttttataggtatatattaatgtctagttttacattctgtattataaatatatatctataaacacagtgcctggcctgtaagagccctctataaatgattttagcagtagcaattataaagaagaaacctaaacccaaggaaagtttgtgtgaagatttagacaccaacttcacagtttaaaataaattattggattcctatttctagaagcacctcctagttgagctggctttgggagatttttgacaataactttaagggataataaagtcaaagatatgggtcagttcttaaagtgtgactttttatcccaagttcttttgctcttgattctacttgcgg

SEQ ID NO: 29741 - DNA, 820 bp, Bovine  19866881894325
  misc_feature (1)..(1): n is a, c, g, or t
nactctacagatccaaaagatgtaaatacccttaagagcatagacactatcacaggtagtgataatatttaggaagtgatgaattttcagtattctcttgttttaaatataatttaagtgtaagtttgcatcacttaagttttgcattactgaagcttgtatctcttaactgcttgacaaacgctcacgaaattcctgaaattttgcctatcggctcttgcaaggctgtatgtgtcagtcctagcacacctctgctttggagtcagacaagttcaggttctacttcactttgtgactctctattctcggagctgtgggcagtgcataatacccagcctcctcaagtcaggctgtttctacaatggggctaataacaccttcatcacagagctgagtgagagcaaaatgagatcaagtttatgaagggtcaacacaaagtaggaacataatatcagttgttttattaatgggtgtggctggtcaggaaaattaaagtaaaaatttacccatgacactgtcagttccaggggcccagcacggtgatttgatgtttcgaaacactaaaatgatcatcacacagtattggtttttttctttccctcgtctttctgatctatcttgaacactgcgtattaaaattatcttcctgagacagagctatgcaatgtcatctctctgacttacactggtattaatcacaaatttcaatttgctgtcagagtctacatctcaccaatctcgttttttcattactccacaggaagcggtctgtgccccaaatacaaatctgttgacatcccccagagggtccttagggatc

SEQ ID NO: 29742 - DNA, 1888 bp, Bovine  19866880408157
  misc_feature (1)..(1): n is a, c, g, or t
nttgatgtatggcaaaccatacaatattgtaaagtaattagcctccaattaaaataaataaatttatatttaaaaaaagacaaatgccaaataagcacatgaaaatattatcaaaattatcagacacgaggaaaatgcaaattaaagtcgaatgagatgccagtataaattcattagaacagttaaaagaaatagacactaccaaacgttggatcaaatctgtagtaactggactttttatatattactggtgggattttgaaagcggtctaatatttttctattttttttctgtaacaaattactatacatttggggcttaaaataacacaaatttattatctcacatttttgtaggtcagaagtctgatatggttagcagggctatgttactttcagggggacctaagtgagaatccatttcacttcttatttaggttgttggaagaactcagtttcttgtggtttatgactgaggtcaccatttccttgctgtgaactgagagctattctcagcttctagaagcagattgtagtttttgccttgtgaacctcttcatctcaaatccagcaaaagtagatcaagttcctctcatacttttaatctttcctgcctctatttccaatgccacatttctgacccactctctgccttcctctttcattttcaaggttttatatgactatgtttgaaccactaagataacactaagaaatctctccatctcaatatatttaacctaatcacactgacaaagttatatttgccatataaggttacttattcacaagttctcagggttaggtcctagaagtgaacgggctcttttctatcctaacacaaaaggtacaatcaattcagagattctgttttcttaaaaagttaaatacatatatgccttattacctagaaatcctatttctatgtacataatcaaagaaagagaaacacacgttcaccaaaaaaacaaaacaaaacccacatacaaaaaaggtcacaaaatgttgttcatactagctctaaacttgaaagatcctaaatgtctacaagaatgagaatgaagaaaagaagtgatgtatatgaatttatgaaagggaatatacttctgattaatgacaaaatgtgaatgaaacttcaaaatatatactgagcaaaagagaacacaaaaatatgcatgctatattttcccattaatatcaaattgaagaataggcaaaattggtttatagggaaagaaatcatattactagtctttctaggaggaggattgtctgggaagaggcatgtgaaatgttatgtatcttcatattattcatcaaaattaaattgatgtgtcttcccatcagtcatcgaacctgattaaagaatatatttaggatctgagctatcagtgaatgtaaaagctacctaaaaaaaataagatctttcaaattctcagattctcaaattctgcaaagaatacagtttccttttacttgttgttcctaaaaatgaagtggaaatttataaatgaaataaattttcttggatgtttagaaagcattatctttttaaagcatgatgaccaaattttaatgtccgaacaccattagcaatcggtgagcatttctttagttccatccttttagtagccaaaatgaaaattagtgaatgtttggggggaccaaaaaatattctttttctcaaatgtgagatttagtattaaaagcagttcagatcaagaaattagatttcgggggaggagtcaatatggcataatacgaggattaccaaaatggtctttcctcacaagtacatcaggaatacatctacagacggaacgattctcacagatacctgctgaacactcgtggaaggctttggatagatgaaagggaagaaagatcc

SEQ ID NO: 29743 - DNA, 886 bp, Bovine  19866880348284
  misc_feature (1)..(1): n is a, c, g, or t
ntaaatgggcacttaaacggagtatggactcgctcatttctcctttagctcccaccattgaaaatcagttagaaacagtgggactgagcatagatcagagttgcagaatgcacagagaaattgagacatagccccctgctagaaaagttattaaaagttattctataattgctgtaactgttctatcaagctgaataataccaatttgaaaaatatttgtattttcattagatacatatactaagatacgcaattatattaactgtcattttactcttgtttctgatatggaaaatcttagctaatcaacatagatactgtaagggtattttatatgtaccatatgttttccacatattagccagatgttggtatattaaaagtaaaattgaaaaatccaacctaattttaggcttgttgaatatagtaagttactttttagtcattgaaattttttactttgaaaactcagtagttttattttaatagaaatggtcatttagaatatttggaaaatgtataaaatttcaagtaaaataaacacatgaagtattcataattccagccaatgaacataatcatgtcattatatttccttttatgatgcttttccttttattaaaaaaaagaattaatatgaaaaatggaatcaaatacatccaaaattgtaacctatttttttcaactttcccatcagttgtgcttcagaagcagtacttttatgactgtatagatttcctcttagatatatgctataatttaactattatccaaatcttagaatttatgggtatttctgttttttcactattagaaataatgctgcagtgagcatctttgtctgcattctggccagtttgtaagacaggatagtctatcttgggtt

SEQ ID NO: 29744 - DNA, 1740 bp, Bovine  19866880490717
  misc_feature (1)..(1): n is a, c, g, or t
naatatgtatcacctctactctggtcatcactgaattttataatgaataaccctgattctctctttaccctttcaaaacttgtacaccaggactggtcagtccaccagaataaattctactcactccagatgacaatttaaaagccctgagctaccatgcattgctcaatcaacctctaacaggaagaacaaagaaggctgagaatgtagaggacagagacataaaaaccaagttgccgtcattctccatctactaactgagaagaggccagcaagagtggggcgtgtgtttctacatattcgagagagagttctgggaaaaacaatttttcagtcatctcttacaactggatatttgtgggtgctgcctcctatgaagaagcattttgtaaaaccaaaagaaaaaacaaaaacatttggtatttgaaggtatttttcccatctcacttttctacttttggaggctaacaagaaataattaaccagttaaatgaaagctctttctcgccattccttaaaattagaccatactaaacaacagtgactaagagtgtttaatctaaatttttaaaaatcccactatccagacacagctattttcatagtcacatattacagtctaatccttattcatacacacatttatatgcattcacatgcatagtcacaataattatagctctgtattatgctatttgcattgtgaattagatcataagcatttttcatgtttctaaaatgtttataattatattagttgcaacacaacatcccaaatattactgaaccataaactgttgcctttaaccctaaaattgggcacatgaattctcttttctctcagttttgtcttacaatttcaaagagataacccaacttttgtgcaaataaaagctaaaacaaagccaaatgcataaatttcaaggctcttataaaattgctgcattcagtaactcattaaattgcttataaaatcattcatctgtcaatgatttgccaaatcaagtgagtaaaaagaaatacatcaatttcatttagggattatttacctaggatacaagaataacacacaaacccaacaggaaattagctgaacctgcaccgtagaatgtgtacttttttctttaataagtgaatggaacatggacttggaggagacatcacattctctgcactgtaatttcgccaaagtcttagctttcagtaggtggctgagtacttataggtaagaatccacagatgaaacgctgcaggaggcaactctctgaatgttttaagaaatgtactacattgggcttccttggtggctcagcggtaaagaatccgagtgccaacgcagaagatgtgggtttgatccctcatcccagaggatcccccacactgcagagccactaagcctctgtgccacgactactgagcctgtgctatagaacttaggagccacactactgagctgcaactaccgaagcccgagttccctagagcccgtgctccacaacacgtgaagccaccgcaatgagaagcccacgtgccgcaactagagagtagagcccgctcactacagctaaagaaaagcccacacagcaatgaagatccagcacagccaaaaataagtaaattgttaaaaaattttttaagaatagtgcattaaaatagttcacatttaaatacgtaagggtaatttagaactatacacatagagataaatgttgtatatagagagaacactgttgttggttt

SEQ ID NO: 29745 - DNA, 4455 bp, Bovine  19866880498484
  misc_feature (1)..(1): n is a, c, g, or t
ncatcaaattaaaagacgcttattccttggaaggaaagttatgaccaacctagatagcgtattcaaaagcagagacattactttgccaacaaaggtccatctagtcaaggctttgatttttcctgtggtcatgtatggatgtgagagttggactgtgaagaaggctgagcgccgaagaattgatgcttttgaactgtggcgttggagaagactcttgagagtcccttggactgcaaggagatccaaccagtccattctaaaggagatctaaatcctgtctctatgagtgaggatgcctgggttagaactgcttataaatggaaccaaagcctgttgcttttataactgaaaagtcaagggcgtagttctgaattctagaagtgttcaattctttttaattaaatttacaaatttaatcaggaattgatctttttctcagctcttcttcctcctaattgactttattcacagcagatcttcctttagcagtggcaaatctggcaagcagaagctcaagtactatgttctgtttaataatctcagtgtaaaaagaatacttctttctttctatgtaattgataggtaattgtagcaaaagtgctaagtgtaattcttattacatttacctggagaatatgcttatccctgaactatggccagggatatgagatatgctgattggtcaagccagggccacgtgcctctgtcaggatctaggagatgactctagccctgtgtgacccccatgactgagaataaggagtagtgacatctctagttattttctcaggagactgatgtccactgcaaagtaataaaccaagcatcctagattctagtccagtattcctaacaccacagtactataattcagcacctgggacaatgcacagtatcccagagacaatctggtcctccgttgccagaatgtgattacgatatcctatagctacaggatggagggactccagccctactgacagggaataccggtggcagagctaactggatgagacaacttcattgtcatgaagattagcaagcagagtatttgcatcttttactccattttctaaaatttgaatttacacaattaagcaaagcatcaatgaactttgaacagtaaatagagggaagccacaattcctattcatctgtaattgtttcatgtccataagcacaacgaatatgaagagaaaaagaaaagtaagaaaaatgggagactggagaactatgtaaaagaacagtttcttactcaacacatcactgacaatgtcgacaagcagtcatttctaaatgtcaaaaatgtaagtagaacagctcgcttaggaaagaggaaggcaggattattaagcctaatctgtcaatcaatgcttgcttgattattggtagagaaatactagaggaaaggttttcaaatttaaaaaatatattcagggggcctccctgaccaacgtaggagacctgggttcaatccctgatcagggaactggattccacatgctgcacctaaggatcctgcatgctgcaacaagaataattcagccaaatatatatatatatatatatatatattcatatttgcaataaaattaaaaaccaggactttgagagtattctacttctgtatttctatgaaaatataaaatacattatatttaacaacctgggattctattcttgttttttttaaatctatattttatcatggaaatataaaagctgttactaaatgagttacttcccaccaaaaagaactattagtattactattttttcatatggtaaacatagatagcagtacccttatttcaggcaagaaatactagagaaaagatatagatcatgaaactgtaaactctaccatcaatgaatttaaatctaaatgatttcatagaactgcacggtttctagaataaagaaaagtgaaaatatttcagaggttcgaaggagggatgggggaaagttgcctgaagttaaggtttgatggttttgaaacctgactgcaatcttgaacacttcacacaccaaatgatgtggatgatgaggtccatgtttcttctacttgaatttgagtgggtttgtgattgattcaaccaataaatcaaaagggaagttggacttccctcatagctcagttggtaaagaatctgcctgcaatgcaggagacctgggttctatccctgggttgggaagatctcctgcagaaggaaatggcaacccactccagtattcttgcctggagaatcccatggacagaggagcctggcaggctacaatccatggaatcacaagagttggacacaacttagcaactaaaccaccaaccagcaccaggttggtggcggatggactaaccaataaaagacagcagtcacaaggctgtgtgactttcaggtcataggaattctggggttctcagagcatctatgaaagaccaactacgctgaacctaccttgttgcaaggccacttataggtactccaaacacagtcctagaggggctcagacatccagctgtcctcatcaaggccctgatcatagaactgaaactgtcttaggtcttccaggctactgaaagacctttatgacaccatgtagaacagaagaaagacccaaccaaaccctgcccaatttgtgacccacaaaaccatgaaatataataaaacagtcttcattttaagtcacaaaatttgagggtagtttgttatgcaaacaaaagaacaaaggggaaatcattttagaataagtggtataattacttttcttataaaacaacatgttcttaaaaacaagaacacaataattcttggtaatggttaaggacaaatgatccagcaaaatactatagcaataagctgatatggagtgtttttgctttgctttcaggatatttttggccctaagggacaccttcaactataagaagagtaatttgaaaaggaaatatgggggagagaatacagtacaattccttaatataacatacaattaactgaaacttctacgcgtctaaagttcaagcaatcaaaaagctcaaatagcagataaattgtatcttgttccttgtctctctttttatgaaaaagagatgagaaacaagtaaacagctgatattatcattttattggggaaaaaaaatcaagcagtgtcaggccttctcaccatgacataaattttagaatcctcatattaggtaaaatataccagaaacttatttttgaataactggaaaaacaacaaaatctgaaactatagctataccttccacctccgtagtactacatgttggcaagacgtgtttatctccctcaggacttgcctcctggtctagtagctgggactccacacttccactgcagggggcccaggctccatcccaggttggggaactacgatcctgcatgtcacatggagtggccaaaaggataaataaaatatctttttttaaaagcccattattctgataaaaataaaagagagatgtttatttccctgaagatttatacaattctggggttcaaaaagagccagtaaagataattagaatagtttccagaactatcttaacataggacatttatttttctaatctttttcaatttactcgtttcacagactctccatttgtttagttttcaattcaaacattatgttgaatccactgaaagataatttttatttgttgaacttggcttcttaatatgaaatgcaatactgcacaaatacacatctgaaaccttctaatcttctgcaaatgaaagcatgacaagttatctaaacacaagaatgcataggagaaaaagccaaaaaatattacgtatatattttttttaatcagaaaattgaaaaatacagaacacacagaaaacactatgttttggttaaggatcaaaacaattccactaataaaacaaactgccttccatgcagaagagatgctatagataatggtaccattgagttgattaaaaataatagttacaggcactaaaatcctgattaaaaagcagtcagtatgacaatactataattctcacctccaaaacaatattaaattttactgatagaatgttagttaagaaagctaatacctatcgcattctacatttcagttcagttcagttcagttgttcattcgtgtccaacttttgtggccccatggactgcagcacaccaggcctccctgtctatcactaactcctggagtttacctaaactcatgtccattgagtcggtggtgtcattcaaccatttcatcctctgtcatccccttctcctctcaccttcaatctttcccaaatcagggtctttacaaatgagtcgcttcttcgcatcaggtggtcaaagtatttggagtttcagcttcaacatcagtccttccaatgaacactcaggactgatctcatttaggatggactgattgggatctccttaaagtccaaagtgaaagtg

SEQ ID NO: 29746 - DNA, 2148 bp, Bovine  19866880617445
  misc_feature (1)..(1): n is a, c, g, or t
naaacatagcaagattaatcataagatcatagtgctgagttaaaaacagtaaaagatagtaaaagctagcatacagtatgaacttaagacatgaacaaatgtcctcatgtgctataataaccatacactctatatgtgattcctgtgaaatggtaaaaaacacttaaaagagtctgtcacattttaagcacttaataaatatcaactattattagacaaaaagatggtcacaacatattgtaaaccttctattaaaaacttcatctatgtatcctcctttctcctaaagggctttcttttcctctattaaaaaatgcataaaagagattagaaagttatgtttaaaaatgtttacagtggttacctctgaggagacgtgtatatgtgttttagcttgttctccttgcttggctctatttctacaatggataaacatatgtaactttacaattgtctttagtccttaatgtccctttcagtatgattcatgacacacaaaaaagcagaaatatctcaaaaatgcaccccatcaatggggaaatacttctatcatggtacaagccgatagcagaatattttatagccactttttgtcaatgtgggaaacagcatatacttgttgtatggaaaaaagcaggcactggaattgcacatgtaagagatctgaaaggacacggacaacagtggtcagcagaatgggctctggagctggcccactgtctggtcacatcctgcctgcaggataacatctcctgcaagatggagatgatgacagcgcctctcatgaggctgctgtaaataaatgcaaaatacgcacaacaagcaggaaaaagtatgtataaggtccactaggaaatgtctgccttctatttatggagattaaaccccaataaagttgattcaaaaacacacgcacacacacaaaaggtcacaatattgtgtaacttcatttgtaagaactatccaaaagaggtaaactcttagaaatgggaagcggggctcttgcctggtggcccagtaaccaggacgccaagcttccactgccggtgcctgggttcaaaccctcgtcagggaactaagatcccacaagccaggcagcatgatttagaaaatagaagagcacactggtggttgccaggggctgagataagggagaagggagaggaactgctgacggggctggggctttattgtggttgatgggggtttgggaaccaggcagaggctgtggttgcatgatgtgaatgtactaaatgcaactggactgatcgtttttaaagggttaattttatgtttatataattctgcttatgtgagtttcacctcggtgggggaaaacatgaacacaaaacaacatttgtcaggaatacatgtaaattaataaaagatgaaaatacatagtcataaaggttcaaagggggaaaagaatgattaaggggattaagaataagcgcaagccaaaaaataatgtgacgcagcataactcaaaaacaagccctgctgacagtgtgttccctgaacagactctggcgtggcttaaccttcatcacctggggccaaaacactgtcttggtctgctgccacttcctttttaaaaaagaaatggtattcacctctattcttcattttgccatttgctgttcttacctactggtgtgtatcttggagctctcctcatgttagtacatatcatcttttgtcactgcttcaaagcgctgcagatgtattaatatcaagatccaaacacttttaacttgctttatttgatcatacgtggtattttgcccttgagcatacatagcatgccagttaatgacagtttcataaagaaaagttaaacgtggtatgcaactgcctataccaaacaaaaccctgacatacggttagcttttagagctagcttacatgcatccttcagagacaaatgcctcccacaaatcattaatgctacaaccaaacagccaagggtgcaatgatttccccccacctccacttccacaccctccaaactgaggctgatttgatctgatttcataggggaaggaaaaaaaaaaaaacatcttaactggataggagctcattgtatgattctttgacccaagatggcccttccctaagtccagggactggcccggcctggctgcttgg

SEQ ID NO: 29747 - DNA, 2060 bp, Bovine  19866880623909
  misc_feature (1)..(1): n is a, c, g, or t
ntgatctagaataaaacgcctatagaaaaagaagaaggaaaaaaaagcaaagcaattgcccacagatgggtcatattcaaggcgcattgttgttaaccggctgtagacagtctgtgtcaaaaccagaagacatgttcaaattccatgagcttatatggaatgatttactataacagtatttgcaagatatgcagtgcatggccggaaaagtccagctaaggcagtagttggttcagtcaatatgcaaactttgctgaattcctttgcacatatgccctggactgttcttaattttcagaaccagctttttctatccataaatttaagacctaaaattgtagctacaaagtttgacaccaaattcaaacagggatccatcccattgctttgttttgcctgttacaaattcactttctaccgaaatcatttgtgaagtaactcatttatatagactaacatttcataaatagacataaattagagcatttatattcttgaaaagtatcatgaaattatatcaaacttttgaaagggtcataacatatcagatttttgggaaagccacttgaattttcttcattgctcttcatatccccaggacctagtctgtgaattgtacataaaaggataatgaaaatattgttgaactactgaaagactaactcagatgcattccagcttaaaatcagggaaagattggattgtttttaaggctccatactacattccttcagcctcacagtctcccgtttatttaacagaaacgatgttgtttagtcgctaagtcatgtctgaatctttgtgaccccatggactgtagcatgccaagctaccctgtccttcactatctcccagattttactcaaactcatgcctgttgagttggtgatagcatccaaccatctcatcctctgtcactcttttctcctcttgccctcagtcttctccagcatcaggggccaaagtattggtgcttcagcttcagcataagtccttccaatggatattcagggttgatttctcttaggattgactggtttaatctttttgctattcaagagactctcaatagtcttctccaacaccgcagttctacagcatcaattcttcagtgctcagccttctttatggtccaaatctcacatctatacatgactactgggaaaaccatagctctgactatacagatctttgtcagcaaagcgatgtctctgcttcttaatacactgtctaggtttgtcatagcgtttcttccaaggagcaagcgtcttttaatttcatggctgtagtcaccatctgccatgattttggagcccaagaaaatctgtcaccgtttccattcccccccccctctatttgccatgaagtgatgagtcctgataccatgatcttagttttttgaacactgaaacattagttgcattcatattcttcagtcaagagaagttattgttcttatttattaatagtctgaacacctattgagagaaaaagacatttgatcacacaaaagacaaaggcagttacagttcaaggtctctcctctgtgctttagtagctccattactatactttactgtctgaattttatctgtctcaagaagaatatgagttcctctatattttcagcttctcctagaataccacaatatagaaaacattcaacatagttttgttgaatgaaacaatggatactataggagaggaattaagtagctgattagagaatccaaacgtgactaggctgtctttcatcttcgagcaaggtgttgtgtgcactcagtcgccttcagtcatgtccaactcttggctaccccatgaactgcagcccaccaggctcccctgtccaagttgctgagagaggctaagttcctaccctgtggtaggccctgtactgagttgtgatgtataagactgagtttgcaaccagtgattctatgtcatcatagggcatttgttcggagaaggcaatggcaccccactccagcactcttacctggaaaatcccatggacggagaagcctggtgggctgcagtctatggggtcgcgaagagtcaga

SEQ ID NO: 29748 - DNA, 2159 bp, Bovine  19866880648222
  misc_feature (1)..(1): n is a, c, g, or t
ntcaaggttgcatacttcaaaactgcaatatctgctgatcccaaaataaatccatttctgcatttctgcgggagaaataactggcagtctatctgttttaggtcaacacagtgcaatctgtacccattaggtaggaaatagccaagccctaatgctgaagtcaactgtctttcatactacagtggataaagactactattaaagctattttggagcaaccattcattggacagtgaggtccagagcaccgatccagtgagctcttgataggaactagatcacagcaagaatgggagatgcacagaacaggactgatggattaaattaccttagtagaaacttccagagtcctttctgagtctgttctctttgcctcacctggctgagagatatcaatttctcagtaaggacaattggaagtatatatcagctctccactctttagcattaatattttgtgggcatataattttccttaccacattatggtactcatatagcttcaataagttcctgagttgccttcacacaatactgaaatactccctgttgccaacttgttatagtttgatacctcttctccattattgcaatcaagatttttggttgccatataatcaaagaacagatttctttagaagtcttatttctgaaagagtgaactttgagctacaaagatgatttagtgtgatttaagaggtagtcatttaacaatgatgccccaggtctggaggcctgaggcagtgggtatggtccatcctgacagggagaaatattctatccctgtatcagcattatttaaaattgaccgtgtgtggtcataattaaaaaaaaacacttttagtcaattttatagtttttaaaattgtctttaaactctgaacccccttattgcctgcatctatgatggacattctcagtatatcaccaccgacctgggtattcactttctgtttctcttaccagattgcaacttctttgagggcacgaaagagatgtaaattacctttggataatagagcctaaaatttaatggattcttcgtataggtttgttgaagaaaggaatttcacttattatgatccatttggtgacacacaaccaaacatccagtttacactgatattaacaacactgcagatacactgaatcacaagagaaatttggttcactgacccaacaatgttctcaaatacccactctttttttcctctccactctgctttctggggtgtcacatcactcacacagacaaaaactggcttccagtaactctaaagatgacaaaagtcttcctccatgactggagaaacccaggagtaattctagaaacatctttcataaaggcaaggaggcttgatttccaaatcttgctctccattctcattgttctggcctgggtcacgtgcttacccctgaatcaatggctcctagagccagggaagaagcgagctcctcccagaaactggaaggaaggctggagtgtgtaccaggggaagtgggcatggaggttgagaaggcctgacagtgcctacccaagggataaagtataataggttgtatattgggggatgaatgcaggctttcacctggaacagaggttatgatattgggcaaaatctaaaaataatcagctgcatatgaaccatttctaaacaaatttttattatttacatatttgattatttgtattgctagtattttattttcagggtatttgcatgaaactgatcttatctactccttgttatcattcagagggctagccaggtaagatatttctactccgtacccttcttattctaatttatcatatgggctattcttgtaaagtatttgcaaagtattgaaaaaataataaagctatttattagcatgctatagtaatattgttttacctgccacatttgactttgactaaaaggaagtccaccagagttttattgaagattattttgcatccaagtgacaaaagtaattttcatatattgaggtgtgggaaagacattctggctcatatatgagttatcttgaattttatgctgactaaaacagcctatttgtggactttcaaacatacactgtacatctgccttaattattaaagaaaaggatgcactgaccagaagtaaagaaaatccatattaaaaataaagatt

SEQ ID NO: 29749 - DNA, 1620 bp, Bovine  19866880666576
  misc_feature (1)..(1): n is a, c, g, or t
natttattttgggtaaactctgcttcattagagtttaatatgctatatgttatgtatttcagaaactccaggaaggaacttaatgacatacgatttgagtttactccaggaagaggtaagtttcaattgaaattattattttattgctacagagagcatttcagaaattgattataagcatgtggttataatttggtattcaaaaatgcattctctaacaatagaggagggaaggaaggaaggaagaaaggaaggatttgtagtaattgcagagaatccaaaccaaacctactactgattgtatgaattctaatgacacgtgctgcacagaatacccacacttataaatcaaatctattagctcaagcgtgaaaagaagtgctggcatggtgatgcagggcctaaaggacattatgatgggtgtgatgagatgcgcatagcagtcctaattatggttgagcaacaaaccatgacatcagaccaaaaggtagcatacttggcctctctgttgtccgttctgattatacaaagcctgtgttgagcagtgtctgggctgctgcttgctacaggcaccactaggaggcttggtaggaacaatgccagtctggcagaagaatgtaattttagtattttgagtagttactaaaatagcgtcagggctagactggttgctcttttagtgctgggatgcatggaagtcatcgaaccatgtcctgtttctaggtgtctctagcacctggcaagcacctggtacgcaggagaatcccaagtcattttggttaactaatggattcaggctttagagatcacaacactagttgttaaacaaaattgctatttccactctttagttcataaccagaacagtctaaagaagtgaaaatcaggtgctaatgctatgactgtactgtccttgacctctggtttcagacttttacatgaaaatagccttgatatttcattaatctcatacatttgaacatataacacgctgtaattattttatgtattagaacgccatgtcaaatttgacttgattaaataagttgaaattctatgtgctaaaattttgaaaacctgcaactttcctgacttgatagctggtcagtcagttaatggcttgatctccttgctgttaccacctgtaagaggacacaaactcaaatgcttacaggagccaaagtgaattgtgggaaccagagagttctaagtacattccagttcagttttgaacgaaccctgcccaccaaacaaaatatgttcctgggccataggtggttatggactcagtggccctgatctctagtctcctgtaagcacaaagatttcaagatttccagaggacctccctggtggtcccggtggttaagactctgtgcttccagtgcagaagacacaagttcagtccctggttgaggaactaagatccctgcatgctgtgctgtgtagtcaaaataataatcatcatcatcatgatttctaatgtatttgaattcaacatatctttttacaaaaaaacatagtaggtttcctaactgatctttctttctgggggcaatctttgacagcttagagtcagtctgtgaaattgaactgttgccggttgctgttatctaaaag

SEQ ID NO: 29750 - DNA, 1667 bp, Bovine  19866880668408
  misc_feature (1)..(1): n is a, c, g, or t
ncttgggggtcttcccaacccagagattggccccacatctccggcatctcctgcattgacaggtgtattctttaccaatgagccacctaggaagccacactgtccactaaacttcttattaaaaattctctgcatcatctttcattttttccagtcttatggcttgattccactattaaaagtgtttgcaaatagtgaatagatttgatgggtattcataagtgattatttgtagaaaattcaagggcacatgttcttcaagtcaaggtctgtagagtttctggttgccttgaagtttcccttcacttgactatcacccaggctactattggttcctcaacacttgcaaaaaatgaaaaagcttactattgagtctttattgcattacactctttaaaacttccaatagctgatgcattttatgtgataatgtcaaaaatagtagcttggcactaaaaactctttcaagtcaacgtgatctccagcctacatttccagcatcatcacctactgcttcctgacgcagattgtatgatttggccaaagcagttcatttacttttctcctaatgtaacttatttcacttcgaagaaattcatggcaaccaaaacacaccccccccccaaccatttattttcttcaaaagcccattcaatcttcataatatcatcactcatcaatgtcatcattgctccagagtacttttttaaatctgaattccaattttaaaaatcatataagctctctcttgccatattcctgggtgcctgtttgcttggtaacacttataaaattgtgttaaattgtttagtgcactttgtttattttgttcatagcttctatttatgaaacagatctatgtattgtcctaaattccagggatccttttcatagtttaaattcatctttctagcttatctttaaagccttgaagtcagggtactctgcctatattcaatgttcaataaatgcacattggtgggttgatgaaaaagaacagatttagcaataccaccaagcagaagaagtgctgtgtcatcaccaggaactttctggctccgtggattaatatgctgtgggtacaattccataacagattaattgctacccatcatgaagaagttaaaatactctctgtatttagaagctgtactagaatcataatgaagtttcctaattttgtgccaagcctgtagatggagtatctacagttatttagctggccttatttatttagtgatacttgtttcctggagactgttcagatcactgaattggaatggatacaattctagcctatagtccatatcctactatgttataagttgcttagaactagatattatatcctattatacattaaccatggaaataagcactagccagtcagttttcattgatagctggctaattaactaaaggaaggtacatctatgcaatgtaatgcatacagccataaaaaaagaatgtatgtttctctatgtatgtttctctatgcactaaaacaaagagatctccgaaatacatgaagtgaacaaagcaaggtgcggatcagtgtgtgtgatatgctatcgtttgtataaatataaataaaaaaggatatggtggatctatatgtgtgtgtaaaagatatatcaagaagattatacagtgtgcagattatgcca

SEQ ID NO: 29751 - DNA, 1903 bp, Bovine  19866880678313
  misc_feature (1)..(1): n is a, c, g, or t
ntgactgggtgactgaacacaaaagaaatactatttggatttcacagaatttcttttaaaatgtaagcatcagaatattaaagttacgaaaaggtcaaatagagtaataattttggtattgggtataaccaactgcttttgaatatatgtactcacaaaactcttgtcaagtttgattcgagcttttaataatgaattttagatcttcatgtttggatctggtctatctgcaatgtgaaaactaaccttttagaaattctgaaaagaaatttgccatttttagataaaataatctcaggatttaaattctgccatttgtttagaaaacaaattctgtcattctctttatatacaagcagcagcaaagatttttgcataaaaatcaaatgatacagtgattccttttaatataattgctgtaatggaagttatccttaattattagacttttgatttttttaaagaaattgcaaatatgctggattgcaaatatgaaatatatatccaaccaaacatgtgatgtcatcactcaaggagaatgtaaaagtttctgttttgtgttttcacacacaaacatttgaaaattcaaagaatagggtaggcttcttacttatagctctaagaagtctactggaccatcttggtctgggcattcgtgaggttcatagttcacatgcttctaaatgtgtcctcaagtcactcccaggaagaatgcgactgtactgtgttggcagagctgaagcagtttggcttttccttatccacacgtggaaggctctggaggtggactgagtcctattagcacaagctgggatgtattaagagagtatcactgacgtctatacactgccatgtgtaaaacagatagctagtgcgaagctgctggtgggagctgagctagtgggagctgagctggtgggagccgagctcagctcggtgctgtgatgacctagaggaatggaatgagggcaggaggcaggctcaagagggaacggttatatgtatatatatagctggttcactttgttgtacaacagaaaccaacacaacattgtaaaacgattatactccaattaaaaaaaaaaaagcttgtttgtacactcatttctcgttccactgccatcccaggtagctgagctgattatctggattctctaacatcgtctgcaatattcatttatgttttgatcaatagtggaaacgcctgcatatttcagtctatcctctgacacaaacacattatttatgtagccttctaatgcctccagtgcttcacagtgaaataattagagctgttctccttgtttctttattcctctcatcctaaaatatccaacccacttaatcctaggagcctgggaaaatgaaatagttacattaagtctcagaggatcgacacaacttgaaaattagtaaaagaaacaaacaaaaaatttaactagtgtatgtctttagtatctgtgctatatttaccttgctagcgtcctcagaatgttttggaaggtgcgtatgttagtttggatgtccccagaatcagatcttatgaggaagatttgaatgcaagtagtttatttgggagctcatctcaggaagtatcaatgagggaagacaggtgccagataaagaagccaatacagggtgtatggttcatatgtagaaaacaaacctatggttaccaggggaaacagggggagggacaagttgggagatgaggatagatatatacacaccactatacagaaactggataagtaataaggacctactgtgtagcatagggaactctactcagtactctgtaataacctatatgagaatagaatataaaagagtggatatacgtataactgattcattttgttgtacaagtgaaacaaacgcaacattgtgaatcaactacaca

SEQ ID NO: 29752 - DNA, 1371 bp, Bovine  19866880695035
  misc_feature (1)..(1): n is a, c, g, or t
ncataactgggtgtaaagaatgtaccacagcccaagctgcgttgaaaacttaattaattgctgctttttcaacgctccctaaaattacctcatccttaaaactactctgggtataaccatagggcttcctaattataggtgtcatatttaacactgagtgttctctgtgttccccctggtagagatgaccacgattgcaccatccttttcttaagctgaaacggtgcagtgacccaatggtcataatggtcattgggccaaaattatcgtgtgtagttgtcgtgatgagaactatcggataagaaaaatgagcattttttttttaaagaaaacagaaaaatcgtgatactttgtctcctctatttacatataaaaatctccttaaaactttttaaaagataattcagatgaaacccagaaattcattaggagaaatgttacaaattctaatcaaaatattgatggaaactgaacatgagtatgcttagtctctcacagcatgatgcaacagttggggtaaaggagattcggtgctttggtctacacacagggctgtatgctgaacaaagaagctgtacattgttttatgaaggaatgttccaaagcggtgtgtggattttaatgtctgtcaggaaacagacaacttcatgaacaattaaattctagcctttgatgttttaagcaggggaataagagggaacaggaatgctccaactgttcacctcttcgagtgctgttccctacctgaagaacttttaaggactgtttttaagggaaaagaaaaatgcttaaatgaatatgaattccattttatcatatgaatttttactttgactttcgaaccatgaaggccgggaaactctgaaggccaggaaagttcttggaacttaataagaaaatataatgctgtcaagactaatagctcagatttaaattatatcgcttagtttctcacaaagaacaaggttctgtagtcatataccagatatctgtaccgagctgactactttccacgtggctcccaggaagatgacttgaaagaactgatgactcaatgcagacccatcactattaccagtaagtcggtctgaagaagaatgtttactatcagtggcctttggcatcatttttatataggaagaacagagcatgatttatagttttaacttagagaagcactggattagaattttaagttaatgtttccataaacaactgagtaaaatggcacttacaacttggaaatatgtgtatttaaaaagtattcaactgatatgcagttttccctcaaatcccatttctaaatttaaactgaaagatgacaggggaggaagcctttaaaataacaagggtcatttcagtacataaaga

SEQ ID NO: 29753 - DNA, 1482 bp, Bovine  19866880700153
  misc_feature (1)..(1): n is a, c, g, or t
ntcacaggtgcagaaccagtgaatgtttgtgtctaaattttacttttagaacctagaataggaacatttacaccaatgcactgcccagaaagaggaggtatttgcacacatccacaacgataggttctttttttttttaaactattgcccactgataataaccagtttcctctgatgatctacctggagtcagaagacagcatgttttggatggtgctttatgaagcagacacatgtttactacttataatttagtaaaattaaaaaaatatatattgaagggcagatgcagatacaaagtcacaattttaagacaggaatattactctctacatattacccaaaactcactggtatggaagttaaaagagcagagcatggttcagaaggcagaactgtgggcttctcttgtcttcctagggttggtgaactctctgtaaactctagaacagaaatgacccttgtgaacaggtgtgcatgtgtggtaagtatttgatgggtgtgtgctgaccaataaataatactactttctcttgactcatttggctaaaatgagggctgctccttctcactgcaacatagacttgtgttgagcaatcctgccacgttaagtaacagtcttgagacagaagaagggcattgggggagagaacagttgagctttgccttctgggtaaatctaagttaaaactttcctgttaactagatttatcgctacttagtaatcttttgcctagaatattgaaggtgtgagatttttaagttggcttgagaggaactaaacagtttgttcagtgggattagatgaccatagagagaatggctgattaattatccttcctttaaaattatataatgcctcctcatgcttggaatttcagtgagaacattttcgcttcgtttcagaaagaccagtggaataataattatattgtatatcatattatgtagattgcctttcagatgagaagaaaaccttccctggtgttcccacagaaaacaaggaaattaaagttttttttttccgagtgtggatttaagatccattattcaagtgtgacagttgcttaactggtagataaaccaatgggactgcgtgtcttgatgtttttgtgcagcttatatgatctgggaaccggtaatgaaatttgcaacacctataagctagaaaaattttatgaaaccgcaatacatattttctttcatagctctattctgagccagcatgtgtgggcccctttcaagaaggggagggaaaaatggtgataaatgacctttgaagtgaacttttgatatttgcgttacaattctgtgggtttaagcttttaatttttacaattgtgggcgatatttgtgaagagtttccagtatgttctgagtagtggcattctgacccttaaaaaatgtaaagcacatttatttgcctattttatctgtttggatgagttcaaacttggcatatccttgcagtaagggtgatga

SEQ ID NO: 29754 - DNA, 1682 bp, Bovine  19866880745893
  misc_feature (1)..(1): n is a, c, g, or t
ntggaggacagaggagcctacaacacgggggttgcaaagcactggacatgactgagtgactgaccaacaaccaaccccggagatacaggcctgggactgtgtttccttccccagcaaggtcatttctgaggtcatcaagactgtcaaggggaaaagcatgctgaagagaaaactctgttctctgagctctactcttaacttcatcaacagacacagaagcacagtgacatgagaaatgagaagtcgtttaaaaagccacactccttttttaacaggattaatatttaaataataggtaaccctgactctataaaagagaacagctaaatagcagatccctttggagttgaattctacatatgtcaaactgcctccataaaaagtttggaaaagtaggaggaatgatgaaaatgaggaagggaagaaagtgagagaaggtatgagaaaaatcaagatgcacgttgcccagttgattttagggttttgcatgttttgggcttacgttatagagattactatgtgtgcatgctcagtcgtgtccaactctttgcgaccccatggactgcagcctgccaggctcctctatccattggatttcccaggcaagaatactggagtgggctgccatttcattctccaggggatcttcccaatccagggatcaaacccacatctcctatatttgcaggcggattcttgaccgctgagccacctgggaagcccatggagatgaccagtgcagggttaatgcaggaaccatcaatgctgcctgcctcttagccgagtactacagtagaaagaattctgcaagcattgttatgtcttacaaggccactaacaattatcaagcaatacaatattacaagcaaacagcatattacaagaaatgctaaattgctataccagcaactgtaatgatgtcccaggctttgaatactgactcaattttaaatccttaaaaacaatgcggaaggagtctgcaagcagcaacattctcagaagaaaatcccttaaaggattcaaatacatgtggataagccaaagtccaccaagacttaaaataatgttcaaaggattcaggatgaatatgatacagtttaaatagttctgaaaatttgtattttaacttctaacaatacattcacctccggcagagctgtatttctcaccctgcccccactcccaaagaaatatttaagttttatttgcttccaacggattcatctatgcaacatccactcctttgtggatggaaaaatgtgcccaaaaaatgctagttatttttatagttgccatccatataaaatatgtagcctctaagagaaaggatttttttaagaatagcaaaatgttctgctatgcaaatacaagcaaatctttgtctatgcaaatgcagggcacagacttggaggaggcaaagaactctgacacccagctctcaggcaatgggaagttccaagagttcttgaggttgacagaaagcacagctccttctcagctagcctgagggctctcacactgcaatgattccgtctggtcactgttacccagtgatatgttttcactcattgctaaaaaaaggcactcagtaaaaccaaggtgttggtaccagttaactgcttttagaccacaagcagaggatctatatgctggcaacagaaataaatataaggatcaaaatt

SEQ ID NO: 29755 - DNA, 1184 bp, Bovine  19866880760881
  misc_feature (1)..(1): n is a, c, g, or t
ntgttcttgcctggagaatcccagggacgggggagcctggtgggctgcagtccatggggtcacacagagtcggacatgactgaagagacttagcgattctgaccaaacctgagaccttcaaccaagctggaccagcctgcagttcataaccacacagaattaaaacctactgctgccctctactgggcagacctggaacaaaactaacatccacccatcaagtatttgaaatcacctaatttcttctctggtttcttgataatgtataaatttcaacatttataaattaatgataagcttccaagaagagggggagcaattttacaaagattcagacccattttccctctttatcaactaaaagaagcgacaaaatggtagcaaactaggagcctggcttcagacttggctactatatgacagcatgaacttggtcagggcccaaccaacctaggtctcaattttcaggtctgcaaatgaaagaatcacaaaccaggagatatttatggtcctggttgctctttttcattcatttttcaaaatgtatagctttttcttaaaaagctgtaataatctaacatattatacctctattctgttactcaggacttcactgattattacaaggactcaatggacatgagtctgagtaaactctggtagttggtgatggacagggaggcctggcatgttgcagtccatggggctgcaaagagtcggacacgactgagcgactgaactgaacttagtaacgagatagatgtaaaccaagggttttgcattgcatgaagacccacagtaagtatgagtccccctctctccctttcccacgttccccctgggaccagctccaagacattttctattcttgtaggacattctacacccatatccttaagtatttgttctctgctgctctctgagttttccaggtctggtgatgcaggcactatattccccactgaaaggcaagcccaacagctgcactgtatccttttatctgtctgcacaccctgtgtccattattggcagcagtggttgtgacggcagcagcccttactgcagcagaaacagcaatggtagcagtggtatccccagcggccggagtgaaaaaggttacagaaaagcaacagtgatattaaaataacaaaactgtaacagtaaagccgtgtgcgtgtgtgtgt

SEQ ID NO: 29756 - DNA, 3350 bp, Bovine  19866880829895
  misc_feature (1)..(1): n is a, c, g, or t
nacatgtactatgtctctgctatatacacacgtaaatacacatgacattgaatatatatattgaatatataaagtgaacatatcaaatattctgtcctcatttgagggcaaaccctttgtgtttattatgttgctgtaatggtctagaaagcagagcatacatgatcatttatgattgtttatgcatcaggacatgttagccttaatgaaaaataagttatcagttacctcaagtttttgttctaaactgttactgacatattacttaacatgcatgaaaaataactgctgaatggcacacacacacaaaccaggaacatttccatttttgaccaacgagcaccacccatgtgctattttgatatgactcatttggtacccaacagtcctgaaaatagtcagagatgccgcacactttaatgatgtgggaatgttctttgcttcagtactgctttagtgctagcccttaatgtggctttgtttgattattccattctcatctgacttctttgattatagctccttactaaagtgtaagatctgattggtaactttagagatggtggtatcacatccagttgctttaacagatagtagcatgtaaccactgcctactgtatgcctggtgtctatgaggcaggcactttaattcaatatgctgcttttcctgaagtttctagtggcttccaggaagatggagattgaggctgaatattctagctgactttataaagcacatcatattcagactagagccttttgttatgctgtcctaggttcatgctgtgggcttccctggtgatagaataaatattgctggcttcccagcaataaagagtctgcctgccaatgtaggagccatgggtttgatccctgggtcaggaagatcccgtggagaaggaaatggcaacccactccagtattcttgccaggaaatcacatggacaagggagcctggcaggctacagtccataggatagcaaagagtcggatacaacttagcaactaaacaacatcaaggttcatgctttgagattgttttatcactgagagaattttgtaaggtgtttcttgtacttctaatagtgaggacaaggtccaagataagcccaccttaaatggaatttcattttttagtaagattcccgtgtttttcttttccatttccttctttgatttcatttcatcggatgagtaaagtgatagaataccacagtttctctgaaagtacaaagaatatacatcaactctcaaagtcttgttggcagtttggaaaattgagccatgtatgagagagagaaagaaggtgcatttcaaatggtctctggttgcctcgttatcatcacagttaccatgtgctgagtaattactatgagtcagacaccaggctaaacatattaaagcccgctatgaaaggtaattgtaccttcagctacgtgctcatgttgagtatgagtacacacttaaacacacaacacacactaagcccacttacatagtcatcatatttgaaactcagattaagcagggaaacccattttctgatgaaggcagcctttggcatagcaaactgtagttcaggttaggtagttacttgattcaggagctgtactttcccagtttcttcttatctaactctagtactgtgtatttgtaataatatcaggctgccatggagagcatgcagtctcccttgtgaaaacatcaaggttcataatggttctttgagcacgtggcaatttatcagtttccctttacaaagtcttcaaacagacgtctcactattgtcatgttcacgataacctctcaattaagtaatttctgttatattcacttgctacagcctgttcaatctcatctttatgagattgctaacgcctgtcaattatcattgagaggctacattcttttattcaaccacattttctaagagaatgagtcttttgctatcgaatgatcaatgtcatgttaaaggattttcttaatagcattcatttaaatagctcatcttaatagtccaacaagctcacaggctgtttgtaccaaacataaggttgtatcaaatgctacctcttcaacctttgccataaattataactcagtagctactaatgataggaaaggattgatggtggctggaattaaccttggcaagaaagaaacgcattgtcatagggaccagttatgagctaacttctagaggtgcatttgaggactaattcaggtagtagacaaaaggcaaaaatttcttggctcaccaaaaatgaagcagtgattttgtagaacctcttttgaacaaagacaggatgcaaattgtatgtggcaaatgtatttcacattgcttctgatttttcctcctgatagaacctgaattgttgaaatacacatgaatgatttttctaaatgaaaagtatatatattttacattgtactagattgttaatttttattgtgtggtttctgatccaccttcatttcacatttgggcagatactgcagacggcgtttctcaggagctcttctctgccggcttggttgatgggcatgatgtagttataggtgagtcattttttaatgcatgtagtgtcatgcattttgtttatatatcaaatggaactgcacttagaaacaaaagtttttagaagggaataatttattctgtgaatttctgaaaatttcttcaattcctatcttttatgtgaaagaagtatatttaagagtcatatttaattttctgttccaaaggcacttaatataattctgtcccatttgtccagacatgatttatccaatgcaaaacctcacttactggagataaaccaaagaacctagaaaaccgaaaagtccatgacctagcaagcccaagatactgtaaattccatacacagaagtgtggaaacttctggggtcctttctctgagtttctctattctttgtttggacacagttctaataaacttaggtggtggacttcctagctcttagaaaaattcattcattatgaagtttcaaggttggatgaaacttaacccatcattcagtccagttctttcattgtgtgaataaggaaacaaattcctaaagtgattcagtggtttgtcgagggcctgcagctgggctatggcagaaccaccacactttgagactgtggctttttctactactgctactttttagaatcaagaaaaagctgcgtgaaaattggggagcctgctagctacagacacactaataggagcaagaaatgactgctggcctcctgccaaggcagggaaggcagaaaagctgtaagaggtagacggtgtcatctaagaaaaagtgtagcctgcatctacctggggtgagggtga

SEQ ID NO: 29757 - DNA, 1931 bp, Bovine  19866880926263
  misc_feature (1)..(1): n is a, c, g, or t
nttttagtgcccagtgcctgggtcacaagaggaatttaataaatgtttgtgaaaccaaaattaaagtaccttttcccccatccatattgtctgtagcatttcctcccatcctgtatgtctcatgcaccgattattgccaagttgtcgtgtactcagctgttcttttccttggtttttgagggcaggctttccacctctgactcctaacatcttcgtacctagtatgtagcagaagttctcaaacagttttgctaaataacagccagtgagtgagtctcttattttgcctgctatgaaaactgaaggaatatctacccaactccacctctggcacttttgccattctgcacattttcaccctggggtctgggagggaagctgaggtgtggtttgcatcagcctgaagactggaatccatttatagctgaatgttctctttcagttctcatatatacacatatacttggacatcactgtgctttatatttagcataaatgttgatgttgggtttccttggtggccaagttgctatagaatctgcctgcagtgcaggagaccccagttcgtcccctgggtcaggaagatgttagcttgtatcttcattttctttactttgtcctttccagtttgcatcccatgtgtatcgttagatgaggcagaatcaaaacatacatgagatcctcttaaagcccactatttcttggagcattggatattatttgatgaacaatctagatggacttgaagtgcctgaaatgtaacaacaggagcaatcaaatgtgagctatatgggaatggtttcctgatgggcattatacactattttttatattagctcaagaacagactccaaaacagttgtggaatttcttgactacaggtagtttctggggcttcagataatgaattacagttgagggattaaaatgagagacttgcatcaaggatctttcttggctcacctccctttgcagagaaggaactgaagtctaagaacagtctccgagtgggatcagaaagaattacgttcttcctgctctttcagcctggagcagttggtaaagctatttggaaatttggcttccaaagctagccagaagtcttcaggttatgtttcaattattcttactaaattccccaaaacttattctactttggagggatcagagatactggctcttgcatatctcttcttgcttttgctgctgtcatgataatatctttcttaatcacccctagtttgcagaatgttgaacaaaagatataagaaaatcatatttctctcatattcataatattagatgaacacacactcactctaaattgccttttgccaaattctcaagaagaaaaaaaaactgctttatttttattatttttgcatctttgttttctttcattttatttcttctgagtgaggatataaaagtagattgccctaaaatctctaacccataaaaatgaagtcatatatactactgcgggcacatgaaagaaacgaggatgataatagtgacaataattatcgaccagaatttattgaatgcttttgtaatgcccctaacaataagtactcacgcaaaacagcaaggcagaaatagttatcctgaatttatgtagaacgaaacggcatctccaaatgattaagtgactggctgaaggcttcacacatgtgagattcctgtgttccttttgtgaagcaatttggaaaacatcagaagaaagagcgcaatgcttgcagagaacattattgggaaatgtcttatcaaagacacattgtaaagtttgcagaaaagaatctgagagactaatgatgattttgaaacactgtaatttcttctctaaagtgaaagttggcccactatgtgtacgagtatggcaacatcttgtttatgaggtattcagcctgctgacagctggggttcaccaa

SEQ ID NO: 29758 - DNA, 880 bp, Bovine  19866880930464
  misc_feature (1)..(1): n is a, c, g, or t
nccatagacggcagccgaccaggctccccatccctgggattctccaggcaagaacactggagcgggttgccatttccttctcccaaatgcatgaaagtgaaaagtgaaagtgaagttgctcagtcgtgtccgactcttagcgaccccatggactgcagcctaccaggctcctccgcccatgggattttccaggcaagagtactggagtagggtgccattgccttctccattggttgttatttcagaacaacagttactcttttttgtgtgtggtagagcagatgcccccattgacgcaggaagatagttttgaagtttgaattttatcttacccacttaattcttttaggatgtcttgtgattactgtaaacacagaatcctcccaaatgaaatccagtatttttagaagtatcaaaatgttacatttcctcaagagatctcttcagagtcttggggttgaatgcaatagacagaatcacttcagtttatcttcttttaggtaatgaagtaagaaagaaccgagtaaatagtattttttggtgaaattaacaaagaccttgtcaagttaactccacttacaaaaaatgatagctatatcagttttagtcacttcaatggtgagtctgaatcatggtcctttttttccccttggctttaaaacattttggtagttgagtgattaaaggatttaatggtttcgtctaagttttataccacaaagcaaataaaacatccagtattgaagtcagaaccttaatagaaattcagactcaatcaccactgtttgggtaggacacctgctttattaggagagggaattaatgactgagggatgaagaaagtatctgtgtagggagattaactgggtttaaatttggg

SEQ ID NO: 29759 - DNA, 2289 bp, Bovine  19866880975293
  misc_feature (1)..(1): n is a, c, g, or t
nacacatttaccccccaccaatgttcattgcagcattatttacaatagctaggacatggaagcaacctagatgttcatcaacagatggatggataaagaagttgtgatacataagcacaatagaatgttactcagccagaaaaaggagtgaaactgaggcagttgtagggagatggataaacctaaagtgtctcatatagggtaaaataagtcagaaagagaaacacaaatatcgtatattaatggatatatatggaatttagaaaaacagtactgatgacactattgcaggacaggaatagagacacagacatagcagacatagcaaacagatttgtggacacagttggggaaggagagggtgagatgaattaaaagagtagcactgacatatatatactaccacgtataaaatagatagctagtgggaagctgctgtatagcacagggagctcagctcactgctctgtgatgacctaaagcggtaagatgggtgggtggggaagggagcttcaagaggaaaaggatatatgtatactatagctgattcacatttggttgtacagcaaaaactaacacaacgttgaaaaccaattatcttccattagaaaataaataataaataaatatataaaagataaacttgatgattaaaaaaaactgttaaggggaggattgaaacacgcatgccttttctggatgagcttgtcaaagttttgggtttttgtacagacaaaaacacaattcttgctcttgttgcaagcaggctggtgtcagtgagagcttcctgtcccccactgtctgagtaggaatggtattgagacctgaggagttcagggttcccatcacttccttagggtcttgactcgaaggtaccgctcttcccacctcaaaccattggacaactgtgtggaaaatgtgatggcaagtgtgcgatctgtgagtctgagtcctctatgcatcctgcaccctgatgtgcatatgcaatgtgtataactatggctgttaccagggatgctctgtgattggtagaggccttgagtttgatactggagttcatcacccaagagaaagatagagatggttacccaaagattgtcagtttgaggagctctaaggcaaatctcttctttaaatacaaaaagtatggcctcaagaagaggcgattgatgggctgccacttcctttcctcatcaaactgctgcagctgccaagacaaacgcctatgactgcaagcagaaaggaagtggaacacagagcctcaactgaattgcctattagtacactagaacctatccaccctttcctcttctctcactcagaagtggtaagaatggaaaaaagattcttcgcagcacattctggcaggcggtatcagagaaaaactgatagattagtttcatagtgtttcttaaattcaagaagcaaggctgtgttatccacatcgaaaagttctttacaccaaaaccctctaaaacagaagtatcatttcagtcttctgtttgaggagttgactgtgacactatctgcagtgagacgcatgtcttacagcagctctgatagcagttgtccttgatgaaacatctgcagtgtggtggagagctctaagaacaataaatatagacatttcatcttgcaatcatatcacttttcttttagaaaattgaaaaccctttctgctgctcttgtattttaaagtagcacactgacttttaaaaaatttttactttcagttcagttcagttgagttgcttagttgtgtctgactctttgcaaccccatggactgcagcatgccaggcctccctgcccataaccaactcccagagtttacccaaactcatctccattgagtcagtgatgccatccaaccatctcaacctctgtcatccccttcctttaaattctatttaactcattagtgaatgggaaaagtgaaagtgaagttgctcaatcatgtctgactctttgcaacctcatggactgtagcctaccaggctcctcgtctgtggaattctccagacaagagtattagagtgggttgccatttccttctccaagggatctatctaacccagggatcgaacccaggtctcccatattgcaggcagacgccttaccatctgagccaccagggaagctatcagacagtaaaaccagttctaaaagcaactgagtctgcatgggctatcagaaaatttcctttaaaaaatcaaagaatatcagaataagatttctaaggtacacaaatgggaaagtcctataagataataaaaccataacctttata

SEQ ID NO: 29760 - DNA, 1771 bp, Bovine  19866880990997
  misc_feature (1)..(1): n is a, c, g, or t
nccttaatacatcttcatctcaagtcagcaggaccactgagtttgattagataataacattaggtagcctagagaaagatggatcagcacaaggtgagccaccctcaaacccccaagtcgcaactgctgtgagttccaatcactggaaaagtctcacaactctgaacttagtttgcctgtccatcatgtagtcgaatcaaggcccagtcttatgccaacgtcttgcgtttaccttgtgctcagtcgagccaccttcagtgttaaggaactgcacattataaacatcacatgtatacatctgtgggtcacttataagtgtgtgtgagtacattatgaatagagccctagtcttgaaaaggagcaaaaatcgagaatcatgtcttaaagaactatttcctaacatttttatgctaagtagtacccatgtgacaaacatgtaaatattcatcaaaaaccatatgtatatatttttaaaggcatttttttcttcttcccagctgtatgtattgctagaatctgcttgctatgtacatttcccttctgcatggaacttggtgaggcaaggtcatttgtccagtttcaatagcctaaagcatggttgccctttgttttttgaatgttccaaaaatgtttaaatcaagtgatcaggaaaaagctctaattttctacttttgctaattttatgacactggccaaattagtattagttaacaaatcagtgatttgttaagccatttttaaacttattattatttctttgacataaaatagtgtttcagacagcattttaccagaagtcaattcagacaattttaggaaaaccttctcactgtcccccaacttgttttgttcattatgcatcagataacaaaagatatcaatacttcatgtctatactcttaaattttcattaaaatttttttttggggggggagtctgtctttggtggctagtttgtgtggctttgtgtcttcttatattggagcaaatgtcagtttcaatatatattattgtatttttaaaaaccaaaatcaaaaaatgaagatcgttttcaatttgaaataaattcagaagaacaaaacccctttgtgtgacatgacatggggaaaagaaactcgttacagagaagctaaggaaggagtttttgaatcaaatctcttctattaaaagactgaaatatttccataaaacatctgggattcattttctacctttcctaatatgtgggtttaggggggaattgattatgtaatttcttctgtaaaggtgaagatagtttttataagcaacaaagtaacttgtgaatgaaagaagcaatttactagaaacgcttgttgatgataattgacatttaggtatgtcgttatatatgaatgattgtatttatgtatttatttgtcaaaattgtacatactgtttcaccaaatgtaattgtctgtaaaagtgcactctccagttttgtagtacaacttagggttacatgggttgccaatcgagctgctaatcagaatactattttttgtatcagtgttataaaactgaaaaatagatgctgaaaatgtctttacattcagtttcttcaccttccttatgaaatgtaaagtgttgatttgaaagcacgatgctaatgtataagcccatctgtcatgaggaagattatggctccataaagctgattttttaaaccatggggacaaataaacagaagcagaacagactttccacttggcttcttttctgaaagaatctctttggcgagatgtgattattg

SEQ ID NO: 29761 - DNA, 1731 bp, Bovine  19866881000595
  misc_feature (1)..(1): n is a, c, g, or t
ntgaggtgatatctattgtagatttaatctgcatttctctaataactggtgacattgagcccacaatagtttataagaacatcagttaacaatagctataccaacaatggttattatttttttaaccatcacctcattttttaatcattatctcatgagataaaatgtcatctcagtagtttatttcacttcagaattgtggaacttgaatgcttctgtgtattcattggcctttgaatttcttcagggaagaattagaattgtttatgtcattttttttcctgttttgctattcaagcttttcttattaatttgtaagctcacatttacttcatgctcactctcactctccccacccccacctgtgtgtgtgtatgtatgtatttatacatgtatctatatctatatgtatatatgggtacatgtataaatatatatatatatatatccattttctaaatatggtgtcattttctttaatgtaactagaccctttcagtcttttcttttatggttttggtctttattgttttgtttaagagagccttccctaccgcaagtgttaataaaagtacacgttacttgtaactgttttgtgattttacttcaaaattaacctaatcaaaatttattttgttacaaggtgtaaggtagggattgaaaagtaattctttaaaaaaacacgatgtaattattttaatattatttattaaataatctacattttgtccacaaatttaatatcccaattttatcacaacacttctaatataattggttctatttctaaacttttatttcattccattaatctatcttcctattctgacattagtaccactcattgggatttttattggattgcattaaaataatatattattttggaaaaagttgccataacctactttaaatttttattatagatataaaatactgacagttttctaatagcaaaagataaagaattttactttcatttattattgaaaaccataatcctctgaatgataagctcagcaacaaaattggaatccatctccaatcaactctgcagagcttgaaggtgtacattttgtatatcagccctatcctgagcttaatttttccccatctttttttcctattctgtctccattgactaatttaattatttatttttgtaaaatctttgcattgtgtttacaactgctaactaccttcctccagttttaaagtgatttggaagtaaaactaaaagcttttaatagattatcaaagaaatccatgaccataaacattaaaaaccacagttctagatcatttaaagtggctcattaatggccaaaattgaatgtaattttacaaatttctttataccatgctattttatgaaatcaacctgacctaaatgatcctgacatcatttgaagaagcatatgtgaaattaaattgttaatgtccagaagactgatgctgaaatcaagtactacccacaaagtccacagcataacaccttgtgtttcaggataactgcaataaaaactattcaactttaaaaagagagaatgtaaaacaatagagattggtatctagtatataccagatatataccataatctggttgatcagacttcatttattcattcattccgtgcctgcataaactttgaaagtgaagtcgctcagtcatgtccgactctttgagaccccatgaatcacagcacgccaggcctccctttccattaccaa

SEQ ID NO: 29762 - DNA, 757 bp, Bovine  19866881015070
  misc_feature (1)..(1): n is a, c, g, or t
ntgtctacattgagagtgaatgtctctcattctttttgtcaagctaattgtcaaacgggattctccgcgactagctggatgctttagtcttcctccagggcacttttcaccaggtaattctcactaggccttttatgaaagtgctaaatgtcactgcagcgggaggaaggagacaatgccacgctctctctttgtgcaacaatacacgtttattgtccttttacctctgcagtcatctttgagtaattgttgtgtaaacaatagaatggaatgaaattacattaagttgtatgcaaatggctctagaacaccttaacaattatgacaaggcaattataaataactttttttttccttagtaatatatatttgctttttaaagtacattaaagagctgccatatctagggttagctaggaaagagcaaatggtaccatctgggagccaccaccctgaaagtttagactccaattttgaaaatctgatggtttactattccataatgtatagtcaagcagagggcgatttgggttgaaagtatgtattcttgaaacttaacagcgttttaccttttagtcattgcacaaaaccctttctattatttttcactccatctgggtattctgcagaatttcaagtaaaacacggattctggtatttttcaagtttatcgcctttggaacgacagattctatcatttcaggagacatcaaatcagaggtgggtacagaattagcaatctaacagaaggcgccat

SEQ ID NO: 29763 - DNA, 1054 bp, Bovine  19866881017695
  misc_feature (1)..(1): n is a, c, g, or t
nattagaacataaattccatacggacagagagactgaatgccagacttacagattgtttccattaaatatttatagaattaatgaaggtaaataaatccccattcttgtgtatttctttaagggagaggaagcagaagtgactctctttgtctataatgcaagcttgtatatgtatgctaagttgctttagtcctgtctgactctttgcgaccctatggactgtagccctccaggctcctctctccatgggattctccaggcaagagtatcagagtgggtagccattttcttcttcaggggatcttcctgacatagggatcaaacccaggtctcctgcattgcaggcagattctttactgtctgagccaccacggaagcctcataatgtaagcctgctactgctactgctgctaactcacttcagtcgtgtccgactctgtgtgaccccatagacagaagcccaccaggctcccctgtccctgggattctccaggcaagaacactggagtgggttgccatttccttctccaatgcatgaaagtgaaaagtgaaagtgcagtcgctcagtcgtgtctgactcttagcgaccccatggactgtagcctaccaggctcctccgtccatgggattttccaggcaagagcactacataaaatatataactagtaaggacctactgtatagcacagggaactctactcaataccctgtacagacatatacaggaaaagaatctgaaaaaaagaagtagatatatgtataactgattcactttgctgtttcccaattcacttttctgtacacctgaaactaacacacccttctaaatcaattatattctaattaaaaaaaaaattctcatgttgaccagccaaataacgaatccaaaaatggattcccacttccctaccccccaaaaccaacaacagaattatggaacaggttattaaatgacactactattacttgttggcacagcatggcgaaatctttaccttcattccgtaactttccacttaccaacttaaatgtcaatgtttttaaagctttggg

SEQ ID NO: 29764 - DNA, 1554 bp, Bovine  19866881032639
  misc_feature (1)..(1): n is a, c, g, or t
ncgtaggacaaagggcccgggtaggtgtctcttactccccctcctcccctccactcctctctcctgcagggccaggctctatctgactcacagggtgcagtcttcacttgccactgttatttttaccacatgctcttgtctgggcttggtttctagacaaattcagactatcaaaacgttgatagttcttcttgctttttcgtgctctcattaccttttaattcactgtaacctttcattgttcttgcaatgaaagtgagaagagggaatgaggaccactcacaaaaaccagaagtcagctccaggaagataattttgctacataagtgtttcttgtttgcatccttctcatcttcagcaggagctgccatctctgaacaccacttttccatccctagctacttgctctattttctcttatcttcctcttcacttctttttccatttccatttcttcctcttctttactccttgtccatttctttctgaagcccacataggctctgtcctcacagcaacaaagattttctgtgtttaggtggcaattctgttctgttccctattgcttgtcatcttgaattgcaggcctctgaaactggcactggttgcctgtctcccattcagcaccatgagcactctgcttatatgtaaccccctttcatcctaaaggctgcacacggtgttccttccaggaggtcctgctgtactcttttctccatcctactgggcttttcccgactgtaggttatactcagatgatttactgagcctcatctgtaacctatgatttctatatactcgctgagaaccttctgtacccctaaatgaaaagcacttggcaaggagttaaccttatctttcctttgccacatttctatttcatgcctgtgtcaatgaaaccaactcctcaactgtctgctccttttactgaaccatcccatatgtcacaatttcttcttaagatatcatagaatctctgatccttaggattgaaaaggatcttaaactaatttagttatatataatgacatgaggataaaatgacataaacgtaaacaattatgatgtgaaattaaatatacaatatgaccttgtgagtgtgtatatgtgtgtgtgtgtgtcctgaaggatgcagacatcacagtggtaacagggttgtctgcgggtggtacagttacctgtcggtattaaccttctttcctatactcactcacattttctttaataagtaatacaagaaataataggaaacactgggagaatcattttttaaattccaagggggcattttttccacctagaattctataccaatcaaattaattatcaatagcacactagaaggcgagacgtgtcagacatgaaagcactgaaaaatttatcttcaatttgtccttttaggaagctcagtgaaaatgattacaaaacaagggcataagccaatgaaacagaagacatagggatgtaggaaacaaacaaacaaaaaaaaaaacaaactgaaaaagtctttgaaaaaataactattaataggaaaggggacatgaaaatagtcat

SEQ ID NO: 29765 - DNA, 1031 bp, Bovine  19866881082732
  misc_feature (1)..(1): n is a, c, g, or t
ncatattagttttccatggctattattagctaaagttcaaatttaaatactgacatcccatgcagcaactatgcactgacaacattgtctctagtaataacttactcaaagtagaggacatttgaaactaaaggaggtacattctttgttattttttaaattgttaggatcacagctaccaaatgaatactcaagtctactgcggcggcctgaaagaattaattatataccccacatgctcaagttattacaagaaaataaattatacaggaaacccagctggtcagatatttcttcacaaaaggaaatgtattttgggaaaggtttttattgcagagtgtgtgtgtgtgtgcatgtacgcatatgtgagtgagtgtggtgtgcatgtgggtgtatgtgtatacatgggtgtttaaaaagtgtagcaaaggaatggatgagagaaagagactctctagaaatgactttataaactccaatcctcacagcatattacctatatcccctggtaagacctgcattataggaagccacagaaatgatatcctatgactttcctgtattgaaggtatttttcagttaaaattaaaggacaagttcaccttcaactagagttttataccaaccctcatgtaacgctgctgctgttcaacatgctgatcctgttctaaccagccctggcttctctgcatcctaatcctacctgtggcagaaggacagggagccaaggagggaagaaaaccgagagagctggaggggaactgtgcccacctagccctactggatggcgaagggatttccaggcagaactcaccctcaattgtggctacaagctgaggttacaattggctatggatccttgagagaaaaggcttcaaacctttaaaattattgtatatcactaagtgatttaagcacaaataaaataaaaattattacagagcctgtatcttccaggttacagacattatggtagactggtaaagagctaacaacaacaacaacaacaaaaacattttaaaagtaaatta

SEQ ID NO: 29766 - DNA, 757 bp, Bovine  19866881115739
  misc_feature (1)..(1): n is a, c, g, or t
nagaagatccaagccttgagggccaccaggtggtaacccctagagtaaaaaaaaaaaaaaaaaggaaccgtcaggaatcggagtcagggcagaagaaaggatgtgggatggattatagactaaaatgtgcttctgaggcgtggcggtaaaaacttgaagctcaacagatttcaattttggtatgccgacagaggaaaaaaattccacaggcatagaaacactcaattaaaactgcctaggctcatttcctcaagaactgtgattaaattaagacctgagatagaaaatgcaggctgaagtgattttaaaaaccactttttcacagttggggacttatatttttttttacatattcaaacaaaaggagtcatggcttaaagtcagggggaaaatctatgatacataatgaaggctgaacttctgcataccaaatgcacttaaagaaatggaacaaaacaacaccatcagcaatgaagcaccaagggtacctcaacctgaaaagcaggcttgcctattcaaaacaaacttaaccagcctgcaaaacccaagaaaaggggtgcagaaacaacctagattttccttctctgtcaagtatcttgacaaggtacttgcccatgaaatatgagcacaaagggtagcatattttggggttttccttctctttaatatttcttgcttttgaaaatgggctgcaaatagcacacctcaatagaacatttgaaagaatatgttatgctgccatggcataacctaaaca

SEQ ID NO: 29767 - DNA, 1391 bp, Bovine  19866881130066
  misc_feature (1)..(1): n is a, c, g, or t
ntcctaggattgactctggttatgagataaaaagaaggaagtctttggttttatcagctaggtcagctttatctcagtgtagcagtagatttgatacgaaaacctaatcaatatagtacttgccttaagaactcactgagaaatggaatatagaaatttaacaagagaaaggagtataatacacttacaacaaaattatagttttttactctgaatatcacctcagcctcaaattatattgcgagaagttgaaattaatggtttgagagactgcattttgttttgcctagttttgtttttagactattcttctccttcagtgattatgtaattgcccaaaccattgtggaaatagccacatctttaaaaaaagaaaaaaaaagaagaagctaaaatcaatctaaaaaacaaaaaccacacactgcaagtactttcatgacacccctcttcaaattggagataaaaccgaagctttaagaaacttcatttcagcctcagaagctgacaaatgaagaatttaatcatagagaagttctgcctgagatgtaaaacacaaatcctgggagtttgttatggagattgtttcagagaaatggttttaatttcttaagaggctttataatgacagcttgtgtctccacatcaactggtaaaaggacaacaaaaactcaaaagggattctagtaaaatccacactaaaaacactaatgagacagttaaattacctattgaaggagctgaaaagcaaaattgacaggtttttagtcaaaggaatgttcatgtctcccaagtaaacaaagactagggagtgaatgaaaggaagaaaaagaacacccggttcctcggggagctattctgtgaggaattcttagcagctacagaaattcgtaggtcaaagaaatctacacgcactgggccttgaggccagagggaaccctaggaaaaagccagccctccctgttccgggcaggcagagggaagcctggagggagagagagagagacaaagagagaacagtgattgagtttcctttccaaagtcttaagtgaagtccctcaaccgtgtccgattctttgcgaccccatggattgtagcctaccaggctcctcggtccatggaattttctaggcaagaatactggagtgggatgccatttccttctccagggaataaaaccaaatactttatagaactctactcagaacgctgggggtataagacaggtaataaggagacctatcattaactgttgccaggtttttagtgtcaatttactagacaatggacttaaattttttttcatttttagaaaaaataataaatttagagattaaaaaaatataatgtaaataataaaatatagaaaagcataaagaggaaaattaaagaag

SEQ ID NO: 29768 - DNA, 1223 bp, Bovine  19866881162698
  misc_feature (1)..(1): n is a, c, g, or t
nctttgttataccttgtgtaacatgaaaccagagcgtttaataaactatatgttgcaaattttctcattagcaggcacccaatttaactggtagtttaagattttgagcttctctaaataagccaacagaaaaaataaataagcaaaaagctttcttgtgtagcagttattttcctcaaccttgacgtttatccataaggcacttagtaagccccctttgatataacagaaaggtcaacttcattgccactgtttttctaacatgctatttgttggacaaatcctttttatttctctcttttaaaaagtttaagagggaattcactaatgtgatcaactgtggactttcatcctggccacccagttccacaaagtcaaaatgatcaaagactctgctgtttcgcaccttgctttcatctcatggcttccggggaagatggaaggtaaacagtctcacagagctccaattacgaatatcaagataaagaggagatgactttcctttcccacctttaaaattatctatggattgatgtaaaatagctttcagagcctcaagtacttgcttgctctctgattgcaaacaatgggttctgaacaagaacaaataaacgtgggaagtggaagggtaacccggttaagaggcagcctcagtgagcactgggataagcagagccaggtttctaccatcaaactcagctctccttcgcttttctgagtattggggttgaaattccactgacaaaatgtaatttgcattttcctaagaacctgtgtagcagatagatggtaaagagaattaaaagattatccaaagagatctaagattattaggaaagaaagaaagagtttgatgctatagtgctatagaacagaaataagaagaaaaaaccaaggctcccttttgaaaatttcagttagggtggggagggagcctttgaagaactctattttgcgtgtgcattgctttctttttgtccttcttagagtcattttgctttttaaggctccattgcccatttagttgcctgaattaactgaaataatttcttatatccatcttaaaaagaattcccccataaaagcatttttttctgtgctctatgttaacatttgggatctttattcaaatcttagaatcagtcacattatgtctccggagaatcctgatttctgtcagctcatttctgtgttaagaaggaagggcttctatatcctgtaca

SEQ ID NO: 29769 - DNA, 2182 bp, Bovine  19866881190260
  misc_feature (1)..(1): n is a, c, g, or t
ntgtgggatcccatgtttcctgtgctcacctccaagaagccttcagtagaaagggaaaactccagagaagaatttataatgacagtagcatcagctttcagctcttgcacttgagttctaaaatgacatataccaggtggtaagaaaatctgtgaaattattcacaatagtcaaggggtgaaagcaaccttcatatccatcaacagatgaatggataaacaaaacatggtgaatatataatggtatattattcagcattaaaaaagaatggaatcttaacatatgctacagcatgaatgaaccttgaggacattaggctaagagaaataaaccaatcacaaatattgcgtgattccttggttaaatatatatgggtatgggttaatgagtgaaaaattcaaattaggtggtaagatcaaattcatttttaaaatgcagtaaactcagacatcatgatggacacaaagagaatgactggacctactctgcaaatccctgaagctagggtcaatttcatgtttggcttttctcaagtgatattttcctagaaaagaaggtactacagtgatgcacttttttttttttctttcagcctcaaatacccctaatatcttctatgtgaaacacgcgtaatatggatacaccaaaaaatacttaagaatccctgtctagacaaacagggttataattcagacctctaaaaagagagatttcatataacacctcaggatttcttagcttttcagaatagctagaagtttcagagaaaagtcaaactctcccttctgattgccttgttgtctgtgtattttccattgtgggacccactcttatccatatttgaaacgaagagacagttgcctttgaactctgtgtatccttgacatcttccattttctgacattcactatctttccaggtttcccgtgatagctcttggattgaaatgtataactattaagacagtattataagtagcccttcctttatgcttagatgtgaaatagtgtgtctccctaagctcaacctattctatatttttaagtttcttgatggttaattccagtccagattttattcctcctgccctcttactcaaggttggattgattttttttttctttcagctgcctaagctataacaattaggggtgtgcaatgaaggataaaatagctctgattctaaattgcatcctagcaaatggggagatttttaaattaagttgttcccgactttactaaacaactgtaatttctaaatttatgattcacatatagttgtgatgtaacttacaggacagcttgatatagtgatgaaaatttaaataattccctaagataaaaaatcaaagagtcatccataagaggtagtagcttccttaatccaaataaagaaagcatggggtcagatggcagagataggaattagaaaacatttgtccatagtgccaaagctaagaattcttcctgaaagctactgctgaaaggattgtggtccaaatggctttatttcccatgttaagaaaaatgtagggacatgatttgtgttcccttcaactacatcctttccaggtatttagcattttctcccttctggttctaacctaccttattttcttcatatatagaatatgttaagtgcttttctccacttcacattatatatttgtgtttattatcagcctccatataactagactataagctccttgtcattccaaagattaaccctttagtaagagttcaataaatatttgtgaactgaaggaatgaatgaacagtgaaacagcctttttattatagtccacattgtattaaaagtgattccattgggaaaccttgtaaatcaatgtattttgggctagtcagattgggtaaatggaacacatttaatagcttctctgagggatccactttttgccaacagtaaagatggatgtcaggtacagtcttcctaacttcatgcttgacagtggaacatgtattttaatgtataaatgtagaatttcctgagttctttgacctaatttttttccagaaatgttagtacatactgctcttgaacaccagtgaaaacaccttgtagtgagatgtctttggcttctttggcattcttaacttctgtcaacaaaaatattaaactatcgatagtaaaagtagagaagagttttatttgagccaa

SEQ ID NO: 29770 - DNA, 701 bp, Bovine  19866881195597
  misc_feature (1)..(1): n is a, c, g, or t
ntgagcttctgattgatggtttccagcagtgtttactgtgggcattacccgaggttcctaagagtgagtatgtattcattcaaatgtaataaatctttaacataacttatctttttaagattccacagttcatataattggcttttacggagaacgcccactttgcttatctgcactgacatctatgatttggcatctttaatttactgtggttcttataaaaagcactgaaacaagaagaggacacatggttaattatgtgccacttgaagagaaatgtaacacacatggaacaaaaatgacttccataaaggaaacattataatctaattggttccttggaccttataaattagagctaattagcaaaaagaaatttttgcatctcagaacgcttatgttgcctggccagaattacatggtcagtcaattggcaagtcaagatttaagcttaagtcttctagtttagaagttaatattcaatatatctgctgttctctccagatgcaataagaagaaaactagaggtgttctgggttttcatggaaattgccacaacttaatgacccaagactggacaaaaagaaattgtcttcactgtttgcattatctataagaaaagcaaggctgttctttgaaaacttgaatctttctctttttcttcagttcctttatttagtaaaagagttttataatttaac

SEQ ID NO: 29771 - DNA, 1156 bp, Bovine  19866881200714
  misc_feature (1)..(1): n is a, c, g, or t
natataactgtcatcctttgtcattagcagcattcttaccttactgaaatatctgagttttgtttttttttaagttttgtttctgttaaccatttagtttgtgtttgattatgtttctataatttgttcttaagttttcaacctctttcttcttcccagctggcctcactattacatctaacattcaattctattctaatagccactagaaattttaacctaccatcactatacttaaaaataatttctcttctgtatctgggtgggcaacttggatcatgacattcctgttgcctcacaccctttttagttattgcttctgatgggtgatgggtgtgttttccttttctagttcagaatttcctccaattaaaaaaattccctgtccataatgtgtatgatggaaataacacttaattggaccaagtgactatttcatttttgctcttctttgaaatatgtttttagatatagaaataaggatgaaaacttacaaataatatccttgtaaagtttcttgaatgattattctgcactttggagtccaaaccttcaactcagcccgattcagtccatcacccactcagtgctgcctggccatcctcaccaaggacctcccttccagcagtggttgactatttagcatcttggttttgttttacttgttctttcataaaaatcaggtgaattccctgagccaggtactgttggttcctgagggacagtgggtaggaatgcactgggtagaaggggaacgctacctgaggacagctatttagtagagacagcttacctgacagcttgctctaaggatcagttccctgaagttattgtaaagcactggactttcaaagccacatgcatggtcccacttgaccacattttttttttcattcttcattttagagaatgactggctctatttgttagaggatagagccatccatatagtggttcattatgatgatggcgagtgggtttacaccctgagtgatgggacattgatcatagccctgccctggcgtagtcccacggtgttaattacggggtgtcagtattaggaagaaaagctaacacctgggagtgccgcttaccctgggtccctggtctgaggatggggggtgtcttcagggacgctctcggttcaagccatggg

SEQ ID NO: 29772 - DNA, 903 bp, Bovine  19866881202830
  misc_feature (1)..(1): n is a, c, g, or t
ntgtgaaaactcctagcaaactcctagcaatagtcaatgtctttcactgatgacttcaccatggggaagaagaaaaaagaataaattgttcaatttagaaatataattttcaacataaatcccaccaatatgttgttgttgttcagtcgctaagttgtgtctgactctttgcaaccccatgaactgcagcacgccaggcttctctttccatcatgatctcccggagctgctcatactcgtgtccattgagtcagtgatgccatccaatcatcccatcctctgtgcccatctcctcttgccctcaatctttcccagcatcaaggtcttttccaaagaatcagcactggccaaagtattcagtacttagttaattgagatacgtataagcttatgcattttggcaaaataaaagcgaaacttgcttacctttttgaaaatatcaaagacctgttccagagagactgataactctttctatctgtctctttctgtgttacatatgcttgtaatggttattttcattcattagagagggatttaagcttttcaatttttctaactttaatactgctgttatgtaagagaaggaaaagctctgaggagccttcctagaagagataattgtgcagaactcctggtctccttcttcagtcgtgtaacatatatcagttggtaatggttaattagtgtatgcacttgcaatttggtctcctgaggagggaaattacatttcttacttttaacctagaagagcatagaattctgtgaatgtgttcatcttactaagactttacagccttgccttaagcatctgttgaggggaatggaatggaaacaagagaaaatgacaagccatttgctgagtacgccatttataacaagaagtacctaaggtgttaggtg

SEQ ID NO: 29773 - DNA, 759 bp, Bovine  19866881242683
  misc_feature (1)..(1): n is a, c, g, or t
nctggcccaaactgtagtgaagttactgggaatggaagtttgaggacatattgaaaagatataaaaacgacctcccttcatagggttgtgtttcatggcattgggaaatcttcctctttaggtttaaggagctttttattttatctttatagtgtaaggtcattgtacttttgtctcatcattttcttagtttccagataacagcttactaaaacttttattcaggtgcttatttttattttattactacatcagttagcattagttattatattataattgactacagttgagaacatgaccctatttatattggataataaacataatacagtgcaattcaacaagtattatacctacttactatgattagtctactagtgatactcaaaaatgacatatacactatgtactaaagaacttaatgataatgtggatcatttgatattgactgtctttatgattagtgtggatggataactaaccatctggtatctcctcctaatcttcctcaaagaggaataatatggtggaaagtaaagggactctattcgcttttaaatagtccctgcaaggtgatttcaccatgctttattattcattatattaaagacagttcatgaagcatgaagcagtcatttctgtagttttaaaagaggtcacgagctgattcattcaggtttgtaattccctctgaaaccatctttgagccaaagatatttgaagatatatttctatagctacagatacacacacaca

SEQ ID NO: 29774 - DNA, 683 bp, Bovine  19866881333124
  misc_feature (1)..(1): n is a, c, g, or t
ncaccacccttatggcagaaagtgaagaggaactaaaaagcctcttgatgaaagtgaaagaggaaagtgaaaaagttggcttaaagctcaaccattcagaaaactaaaaactgaaaaactcaacatgatctttcccaaaatgtaattaaattatttcataaagtaaataaagttttaattagtacactgccaataactgaggagacattttttacatgttagaggttttaacagccttaactaattaattagctataaactgaataaagttagcagtttatagtcattgggaaagatattacatctatcccggattagaaaatgttgacccagcattttcatgttatacagaaatcactaaacagtggttaccctgctatgcacaatagatctgcatcctttctacggtggttaatgggtatgtggattgcaaaaaaggtcatggaattttctccttaagggggaagggaataagtttagtttagtgttgtgatttgaagtggaaaaatgatataaatttgtccaacctttccatctatgtcagaagttttacacttggtcatctacagggtactacaagctggactagcttcaggaaagtcagtgtattccacgaattgggtcaggttctacaccactgagagggtgggtggtataacatagtaattacagtaatacaagta

SEQ ID NO: 29775 - DNA, 1555 bp, Bovine  19866881371913
  misc_feature (1)..(1): n is a, c, g, or t
nttctatttactacactttgctttggacaacctttgaaaatcagagccattctgaaaggaaaaaagcaacccaaacaagaaagaaaactcaccactgagttgactcattggaaaagaccctgatgctgggagggtttgggggcaggaggagaaggggacgacaaaggatgagatggctggatggcatcaccaactcgatggacatgagtttgagtgaactctgggagttggtgatggacagggaggcctggcgtgctgtgattcatggggtcgcaaagagtcagacacgactgagcaactgaactgaactgaactgaaggatattaaaaagacagtgacttcaattctaatggcagttccaacagaacagattaaaaatacttaggacaatactggaaatcactacatagcttccaatgtgacttgtttgaaggaaacaatactcttctagatttaggaattcttattttaagttggttccattgctggataattatttatgccatgttaatctatcaatcagggatacttaaaatccttcagctacgcttcctctctcctataaagtatttcacggaacaatggaacaacagaaaaaattattccttaatttattagactcccactcattagctgcagagtattgttaaatttatttctctttcttggacatcagttttatgttgaattcctataacaaattgtggtgcctaattaactaataaagtctctggcatatagtagtctctcaaaaaaatgtgtgttcacttccacacattggtatttgattaggatttgttgctacacccagaagtaacaattaaaaatgaaactcttgagatttcaaaggactgagtatgaaagatttaggtttcaaattaggaagaattttcttttaccaacacctgtgataaaaaaacaaaccttaataggaacatttaaggaaaataatatacaaagacatattgtcagagtttatttgcaaagaatagaattcagtttagctagtttacaagactttcagatttggggaaagggataacgggacttagtctgggttgaagtttcaggaaagcttcccacagccatatttcactgttggggcattaacctgcattgaatagtatcccctcaaattcatgtttaactgaatcctgtaaatgtaaccttttttggaaacaggatcttgcaaatgttatcaagatgaggttgtactggattagggcaagccttaagtgaacatctagcatccttaaaagaaggcaaagcagaagagacactgacccatgagaaaaggacatttgaagctgaagacagggattggagtgaggcatctacaagccaaggaaagccaagaattgtcagcaacccccaaaatccagaagagtcagggaaggattgtccctagagccttcagagagaaagcagagctctaccaataacttgattttggacttgtagcctgcagaattgtgaaagaatacattcacgttgtcttatttttattattattatcatcattttttaatttatatattttaatggaggctaatta

SEQ ID NO: 29776 - DNA, 1625 bp, Bovine  19866881394471
  misc_feature (1)..(1): n is a, c, g, or t
naaagtcccatagtttgagtggctcgaacaacaggagtttattgtctcaccatatatgagagtctagaagtgtgagaaggttctagcaggttcggtttcttctgcaggctgtgaggaagagtctgtttgatgcctctctcctaacttctaggcttttgctggcattctctgttgttccttggcttctgctgcatcaccctgatctctgccttcctcttcacctggtgttctccttgtgtgtgtgcctgtgtccaaatttccccattttacaaagtcagcagtcatattggattagggacccatcctactccagtatgacctcatcttaatttcttacatggacaatagccgtattcccaataaggtcacattctgaggtcctgggaggtaagacttcagcataggaatcctgggggaccagtaacaacacgtgatagcaaattatgatcagaaagaacagtatatgaccttcatgcagttggcctgcttctattgtggacagtgcttagaattcaggttagcagatctaagttatttatctgcaatagcacagccagccaggacagctaaatgtattgagcttttttctaatgtcagtggacaatagttataggtatttattattgctatgatcaggagttcagaaaacatcatatcttgccccctaggttgtggcttcaagttacattcagttctggggcctgcatctttaaagcaactggtattggaagacacaaaaaatgatccttcttgctaaaccttgacagcttttggcgtttgcctttaagggggaataccgttgacacttttgaaattcttttgaccatttagggtcttagtatcttaataaaacattctattctaaagggtatttcctcatataaaaatataggtactgcattcaaaataaaaatttgaaattttatcctctatacctctcactgaaatagtggcttccttaaatttttgagcaaagttgagcgattgattttatcacctgtgattcatatttaattttaattgaaaaatggaatcatcaaaaagaaattaagaggaggcaaagagggaaaaagagagaaaagcgggtgaccgaatgtgaagaaaagaagaaaaaagaccttcatctaacttttcagaaagtctttcttaagtaagtactgtcattttgtaaataattctgtctagagaagataaaaggagcagattggccaattaccttcaaactgtttgatcacatccatgtttttgttaattattcaagttttaagagtcatcaaagaatcctaatgcataactcaataggaggagcaaaagcgaagacatgggcaaattctttttatgtttgagattttgcccacttatgagcacatgtgcttttgagtgttgatctgatttaaaccctgttcgtggagaggagggtgatagtttagtctttggaaaaagaggaagaaggacataaagatgcttaaaaagtcagcaagtagagtagaggtgtaggatgaaagtgaagtccttgacattatgtgacccactctgtctttccccattgcacccacatccttggcccagccacacatctgttgctccagtccaagtgataatcaaccatatacaggatagaacca

SEQ ID NO: 29777 - DNA, 1332 bp, Bovine  19866881412821
  misc_feature (1)..(1): n is a, c, g, or t
nctttttttttttttttaatgtcatcacacagattggcatgaagagaaaaatgtcttaaaaatagtgagtaccttaaattttggcatcatttaagtcaatgttaattacctgataccttggctgcgaatagcccaaaactttagcaaacagctaacgtattttaagttctcctttctgtcactgggcagaggctgtctctcttatccttttttatattccacctttcctagctgctgatgaggtaacctgctgctcttagcattctaaaaattctctccagttttctcagggaagggtgtctcttaggactcgtcctcttgatcagagctgaataattctgaggtctgtttgcaaaattatttcagttctcagttaccatatccctggagataatgaacggtaagatttcttcctcgaaatgttgagtcttggaaaggtaacaagcatatttaagtttggggcctttctttgcactaacatttctttccccattgaaaccagactccctggaatatactttcaacttattttgcaattcccagagtgctagagttctctgttccccttggtaaaattcacatagttgttagctggtggtatagtgggaaatctctgctgtccagtgaattgcattggttggtctttgtattagttttctatagctgctataataaattaccacaaacctactggcttaagacagcatgaattaattatcttatagttctgcaagtcagaagtctatatggtctcactgggctaaaatcaaggtgtcaggaggactgtgtccttttaggagcctctagagaagaatctgtttccttgactttttttttttaagactttatttttcagagcagttttaggttcagagcaaaattaagaggaaggtatgaagatttcccatttatcgcttgtttccacacatgcatagctgccatgactatggggggcacaccccaacagtgtggtacatttgttatagcctgtcagcctacactgacacatccttattcttctaagtccacagttgtatattacagttcactcttggtgttacacattctgtgagtttggataaacgtataatgacaggcaccaccattataataccatatcgagtgttttcacatccctaaaaatcctgtgttctgcttgctaacctcctcccacttgcctggcaaccacggatctttactgtttccatggttttgcttttcccaaaatgtgcattggaatgtgcatttaaggtttctccatgtcttttcctgacttaatagctcatttctttttagctatgagcactgtgcattttactgtatgtttcatag

SEQ ID NO: 29778 - DNA, 1589 bp, Bovine  19866881475818
  misc_feature (1)..(1): n is a, c, g, or t
naccgaggcttcttatcgttttagcggtgctgacgtgacacggagactgaacaccctggaatgtgacacaggggaaaggagaaggcggaggaaaaggcacagagcctgctctctccggggcccacagccacttgcaaacacaagaaaaggtgacaaggtctgtagaaccaatccgtgttcttaaaatgcctgtgaaaggcagtgcctgcagagcagaacaactaactacagcgtttctggagagtttaacagaacaggctacttgccaatcagtgtttattaaggcctaaacacacaggtgttctgtgctgggaacggcacacagcaaggccgccgctcctggccttgccccttggattgtacagctttaaaaacaggcatcggagagacacaagccataagtgttttgtgcccacctcaacattccaccgccaccacctaaacaagagaaagaacatgtcattcaaacaggaaggccacagaagctctgccctcagagtcggaggcaaaagcaaacagggaagagcgttcgggggccacagggcagctgggagtcagccgccccaccaggagccaaagtgcttttcctcctaactcggccatccacgatcactattcacccagcgccgggggctctgacagcatagggaaccacaagtgaaagaagcactggccttgtccccacgctgaagtctgctttaggcataaaagcaggtgagtgaggtggatggagacccttttccctggttcttcatctgccacctcagacgctaatgatgcactctgttacaaggcaaagtttaaatccctggatgtcctttctcactacgctcaacaaaattctcccggcatgatgtctgggctttccttcgtgtgtgctcagagaatacaaatccctttgaatattggtataaaccaaaaacaattatgaaggttaaaagcaatacacggcactgaaatttactctgaaatgcaggggggaagtagtaatatggattgatgaaatggacagaaaaggtagagagatggacaagtgatgaaataagtatggtaaagtattaatgctaaaatacaggtgaggaacatatgcgtgttcactgtaaatttcttccaacttcgctgcatgcttgaaattttttcagaagaaattgttgaaagcaatttttaaataaccctgcatttaccctagaataataggtaaggacaagggcaaattaatactatattttttaataaaaataggttataaaataccatgtataatgtaatcccaattttgtgcataaacagtaaataccaaaatactgctttctcttttggaaacaggattacgggtgatttatactttcttctctgtgcctttctacattttccaatttttcttcaatgagcatgtattgctttgcaatcaaaattttactttattacattaaagtttaaacaaaatctctgaagccaaatctcaattacttactattgagaattatatggactgaaataagttttacttttgtgggtttttttaatatagacatgcagctccctaagtaccagatctctgaacaaacaaactcagtagagggcaatcc

SEQ ID NO: 29779 - DNA, 1337 bp, Bovine  19866881477925
  misc_feature (1)..(1): n is a, c, g, or t
ntcacattttacaaacagtcttatggaataatcagaatttatacatgtgaaaattggaaatatgaacagctaaaatgaccagaccataagtggtggacctggaataagaatccagatcctctgatatcttctgttgtgttcttcaaaaaatttgatgaccatgagccatcaagaaaagatcaagtacagtgtttcaggtgttcgttatcccaaaacacagtggcttagaacagcagcaagcagtcatttgctcatatgatactttgcaatctgggcatgaccctggagggggctcatctctgagccccgcaatgtccctggggaatatccatggtgaatatcccggaatatccacagaatgtcagctggctccactaaattgagactggagaatccattcataaggtgcttcactcttaggtgtgacaagtagattttggctgttgactggaaggtcatctaggcctgtcagtcagggacctcagacctccttgttggctccccatgagatgcaaggtgcctcatgggggttcctggcttcctatgcagcacaaaagcagaagctgctaggccttcttaagtgttaggcctagagctagcagaatatcacgtttgcggcattcttctggttaaagccgatcacagagctagtccagacttccagactcaagaggagaagactccacaagtgcacaaataaattgagggtggggggttgcagtctcttgaggaccactgatgtaactgactgttacatcacatacagtttagagtattcagattaagaaggacagatgtagtagaccgtttagaaaggtttctagagagtcaggtatttacaaaaataaactttagttaatggaaaatatttgttacttcctccaacgagccaggtaaaagaatccactgtaatttgaaaagggttctaaaataatctatcttaactattttttccttttagcagtttgttatctgatttcggatagagcttttcagtgaagatgtgatggattacccattgcttagtgttggatctttgtgagtgtccaatgttttctagcattcttactggacatagagtcctgagtacagcctctcattcacatttctatgtcaccctaaagaaatcacttatatttcataaacacgttttcgaagaagagccaagaagatacctcaaagatgagatgttggtttgtgtgttatgtatttaactctattcagcaagtggaacctgcagttctattaagaattgaaaaatcaactattgtcaccaactttgcagctgggaaagatagtggagttctttccagttaaatacataggctggccctgaa

SEQ ID NO: 29780 - DNA, 1805 bp, Bovine  19866881529206
  misc_feature (1)..(1): n is a, c, g, or t
natactggagtgggtaacctttcccttctccgaggatcttccaacccagggatcaaacccaggtctccctcatttcaggcagattctttagcagctgagccacagaggaagcccaagaatactagaatgcgtagcctatcccttctccaggggatcttcctaacccaggaatcgaaccagggtctcctgcaattccggcggattctttaccaactgagctgtcagagaagcccagtattctatgttgcttttattgaaaataagaaatctgttttgtgtaaaagagaaaaagaagtttactaattactcttctcagatgttaattgtattaccagtacttatttacttggaatctttgcataataatcacaagctttgatgtatgctacagtattgatgtactgtaatgtaaatataaattccatttgtattagagaattccctgcacagcttctctgaagttaatgaatttgtacaatacatcacagactgagtatttcttcctctttttgatgtgatgtgagtggattatattatataaacatttgaccctttttctcaaagaggctgagattattctaagagaaagacttgtgtcttttacttgtcattgatcacagtttacaattctccagatgtactgaataagtagagaatatcagatatttgaaaattttcatttaattagcttttaattaactttctatgtcctttaatgagaatcccagttctttgtaatcatacagagttcgtgactcctatgcttccttaatgccactgaaactgtaattttaaataataattggttacttaaaatatagtagcatggtagataagctataagtctatggctttgaattagcatgctctttgacaaagtttttatcccactgctttgggaaccagaaaatttaagaaagagttgtttaaaattgtataaaacccagaagtagaaaaaacgagttcttaaatcatgtgacacaaatattagtgaaccagataagtaaaaattgaactggcccaagaattacctctatccctcacctccatctctactccactcccaccacccccaagagagcccagcacaatgtggggaagaacatactcaatgagctagtgagtcaaaaaatttttttactaaaaaatctaaattttttaaaggtaaaaattctactcttgcctgaaatactgtagttttctataatattgttgaggtcttctataaaatgtcactgaactgatgtcgccattcaccattttgtgatgattgatctaagattgtgatgaatcttgcctttgaaccttatagtaaaaatagtttaaagggtaaacaaaaagaattataaggcagcgggtgacatgttttattacctgagaacaaaatatacttaagaaacctacttatgttaaaactgatgattattgatgtactctccttatttggtagtagtgttaactagaaaactaaacaacttgttcaaaattgcaaagcaagagttttgctttcatttagtaagtccagtaatatatatatatatatatatatatatatatatatatatatatatatataaaagtccattatgggttagctggaaatatgaagtatattccaaagcattaaaatttcatcttttaatattttatttgaaagtatttccattctaaatttattttcatacatttagtttagaattcatctcaattagccaaacttatactgagatttttccatcctcgtaaatctttttgctccaaagataaagcttaacagtattgtttattgtttcctgtaaactgca

SEQ ID NO: 29781 - DNA, 662 bp, Bovine  19866881807975
  misc_feature (1)..(1): n is a, c, g, or t
nacacattcatcccaggttgggaaattccagtattaaactatagaaacttttcatcaaggagggaagttcacataaaatgtatccttaaaaaatctcagtgaagcagttctgctctaagtgggtcattgtttaatttttagatatttatatgttttgaagagcaagtaggctttctgttccaaaatagctcaattatgttttgattgcaacatctgattttttccagagatcttggatctcagatactgtaatcatttatacataagttgataattgctttacaaaaataaaaactgttgctgtggtggtggtatagtgtgggcatgtgtggtgtcttctctcatcctagagatttcacagtgtactgagctctgttgattggtaaaatacgctgtttgattctgcatgattgcagatatcttcagtttgccaggtaacaaacaagaggaaatgagctggagtctgtggacctggcagggccttgtctgggggtggggaatgaagtgagatctcgcagcagctcacccatctctttgaccttgagcagatgtcttttgctctgcatacttggcttcattggcttcctgagcaaagaccttggaaatgaaataacactcagtccatttatccaaaactcccccaagggatacacttttaaaaa

SEQ ID NO: 29782 - DNA, 699 bp, Bovine  19866881918518
  misc_feature (1)..(1): n is a, c, g, or t
ntgtttgttagcctctgtcttctttggagaaatgtctgtttagttctttggcccaggatcctctatgacccacctcccagagtaatggaaataaaagcaaaaataaacaaatggtacctaattaaacttaaaaagcttttgcacaatgaaggaaactataagcaaggtgaaaagacagccttcagaatgggagaggataatggcaaatgaagcaactgacagaactaatctcaaaagcatacaagcaactcctgcagctcaattgcaaaaaaataagcatcccaatcaaaaaatgggccaaataattaattttatacttcttgaaaaaaacaaatacagaagataactgtgtgtaaaggtggtggggagttggagaagtaaaggtcatgaatattcactgtgtgtcttactggctaacaattagaagaggagttttacaggttgacaggactattttgtctagtatccaaaaaacctgcattgaaaccccttttcatttggttttcctggatattttctcttcctgtgtcacccacccccactcctccagagtatttcaagttggacctgcagggacccttttgaaggttaaatggagttcaagggcttccattcttagtttccctgctgagacaaaagatacactaattaatggcttttatgaagactgactttttacggaaataaaaccaaatattc

SEQ ID NO: 29783 - DNA, 1320 bp, Bovine  19866881929687
  misc_feature (1)..(1): n is a, c, g, or t
ncttatttttataaacttgtaggtcaaataatttatacaaatagaaaatgaactctaacagagagttcagactacacacaggatgcacagaagcttcaattcttgatatgtaccttgtcagcttgtgtttaccttcaattttttttttcccctcactaatcaaccaatagtcatgctccacaaacttccaaattattggaatgggttatttttgaatcccattcccttatacgatgaacttcagaaactatacattaagtggaaaattaagtacaattgtctatttttaaacatgaagacaatgctaattacaattctccagataaacatacataattatagtaattacaattcaacaataactcactggtacttactattataaactcataaactattattcagtaccctataaaattcaaatttaattgaaagtgctagtttagcataattcccacaagccatcatctttaatattctggaatgaatgaggttttggttgagctattaattgatactgacaagcaataaccactggaatgaaactgcaattatgagtggcaattaatcacatttgctgtcatctctagtgtcaaacaaaattcaataatattctaaatagtttttaaaagtttatatcttttatgtttcaattcactaactggaaaccaaaagcagttttctgagataatcaaataacatccaaaatatgtcaaacatgtaaaatatgaacactgtatttcttacctctaaaagcttttctttttttccccccaaattattttcaggataaatctttgtctttgcagactagtaaaagcacctcatttcaccttccacttgccttaattcagtacatcattttgactcatagatcaccctcagacacagcaaaaattgcacatgcagaagaagttcctgagagcaggaacttcagtaagcatcgttaaggacttgagataatttgacagcgaatttttagaagcttcaattgatcaatgtctctttgaatcggggcaaggaggtagcaggatttaatttcttttcccctcattatttctaattaacaggacaaccagtgatgttctttgctgtaacctaaggcacgcataccccagcatccttcaccaattgaccaagtctgttcaaaagccgccggaagtttccttttgctaccaaggttatgacctcaagagtgaaacgaatgaatgtatttgctgtaaactgagctagggccatctaccagatgatcacacaaacggcagtgttaacaacacaagatctaatcccagacaaatgaaaacttgatgcaaggtggag

SEQ ID NO: 29784 - DNA, 1793 bp, Bovine  19866880624392
  misc_feature (1)..(1): n is a, c, g, or t
ncctccaagcttcctctactcttggccccattcctgctatgctgagcttggaaaattcagaccgctttcctgggagcctccagcccccaccaaaaattattactccgccccaccatccaccatggcccctgatgttctatttcttgtatcagccaccatcatacccaaggatatgtttttctacagcttcctgaagccctggctgggtgagtaactgtgagtgaaggggatgatcttgggggcccaggaaaaggttcttttgcttactccccatggctgtctctgctaggggatgggctcctgctgagtgctggtgacaagtggagcagccaccgtcgcctgctgacacctgccttccacttcgagattttgaagccctatatgaagattttcaacaagagcgcagacatcatgcacgtgagtctcttgaacccagggtcccagctggagcattgggaaagggggaatgggcctcaacacatatggtctggaatcctgattcagctggatggctttgggggggtcactgattttcctctctaagcctcaatttcctcatctgtaaaactgggatgaaagtgaaagtcgctcagtcgtgtcctactctttgcgaccccatggactatacagtccatggaattctccaggacagaattctggagtgggtagcctttcccttctccacaggatcttcccaacccagggatcgaactcaggtctcccacattgaaggcagattctttgccagctgagccactagagaagcccaagaatactggagtgggtagcctatcctttctccaggggatcttcccaacccaggaatcaaaccagggtctcttgcattgcaggcagatttttaccatttgagctaccccttttaaaagattgtgatgctgggaaagattgaaggcaaaaggagatgaaggtggcagaggatgagatggttagatagcatcaccgagtcaatggacatgaatttgagcaaactccaggaggtagtgaaggacagggaatcctggtgtgctgcagtccatggggttgcaaagagtcagacatgacttagcaactgaacaacaacaacaaaagggtggtcaagatgacgtaatggaatcaggttcctggcacacattaggtactcagaaagttttagatgctagtctgcttcatggaagctctataaattcaggacacaaatgatgaacattgcatagtagttctttctgcaccaccttaaaactttctgcatacccccttaaaacccgtggacttgaaagaattagtgtttattattgttcatgagatgatacatcagttgagtcattctcatcctggttggaatcatgcatgcatttgtggtcatgggtgggttatgtagacagctcctgctgttctggatttagctttggcatgtactcagagcttggctagctgtcagctggtttaggatagccttggtgggacaatggactcctgtatttgtctctcatcttctggtagctctcatcacctgagcttgactgcatggtggaggctgggctccaagagaatgagcaaacatgcagtatctcttgaaacctagtttggaaactagcacaccacctcctgttaactgaagcaagtcccagctcagtccagattcaacaggtggagaaagaggttgctcttcctaatgaaggagctgtgaaatctcattgcaaagagtgaaggtgaagggaaggatgaagaaatggggacccatttgcagttgtctttcactatatagtgatgaagatgatgatgatagttaaaag

SEQ ID NO: 29785 - DNA, 1078 bp, Bovine  19866880792933
  misc_feature (1)..(1): n is a, c, g, or t
ncgctctagaacccgtgagtgtggttggagtccggtgagtgtttcctgaggggcttccctggtggctcagccggtgaagaatctgcctgtgacacaggagatgcacattcgatccccgggtcgggaagagcccctggaggagggcatggcaacccactccagtactcttgcctggagaatcccatggacagaggggcctggtgggctggagtccgtagggtagcaaagaactggacacgactaaagcaacggagcacgcactgtttcctgggacaggactggggagggttatggggacggaaacaccaaggcccggagaggtgaagctgtttgccctgggtctctcagccagccagtggtgcactgagattgaatggggcgggggagtcgcacacgggccccggccgctccagcgagcctggcgctctggttcaccctgctctgagcatcttgcccaggggccacagggctgccgaagaacgtgaagcttcgcgcttcccccgggaacaactggcagcccagtcagggtttatatagcggctcccaaaatatcaggccgtggataggctgaggcggctgagggtgcggcaggccaatgccgtggcttcctgtcctgccaagatgtttcctgctgatagctgggcccagtggccttatctgtgaccctggggccaccaggaggacacccccccccccccaacaaggggacagactgttctaggtcccagggaaggggctgcagggacccaggagggggtcagggcgagcagccctctgagcgtggtgggtagttaggtccactctcaagttttgagatggagtggagcccgactgccccaagtgaaactgcagctctgcggctacagtgactgtgtgaccctcaggagctgagtcccactcagagtcaccctcatccatcaaatggggatagtggtggcttcattttcacttaacattccccaccctggccttcccagcctgggcatcaaggagcctccagtctgggggagatgcctcctgcacacacagccctacaggctcagagctcagctagaaggaggcggaagattccaggtgt

SEQ ID NO: 29786 - DNA, 798 bp, Bovine  19866880861761
  misc_feature (1)..(1): n is a, c, g, or t
nagtgaactttttaagaagttcgaaacttttccaaaacatctttcctcccaactggatggtcccactcctaagtcttggctccaagctaagggccatttttaagcaggagtaattgtcctccagcgagatggcttgggatgagatcagagggagggttatgccggttacgtgtgtgaaagaggccaaaccagctactgttgggaggcttacaccaggtttctgagggctcttcacgccaaggcggcccttgcaggattaaaggctttgactccagccagcacggaaacaagtctttgggggagtgggggggcggttcttacccagatctgtccatccccacagcagtgccctctgcctgggcatcttttccacttctggggtccccaccctgagtctcaacactccagctttctgataccctgggcctccacactcttcccctaactttctttctgagtctttgcagtctcttgtcccagcaaactcttacttattctaagattgctcaccctccatagtgaagcctatcccactggctggttcttcctgtcatgctcccagttaacagaacacaaacccccgcggcccgccatggtaatcagccttatctgtctgactccccttgcccccactaggctgtaagcccctctacggggagaatgcggggagaaaagcgcaggaatagagcatctagtaggtgccaggcagagaggttttcctccacagtcccttccagcaatcctaccggggggagggcattattgtcacctcgacttcggagacacgctcctcctagg

SEQ ID NO: 29787 - DNA, 760 bp, Bovine  19866880974403
  misc_feature (1)..(1): n is a, c, g, or t
nccgtgcgggctggcgcccttccttaacttcacccaaagctggagtgtgcccccgctgcccggcagtgctggaggagagagtgccagccaacagtccgatcccctggcctcctctgggagttgctctgggcctgtacccttagttgaggtcccctcgtacctgaggcggtttttctaggcagtattaccttgcgttaagaacactttccccaaaatagatctcagaaagcatctgagaataaaaacaagactccaacttaattatttcacccctcccaccctaggattttttttaaaaaagccagctatgaaatacttgagtgccctttgtcagcccattttcagttgtttttcaagcatgcatttctatttagggcttttttttttaagttgagagtcatttgttttaagtcagttttttaaactgtaaaccttttagagctgcgtcttgtatagtagcttttttgtctgtgtgttttcctttttttttttttctgtttttggagcacacttcactatagcctagccagagagcccctaccggctttactgaaacccttctaaaaatagcaactttccctgaagctgcagcctgagtaggaaccagtcaggtcccagaggaggcttcttgggaaacttcaagtcatgaaagtcaggattcggaaatgacgcaggctttttggtgtcagaagtgataaaactccctgctgtgggcgaactctttctccttggagcgggtccaccagccacgcggtgggtt

SEQ ID NO: 29788 - DNA, 730 bp, Bovine  19866880974749
  misc_feature (1)..(1): n is a, c, g, or t
ntgccctgaggagttctgatactggcggacatggagcctacatggggaggggctggtatggtgtttgagagggtgtgtgtgtatgcacactgtggggaacgggcaggggaccgactgccacaaaactaggcagttacaatgttaagggacctgggctgtgatgggggcagctcagggaggggtttagggaagcccagagaagatccccaactctgggggatctgagcagattcccagaggaaggcatgccacccactgatccattgcttcattcagccaaggtttcattgataacactggggtgatacagacatgagctctagaggaaagaagggtattaatcaaacacttgtccaaatgactgcaaatcgatcctggagaagtatttctgggggtgaggtccctgatgctttgagttgtgtgaagggagacaatagaaggccaggaagagaaagcttctttaagtgagcagatgcaggcaggagcgtgtacaacaaagggcagggaggcatccagggtgaggaccagcatggggtgtgtgatccactggggcagtggccctgggaactggagagcggaggatgtagagtaacacacacacacaccccgccccctactcaggcagtctatgtcctctctctctccacagtggctaactttgacccgggcaccttcagcctgatgcgctgtgacttctgcggggccggctttgacactcgggtcggcctgt

SEQ ID NO: 29789 - DNA, 1833 bp, Bovine  19866881027214
  misc_feature (1)..(1): n is a, c, g, or t
nggcagacttcagtattgctaggacagagggtggcaccccagccacctcagagagaggtcgtgtcggtgaaagcatgggccagctcctcgctggtagctttgtatgtgagtgtctgagtgtatagctcatctagagcgcagaggtccccaaggagagagttcagaagaggtacaggggctagaaggcgagggttggaatggagagccacacattgagaggaagaaaacaacagagaacaaagcgcgaactaggacaaggttgcgtctcgtgaaacaaacgagaaaacataagacctacggagtgatttctaagtggagtgaagctctgcaggggaccagccataatgaaactttagaaagagtggtgactagaaccggtgagagcttctccccaccaatctcccatcccaggttatttgactttgcagtgatgtcatccagtccaaaggtcatactttggaatgggggcattttgccttatatggaaacctcacttctcaaaccaaataccgggacacgtggtctgaagaaggagttctgtaccctttctgggtgggacaggcagtttgggagaactgaaattccaggattctggaatttccgggtgactccgcaaagagcacagggcagaattttttttaaagatgaaacacttcaagaaattctgggatacgtgggcaccagactcacagactggagtctttattcaggtctctacggtctctaaatttccattttctcatattgtgataagctttgcgctctctgggagagagtttccataaaacatgcaaggcatttaaaaaatgtgaggcgtctcagaaatgagcaaattgaaggaaactcgaaagagctaaaaaatcagccatatttggatctctgtacttacatatggagttaattacgcagaaatattttagttctggaaaaatggcaacactagtttgaatctgattttgcactgtcccgtcccagggctccagacttccagatgtgacatcactctgctcccctgacgtggatgaagcccaaaccagcctttccagatttcccctgactgtggatgtgtcgtgtaagggggaggcagagcaaacacaattagatggtgatttcataccttccaggtcatcaattgtcttttccagttttgcaactgttctctctgcaaattcggcacgggtctcagcctagggcagaagaaaggagtcaccaggactgcttcaagaccaaccccaggagaatcctgagccagctgggtgggaatcacactcacctctttcagtttgtcggacagaagtttaatttcttcttcatatttgtcctccttttcagaatactgcggtagagatcaaaacactactttttaaaacggagggagcaggaggaaagcacaagagaatgcacattccctgatgcttggagaaaagtgcatgcttgaagctatgaacctgcctaagaagcaaagtagagacaggcacctttccaggcagatgaaatgggaggggatccctctgggatgggactgatctcaggacctgagctgacaactcaagatacatgtgtgatgaagacagaggcagatgagtgaatggaaacatgcctctcaaggccctccacagcagctggcctagtctgggtttccaaccccacttcccaccagcttcccgccacttcctaaccctcttcggagtactctctggtctcccagcccttgcctatgtctgggcccccaggcatggaatgtcccattccttgctactgtctgtcagaaggtatgtttgcctttcaaggctcaacgcaggtgagtattagccaaccttcatcatctgccag

SEQ ID NO: 29790 - DNA, 889 bp, Bovine  19866881150201
  misc_feature (1)..(1): n is a, c, g, or t
nagagggacctagcccccctccccccgctcccacttgcagcctcagggtccccgttctcacagtggggacagtggggcacccgacccaagcctgtgggtctcagggagactctattacagtgcccagctcatggtgggcaccagatgaggggtgatgctgggataaacagaggaggcggccctggctgagtctaggagaaggctcggcagggtgcgtgcagggtgagtgggtgttggaagaggccgagcatcgccaagggtggcaagagggggggcacagtgggcatcaggaccacggagcacagtctgtagagcaggggctgcaggaggcaaggttgggaggccagccactgggacctcgctggctgccaaggcatgcgagcttgtgtttttcctgcctgcagggctcctctgtaagcatgagggtcgtagtgtctgggcttctgaggaagggtcacattggtggccaaggaacaggactagagcctgcgccaccagggggaggctggtgcctgagcccagcagaaggaagggtccgggagggtgtcctgtcgggtccctgctgcccgcctcctgggtcctccctccgagagagcttacagcttgtccagagcctgtgtgtctgtctccccctgctcagggcatcatgctggtctacgacatcaccaacgagaagtcctttgataacatccggaactggattcggaacattgaagaggtaagtctccaggagcgccctggtttacccatgagatccctgagcacagaggcacctcgaagtaactcactaggaacaaagagggacgggaatccacacagtcgaccccagaaaccacccaagtgtggcttcgtcacagagcagccccgagagcccgttccgccagccggg

SEQ ID NO: 29791 - DNA, 1044 bp, Bovine  19866881184374
  misc_feature (1)..(1): n is a, c, g, or t
naaatgctaacctattcatctgcctattgtcctatccaccctaatcctcacccatttacccactcatgattcaagtgcccattcatttttttcaaccaccacacacagagcttaactttctacatatctacccactcctttcatctgtctcccagacccacgccctcactgaatcaaggagccaatgttggaattggagtgttatgaagatgctctcatccgagacctggaaattagtggagatgagatctgggctttactgagaatcaactgctacccctaacaatgaccgataccttttatcaaacattttaaactctaggtcttttactgtataaggaactttaaatcaattttacaaatgaggagatcaaggctctgagaaaagtgagggactaacgtcacagagctcatgagaatctccctgcatcgccccactcccctgagacctgcaatttaggggagagtttgagagagctggattgaggggatggagtttgctttctgattggcaaaattcaggggcaaaaaaaccatcgatttttactgaaatcaagattttactggggaacctaatagtgccagactgtttggtacctacagctccactccctactgtaggccacgggggtttgaggcagggggtggacaggccccttagacggctttctctctgctcccaaagcacatcgggccgagtgggcaactcaagtggtgtctccgttgatgcagggagctttgaggggcacgggctggctctgggactccgatgtcctgggaagaagctgcaggttctggatggtatccttcagctgggcctgagtactctctatctcagctagtcggcactcctggggaggcagcggcagtagactcagagccgggtgagggttgcatcccaacttcgcgtttcctcacccagcctaaatctgtcccagggctagggcatgggtctcaccagacttttcagcctgtggccctcattggttgaacgatcgcgccctggatccacttttcgcggtcctgtaggaattacgggtgaaa

SEQ ID NO: 29792 - DNA, 1111 bp, Bovine  19866881212802
  misc_feature (1)..(1): n is a, c, g, or t
naattccttaccgcctggattcctgggtgggctttggtgggggaagcgtgttagctggagaaaagggcactgtgtgagtggaaggctggctgacctttttccttcttaacctggttccacctctgacctccctaggccgaaggtgatgtggcagctctcaatcgacgcatccagctcgttgaggaggagttggacagggctcaggaacgactggccacagccctgcagaagctggaggaggcagaaaaggctgcagatgagagtgagaggtaaggacgctttgaacctggtggcatgagcgtttacttctgggaaattgaggtcctgccatactgccaacctcccggagctggggtgagagtcagtgagatcccaaggacacacgtgtgtacacatacatataaatgggcaacaataccttgtaaaccatcatgctgtgtgtggaggcatttgacgtggcagttatgaaggaaaactaccaccagacagaggagggcaaaaaactgggccgatataaggctgtagctgcgactgtcgtcagcagtctgtccgcagagcgctgtgtctcctgttgtctctgaaagtcactgtgcatgtggttgtcagcattctcaagacatcggtgtccagggtgatatgagaagacgggggatgaaaactggaaatgggctgtctgcatgaataactattagcagtgcttcaggccttgagtcactggacaactgtgtgtcagggacatgcacaaaaccactccaattaatgtatttgcaactgatagcacttcttacctccagggcatcctcctgctgcctccagcagggtgctgtgtcctctcaagcagcacgccttggagcagtctctggaggactatgggcagattgtgtaattcacagaagcggccgtctctgtgcgatggtcagtgggttccttgtgtggtggtggtgcgggctggaccggtggtcctcacgtatctgccacagcatcacaccagaaatctcactggactcatccaccatggttttcaagtttcccaggtggcgctagaacccccctcccagtgcaaccgatgcaaattcgatccctgggtcgggaagatcccctgaagagagca

SEQ ID NO: 29793 - DNA, 1071 bp, Bovine  19866881243468
  misc_feature (1)..(1): n is a, c, g, or t
naaacacaggttcttttttattcctgttttaaggtctatccgactatttctgtgcaaaaacagatttaaaatctcgatggctcagaagccgctggcagctgccaaggccgccctgttctctcaactcccctcaaggggaatctcaggtttgccttgtccatggagattttcctacctgcaggagctgtccctggttccccaaatttccacttcccccatcaccccaagcctggagagggtgggtctctgggattgatgggctgactggctaggatgagatgaacaattcctggaaggaggcctgggtgtttctaccagagaaagcaggatgcatgatgggaatgaaaacagtcatgtggtcaccgtggttgagccaagatttgaagttgggccctacctaggtgaacgtcccagggttagacagtgttgagccctggctggtgggagtgtaaaatggtcaagtcgctgaagtttggtgggtcctccaaaagttaaaggtagaattaccagctgagccacaagggaagcctaagaatactggagtgggtagcctatcccttctccaggggatcttcccgacccaggaatcgaaccagggtctcctgcattgcaggcagattctttaccaactgagctatcagggaagcctagaattacgcaatgatccattcattccagtcctaccacaaagaattgaaaacaggggttcaaatgaaaaagggcttcctaggtggcacagtggtagagagtccaatgcagaagacataagagatggggtttagtccctgggtcaggaagatcccctggagtaagaaatggcaaccgactccagtattcttgcctgaaaaattccatggacagaggagcctggtgagccacagttcacaaggttgcaaagagtcagacacgattgagcgactgagcatccatgcatgtgcttcctgtacccgttcaaataaaacttgtgcgtgcatgttcacagcagcgctagtcagagtctctgaaaggtggaaacaacccagatgtccaccagaggatgaatggataaacaaaatgcagtccatgcatgca

SEQ ID NO: 29794 - DNA, 573 bp, Bovine  19866881347736
  misc_feature (1)..(1): n is a, c, g, or t
ngacttgggaggtgagagcggcggtggcagagcaggtgcacctggaggagggtcccctgggtggagcctggaggggcgccggggtccaggggagcccctccttctggcaggctgggcaggcgcttccaccaggagcccccatgctgggagcgtgggccacgacggcccttcactgggtccggagctggtaatctagaaagagggaggggggcgtccattgtctgctctgaccctagaggaggggccgccccacctgccctggccctggggttgctccctgagcaccaccctggggacagtggcacccccaccaggggccttttcagcatcccccacctgccccatgggcaagtcgcgtgtacctccattctgagtgatgtaacgaacccacggtaaggcctggtagccactcttctcgatgatcttcaggtagcgcacctgcggcacaggtatcagggccctaagcatgcacacgccacccccgctcctggctgcccactgagtcattcctcccggggctgggctgagaccgagagggccagggagagacgaagcaccttagtctgtatcaca

SEQ ID NO: 29795 - DNA, 1208 bp, Bovine  19866881364842
  misc_feature (1)..(1): n is a, c, g, or t
nggcagttggtgtttcccttcactacctcaagagatcaggctgcctgagactgaagccttttcctgggagaagctgaattatggagggggattctgaagcacaacactttctgcccctcttgaatgaggcttctgtccttgtgataaataatctctattctctgtcctttatcccacaagtcccctccagagtcacaaactagtgtcaaacatcctgctgagaagaatctgtctttaatggcttctactatgaaaaagaagaactaatgttcctgagtgggcttcccaggtggcactagcagtaaagaatctgcctgccaatgctggagacataagagatgcaggttcgatccctgggttgggaagatcccctggaggaggacacagcaacccacttctagtattcttgcctggaaaatccccatgtacagagcagcctggtgggcttacagtccatcgggttgcaaagagatggacatgcctgaagagacttagcacgtactcagtgcaatgttcctgagtacttaccatgtcacaggccctgtgctaagccctttacctgcattatctcatctcatctttcccacaacccagagtttgaattgtgtctctctcatgtcctagctgtgtgatcataaacaagtgtcttaacctctctgaaattcagtttcttcacctgtaaaatagaaataattgcaacagtcacctcatagaaatacagcaaggcacatcccttcttttttatcccatgcctgccccagggccccgggcataccttcagctcaggcatgctgccaatgagctcatagggcaccttcacgtcagggcagctggtatagtcgagagggacaagctgaggggccaggtcctggtagcgatagaagagcctggtatggggagggaaaaaatgagaaggtctgggtgatgagtgagggtgagcttgtctctactctctcactttcacagatgctcactatacactgaaggatgctgagccatcagccctgggcccaaccctcacacagagacatctttatctccctagggacaaggccaaggtaaagagaggaccccagggacttccctggaggtccagtgattaagaatccacctgccaatgcaggggccacaggtttggtcccggtctgggaagatcccacatgccatgaggcaactactagctcatacaccacaaccacgaagcccgc

SEQ ID NO: 29796 - DNA, 664 bp, Bovine  19866881366612
  misc_feature (1)..(1): n is a, c, g, or t
ntctagcagcttccattcccttgccctgctatgggatgccctttaattccttacagagttgttttctaagggtaaggaatagaggtgagcttctctggtgagctgcctcccacaactgggagctgaagaggtgcttcatgaacaatgaagacatcgggaagcccagacaccattcttcaagtataacacagaaaaaaacaagagaaaaggactaaggagaccaaaatgctattgccgctgtttgaatgcacagatgaagttccatcccaagatagcttttttttagagataagcccgctggtttttgcatgttctgctgactctcttaagctgctcaagaggttggatgagtctccattcaaaacaatttctatgtagggaaaaacccgctagtggcatgcagatacagatagctactgcatttgagagctcaggccaagttggctcttgttttgatgttgtcagaaaagaatcatatgagcataattttcttttttgaaaccagctcttcacgtgaaccactcacttttggttgcaatccctcaggctatggctcaaaggcagcaagtgcagaaaatgaaaatgagagggcatgaaaatgaggacggtctgtatttcagtcacacagtcacagacgcagcagcagcaggcttgaaagatcaaa

SEQ ID NO: 29797 - DNA, 808 bp, Bovine  19866882052955
  misc_feature (1)..(1): n is a, c, g, or t
naatcaggtgaagaaaaccattctggagagagtgcatagtctgggcaaaagtttggaagtgagggtcagcatgtggggttatttggcatttgctgaaggatgaaagggagaggaatatggcagccagatggggctgggctttcagtgctagcctgagcttgaaatgttttacaagggcaatagggagccatgggaggtgtttgagcaggggaggctcatgttcagatcaggtgttataagaatctccctggggcaggtgtggaggattgcactggaggggtgaggtgggaggtgagagcccagagtggaggcccaaggaggtcataagcagaggtcaagtgtcagaaccttgttttgaggcatcgtcacctcttctctccccacagctgccgttgcccccaaggatgaccttttctatggcttcctgaaaccttggctgggtgagctcgggactgggtaggctggagctggggcttcagggaagagggggtggggcatgaggtttcctggaaaggtccttaacctcgatctcctgggtataggagatgggctgctgctcagcagaggtgacaagtggagccggcaccgccgcctgctgacgcctgccttccatttcgacatcctgaagccctacatgaagatcttcaaccagtgcgctgataccatgcatgtgagtcccaaggtttcttggggagaggatatctggaagtggggctggtccagactccagcttgtgggcaagtcatgcgacatcaggaagcctttgtcagaaagccttacttccttttttttttaaaaaaacaaacta

SEQ ID NO: 29798 - DNA, 2335 bp, Bovine  19866880352450
  misc_feature (1)..(1): n is a, c, g, or t
ntccgtctagttaaggctatggtttttccagtggtcatgtatggatgtgagagttggactgtgaagaaagctgagctccaaagaattgatgcgttttaactgtggtgttggagaagactcttgagagtcccttggactgcaaagagatccgaacagtccattctgaaggagatcagtcctgggtgttctttggaaggaatgatgctaaagctgaaactccaatactttggccacctgatgcgaagagttgactcattgggaaagactctgatgctgggagggattgggggcaggatgagaaggggatgacagaggatgagatggctggatggcatcaccaactcgacggacatgagtttgagtgaactccgggagttggtgatggacagggaggcctggcgtgctgcaatttatggggtcacaaagagtcagacacgactgagtgagtgaaccgaactgaactgaactgaaggttaacatacaaagtagatatatgacagctagaatcacagaaactttcacttaaacactcttggtgcaggatattgtacaacttccacagtatggaagcccagcaaccacagccggcaagaactcaaaatgccaacagacaggtgattgtttctttatggagaaaagtccaatactcacccttccacctcttttgttcttggggttccaacctaacaccactgacactcagtttcttctcttctcttgacctgtacactgcctccttccccaggtattagagtttccatttctcttctggcttttcatctcatctgtgctatcttctggtattttttaaccctattgattttgacagtccttaggagatcagtcctgggtgttctttggaaggaatgatgctaaagctgaaactcgaatactttggccacctcatgcaaagagttgactcattagaaaagagtctgatgttgggagggattgggggcaggaggagaaggggacgacagaggatgaaatggctggatggtatcaccgactcaatggacgtgagtttgactgaactccgggagttggtgatggacagggaggcctggcgtgctgtgattcatggggtctcaaagagttggacatgactgagcaactgaactgaactgaactgaactagcatatagtagaattaatttttttatgctcatgaagtaataaatggatgaatgtatataataaacagaaatgcagattttgctatcaacagagaataccaatcaccatattgctagtggtaaaaaataaaaataaaaactgtaatttaattattctttcttggtttgctgcccccatttaactaattgctttgtataatttttctagttttgtctttgtttttgaaaaattgtcatagttttaatcaagttgaaattactggtgctcagcaaccaatcttataatcaaatatgagtcaccataatatgtccacacattggatacactgcatctttttaaagagtacttcttgggtttgatttttcctttgagattttgatttggctgtgacctccctgactcttttccaacttttttttacccccagaatgaaagagctgtcaagttatcatgccattagaagtgtcatgcaacctagccaaaatagtctcctgctgtcttggagtgtttactaatgattaatattcacttttctgttctcctgaggtcatttataatgctgtgtgtttgtggtctctctgcagggattcatttgacctgacacattacacatctgacacatccaaagcaggtacgctttattataaaaaacaaaaagcacgcttatgacattgtaggatagtatgtttactttcttaaatgatatttatacctaattaataatatcatatcaaaacgtaatatttttctaaaggtcagtattggcacttttccatgtgctgagcagagaaaactgtaaatcagtgcagcttattatttgctacctcacatctgtcatatggccttctcgccattgcctgttgcccttcccaggggaaaacctatatgtcatcctctgtcttaattcttggcgactatgttctctgttaatctgtcaccattggaaatggtttggattaacaaatgcccgaagttttattgatattgactcaaagcgtaatactctaggaatactgaaaatttactaaggggcttgaaaagacctagaagccatcaaggaagaccttaaggaatagatcttaaattgaagatggagatttgttctaggactagtctgggtctggctttccttcccagtgcccctcaaatcagacaggctaagcctccccagcctgccagcacggggaagagaatcaag

SEQ ID NO: 29799 - DNA, 1283 bp, Bovine  19866880466070
  misc_feature (1)..(1): n is a, c, g, or t
nttttttcttacctctaggaaatttgtttccaatgataattcacagaataaaaagtattccttcccaaagtattaagtggtaaaaatagccagtggtgtagaggattagctagatcctttgatgttttgacttccttgtgaggctatccacactagtacaactttaagtggcagcaagttttattttgtgttcctttcttattaccactaatggatactttggatgtttgacctgacttcaatacttacagagagctctgatagaaagcttattatatggtactactctcttggctttgatgttctgtaaaccatgtgtatgattgcttctaggggagaaattcaaactctctgtattttagacacaagtgaattctctttgagacttagacttgtgtccttaatcatgaaatacataagggatatataacaactaaagattatttctagatgctgaaaatggaggtgaactgatgtttatagcatatttagcagtacattctgagaattggtgctgttaggatatccttcaaagtgtgtcattgctctaccctaggatatttttccctttgtattttgagttactttcatttctcccatttcagtgggagagaaaaagtttcattggtaaataaaatggtgatgtcatccatttcagtatctgctatcctcagattatggtagaatttcattgggttactgaaagtataagtgaactctcttaaaaaggaatttaaaaaaacaaaatcatgtccttaataatgcatttattcggtagtttgaaatgaaaaatgctttttttatagatacaatgctgtgtgtggtagtgaggtttttatagtttataaaagttagcttcagtgatgtatagtgtatcaaaaagaaacttatgcaacacatttatcataagaaatagattttccttcctggggatgtgaagaagagaaataataatatgtgtacgtttctattggtaccaggacaactttaggcaaagagtgatttttctacaactctctctcacctagcatacatgttactactacccattcatacaagtagtggatgctgttaattgatcccagagctttttcatgctgagctcatatttgctttcagaatcctcaatatagtgatccaagctttatttagcagactattaaactgaatctcaatctctttttaaggtagataaattcatcagtaacaacatcacttagccattttaaaatatttctcaagttgtgggctatatctatttggaatgtctatggctaaaagta

SEQ ID NO: 29800 - DNA, 703 bp, Bovine  19866880501100
  misc_feature (1)..(1): n is a, c, g, or t
nctgcaaggagaaaagacacgttattttgaaggctcactctactttctatttaagcttttctaggtgcagattccgctcctctgacagcaccacagcactcattatgtactgcaagtcatcaagctgaggttaggagagacaaagcctgttccctgaagcaatttctttcagcagtgctgctggagcatagttcagaattatctttaatatgaatgagaagctagagccacttgaataggcagatggagttttgttttttccccctagaccaggaacttgtctgcttctttttcccaagtacattcatcatcttggttgctattttgtctaaccttgttctgccattctttccaattactcagtttagtttattcattccaggttagctaattggctttgcttagccctccttttcacacatttccatcccattccatgtgtaattcaagtcccattagctcccacttcatttaaaccaacatagggctcctgggagtagtagggctgctggaaacaggtgcaattggccagatggctgccttgccaagaaggaggagcagactgagacagctcccttgccaaattcagactgtgaggctgagacagctaaacgggttagcagaggggtaaacctggatttaattgttacagtccttctgctattggttcccccttagactcgaaatgcatattctctgcagg

SEQ ID NO: 29801 - DNA, 1244 bp, Bovine  19866880623903
  misc_feature (1)..(1): n is a, c, g, or t
naacaaaacagaaagaggccaactataggaaaactatacaactataaaaaaaagatgtatagaacagtcttatggactctgtgggagagggagagggtgggaagatttgggagaatggcattgaaacatgtaaaatatcatgtatgaaacgagatgccagtccaggttcaatgcacgatactggatgcttggggctagtgcactgggacaacccagagggatggtatggggagggaggagagaggagggttcaggatggggagcacaatgtatacctgtgatggattcattttgatatttggcaaaactaatacaattatataaagtttaaaaacaaaataaaatttaaaaaaataaaaaataaaataaaataaaataaaatacacgaaaaaaaaaaaagaaataaaaaaagaagttaggaggaaaaaacagggttttgagataggcagtaaggttgggggaaggtcaatcttgatggtggtggagtagaacacagagccaacaaaataaatgctcattatttcaaactttcaaagaaaaatttctttaacaaaacctttgatttgccaaagaaaaagagcctagctttactgaatgttcatttacaactttaatgtatcaaactttacagaaaattcaaaattgactcatatacctcattaccaaaaggcagtagtcctaattaaacatttgataaagaggacattttgataaaaatttctatcataaaaaaagtggtagtatcagttggaacagtacctttcaaagtcaattctgaaaaaagttcctgtgcacataactatggctaaatatttccattttgattgctgaggtcttttgaagtcctgatttataagcaatcagtgggaaaaattaagtttatatttagaaggcacaactgtcttaacagctggtcaccctgacacagcccatatggaatgtagtaatatgtgagttaacacattttgtccctcatcttgcttccaaagtagataatgcaaaaagatctgtgcaaatactttggggccagaaattcatttattagttaattactgaagttttaaaaaaatctcccaatttcatttctaaaaaactaactacattaagaattcacaattggtaggaaaatacgatgactgttttctagccctgcagataagcctgacttttagagacagatggtatatgacattcaccaccatctttttggttctggattataccctgactttagtactttatta

SEQ ID NO: 29802 - DNA, 1369 bp, Bovine  19866880625589
  misc_feature (1)..(1): n is a, c, g, or t
nagtgggtctaacttcttttaacagcaattgccattatctttctgttaatctcatatccttttctccaggagagaggaaatcagcctttcaacagaatattttagaatttagttataaattcatctaactgcccaccattttagagtttagaagtgtgttttggtggagtttcaaaagaaacaaggatagctgatggtaagattggtaaagctctggacaagacagctataagtaatttttcaagaatgtcatctattatgaggataacataatagatgtcatgttattctccccaaagacaccaatttcacaccactggagagcatttttcacttcccttctgacatctccaggcactcagttgcaacacatagaaagcagtgctttgaaggataaaaaggcatattcagcccgcaattttggcttgctttccctattatttttcctcagaattatgtaatctttgggttgttccagaaaataattaaaatgatcatcatctgtataggatcctgtccaatatgcttaaagatttttaatcacacttcaggtcgtgtttgagttttgcatgcaacctccactgggctagaaaaatgtaagcactaagggatggcaatggtcttcttatctaacatcaggaaaaagaaaaattattttcttattttccccaaagggaaaattctttaagtaagctgattgaactagggaccatgggtattatgaggcacagtgtaaagtgtgtgtctgctataagcctatacctttttaataaaatattatttcagctgattgaactggggattattggttatatgaagggcacgataaaattgtgtgtctccattacaaacctaaatctttttttaatagagtgtttgggccattatattttcacatttgcttttgaataggtaatgactatcaatcatgctcttctatgataaacttgcattatgattcctaaaagcctttgcattaaaatgtgagaatgagtaggagtgatttgtacctttgactgctattgtcattagcattagatgattcctcctaatacttttcacttgagtggctattacaaaattataatttttcaaatggatatttaaaaatcacagaaaaaacaaatggggtgtacaaaggtggaaactactcatgcaggaagtgttgttctttcctgggaagctctataatttcctgggaaatgctgtcataaaacgtttcatatttttaggatgctttcactatgaaaaacctgctatatttcaatacttcctctctccttttatttcaaaaggaaaaatccaagcttcatgtgttttaaataaatgattgccttcacgctccccttcttctatattccatttgcca

SEQ ID NO: 29803 - DNA, 1340 bp, Bovine  19866880679402
  misc_feature (1)..(1): n is a, c, g, or t
nacttgtcatgttaaggacactgcaaattcagcttgaatatactttgcttttcgcattaatagcatgtgaggacacttacacctctcatcatcacttcagcaccttgagaagaccaatgttcttattctcctctcaaaggaccactattacttcagcgcgtgacttctcaatcctttgtgatattaaccccttaaattaaactcacttggaattgaagactggctcaagagcacttgctttcctttagagttccacctggaaaattcagaagtattcaaaccctccactgttgattaaaatctgttctgatatcattgagagtcaagcattcatttactcagaatggcagggatttgataaaacatcacagataaaatgctaaatcacagcagagtttagcagtgctcctgctctaattttgagttctttagttaagtgaaactaagcattctcagattttacttcatgcccacatttcctcacctagagagaagtcttccgtccatgggattttccaggcaagagtactggagtggggtgccattgccttctgcagtaagtcctctacataggaacaagttctattccgagagcacatttgtaacaacaaagttagccgaggtacccaactaacacaatcggctacatagtactgtactgtaatagctttataatacttttcacacaaacagtgcattaaaaaaaaaacaaacacacaaaataaagaaaacatttttaatcttacagtaccttactttgaaaagtacagtagtaccagccatatcaccactgcttttaacgcctgcatctggacatcctgggcttgaaataaagatactgtactactgtgctctgtaaactacacaaaagcatggtcacttgtagaggatgcacacacctgacaatgtatgccagacgcatgaaccaacctacatgagtggacatgcgaacacaggttcagttcagttgctcggtcatgtctgactctttgcgaccccatgaactgcagcatgccagcttaacatcttctaaaggtctcaccttgaaggttggtatgtagggggcttactatatggcagagacacggtaaaaatccatgggcaagtttaaaagactttggtgatgctttctacactttttaaagtatatattcttaaattatttacatgtttttattttttacaaagaccaggaaccagaaccctttcattgcttgtttatagactattttctcccaatcactctaataaactgtctctacagattgttccacatctcatccaagttcttagagggcaattccaggaacgtgatcatctcagtgggaaaagccctgaga

SEQ ID NO: 29804 - DNA, 2098 bp, Bovine  19866880696882
  misc_feature (1)..(1): n is a, c, g, or t
ntaaaatctatcctggtgtttatcaattatagttggtgatttgtagtgaaatagaatcccccacctaacatatgtacacttgcattcctttgaggagtccttattgtgcttgttttcttacatattgtaataaagaagaaagatggggggcgggggtagagtataggtgtgtgtagataaggtgatataagcaattggatagactaggaaatactttccaaagcaaggaatggaaaatcatggtgattttataagtatgtaaacatatagaagtcaaatctcatacaaatattttaaagtgtactggattgttaatcacagtgtgccaataaaacatgacacaacagatgtgcttctggcagatgctaaaaaaaatctgttactttgtagaaccacatcctccatagttattggttaattatatccatgcctattgatggaaatcacagactccagcttccctagagcttcaattatggtaattagttgaatctatagacaagctgagttcactgcacgtgtgtgtaccctcaacacacacgggtatacacatatcattatataatttgaaagctttcctttatgtgttggattacaaatttatcaaatttgtagcaaattatgaaaatatacaattactttctcattagttaaaaaagtattttcttctgttatttgcctttctgtttctttatatccttctagtatacttataaaccttagagagaaggataagattcaggcatagaggtctgaaaaatattaccactcaggtttataaggattctaaacagattttacaataattctttgtacttttctatgtatagttttaaaatttgaaagaactcttgtcttatcttccttcttttttatttgatgtgccaatacaaatgtgtatatacttttttatatccttttatgccttcagttttgcatattgctttttttaggtgtgaagttaaaaaaatgatattttatagcataggcaaacaaaatatccttgatctggaattgaagttagttgagatgaaaatgactggacaagcatctgtatctaggaaatgtgcttgcagcttaaaatgttacataactgtttctggcatctgcatcataaatgatgtcagttaaaacagatttatggaaattctacttccctccacattcagctttatgtcattctatattcataacagacttgttagaaatggtctaaggccatatgagtaccaatcatggttaggatagcttaccaattcatttcattttcaattctaactttgactaaaacctagtttaaaactaggatgactgaagttatagagatatatatgcagatatttagagtatctgcaatagaagacatatttgacccctttaagaagcaggttttatattcgtcatgatgtttggtaccattcaattatgtcaagtctatgaatgacttcacagcctttatgtatatctatattatacatttagatacttatgaaaagtctggagaaaaagtaggttaaaaacattattccagtctattgataccctttgggctgcccccaagtcaaaatatgaataattgaatatattggttaattttttgctgaaaagtacttaaatactagagaatctcacagaacagacaaaattgaaaaatcgagaagatgatgtaatctcaatgacctagaataaatattataagcactgatgactatagtaaattatcctttagtctagcagaatacataatatcccatgtattttgtttcaagagacctcagcctccagaaaaacaaatcctaacctgctatcactttaaatgccagtatttagtttattgcttttaggtagggtcatgatatggcatgaactataatacatgaaacatatcaagttgaggagtataagctcagacccattctttcttatgcttatttgcagatcatccacactaacttctacttcaccccaactgcccagtgggaaccttttgtatgccataggattctaaagaattgcattagggcattgattccaaaagaccatgccattgtatcctgtgtatttgatggcaagagaaatgacccaaaccaagcctact

SEQ ID NO: 29805 - DNA, 1244 bp, Bovine  19866880744996
  misc_feature (1)..(1): n is a, c, g, or t
ntaagccttatctcaatacattcaataaagcttcccatataatcttttttaaatgtcagctattttaactttgcagctatgccaacataggattatctctttgataatttcaacaaataattttatatgaaaaatttattatgagaaaccatgacagtatgatatgatcactaatactttcatctggtttaaaagcttaacaacatctacttcaaaaaagaaaaactttcgtctttagcgctggactccttttgattaaacctaaagggtaacaagtacttttttatgaaacctttttttttttaagaactcttaaaaatgtagaccattctattacatgagagagagaaaagaaaaacatatctattcctgcattcctatttaacataaaatacaatgaaatttctgtgaactatgtggaaagctgtcatgacaatgactcaaatagaagcgaccagaagcaatcatagtagaacttcattgtgtatttttgttttttgttttttggctaggctcttcttgaaaagaaaaagcaacattggaagtttaaactatatttttatgtcctggggtaatgtgataaaagaacagtctcgtcatcaaataaacttggccatgaaaaacaatttaatttttaaatctattaatagattcatttttgttcttttctcagatcaccataaaaattataatgaagtagcaatctgaattatatcaattaagtcagcacttactgtttctactgaaaattcttaattatttttacttgctacattccctacaccactatttctattttttgtcacattcacatttcagagatagcttttacttttactcagtaggatagagtaacagaatactctattagaatacagtttaagtcttttctacaataatattttcttttttttttaattttattttatttttaaactttacataattgtattagaaagctgtggtacatatacacaatggagtattactcagccattaaaaagaatacatttgaatcagttctaatgaggtggatgaaactggagcctattatacagagtgaagtaagccagaaggaaaaacataaatacagtatactaacgcatatatatggaatttagaaagatggtaacaataacccagtgtacgagacagcaaaagagacactgatgtatagaacagtcttatggactctgtgggagagggagagggtgggaaagatttgggagaatgacattgataca

SEQ ID NO: 29806 - DNA, 993 bp, Bovine  19866880772906
  misc_feature (1)..(1): n is a, c, g, or t
nattcattccaaaaatgttcatgcagaaggtatgtggagacagaccccaagacagtgagcatggaagctgtgagctcaatgaagagtttatattcaagaaaatagatgatggtttgtactaccaagaaaattttggtagtagcagtgaaaatggttaaggttgtctagattaaatcaaaatgtaaggaaataaaccaaggtaatgggacagattaactggatatggcacttcaaaacagaaataaatttaagatggtttctaggcttaagcaactgagtgactaatgaaaatattcatcaagattaagaatatttggcaggagttagggatgtgtgtaaagacatgagtttagtttgaccttttatgtttgaggtgctcaagggagatatttagattggatttggattagatttggaaattttatgttaaatatgatatttcaaaacgtgagacagaatgaaattacccaaggagggagtacagatagagaatcaaagagagctgaggcatcgtagcagagaagtacaagctagtaagggagacttggaagaagtagacagaaagataagagaaaaataagagaatgagatacaataaaggccaactgaaacaatctttttcagactcaatgtcacagagactgtgataagacaaaacattaagaactggccatatgatttatcaagttagagaacttggggaacaaaaacgctttatttcttattaatccattattctctctcttgatttagtcattattcagaaagaatcttcacaaaactcgtagtcttttttaaaaaagcttattgatgtatagctgacttataatattacatgttttaggtgtacagcatagtaatttactacttttaaaaactatactccatttatagttattataaactattggttatattgcctgtgctgtacaatatatccttatcgcttatttatttcatacataatagtttgtacctcttaatcccttgtcc

SEQ ID NO: 29807 - DNA, 1337 bp, Bovine  19866880864174
  misc_feature (1)..(1): n is a, c, g, or t
ncttctatctctgcaaaattaagtatctggttattaatttgggggatatactttaggtgtgaagatcttataatcatggctttggagaaaagcattcaaatcagataggcttcaattaacaactgaagtcaaagagtctgaaccaatttgttgtcatcgcacatttattattttcattgacaattttcagtggagactgtgaactaacacatctgcaaagagaaaaacaaatcactttgcagaatggcttaccaggcaacaaaaggcaactgagtttgttgctcgctagaggtgtttgcttttattacttctgagagaaatatcatgcccaggacactgtcattgaactaaatcttaaattacatgtacagatgatttaagtccacaaattagccccaagacccagaatactcttatgaaaatctcacaattatttccatggcgtcaaaactgagcccaaaggacagtaataaccataatttatattttccaagttcttgcagctttccaaagcacttttatagacattgtctgacttgagcctcataataaatgaataaagtagaaattacaacctctagtacacaaataaggaaactgaggttaagagaggtgaaatgattttctcaagtaatctgaagctcattcaactgtggcatagttggcagagttccagtgccaagtacagtgccatccacactgtgggtgcctccaattttactgcaggctatgagtaagatttactgggctgagagttatgcagtatattcaaaatcatatgctcaagattttttagaacatgttacggactacaatcaaaatgcatgtttttggcatataatgaaaaccagagatttctaaattcctgtctgctgtgaaactgttttatcttttttgttttagagcttcctagcagtttgcaacatgttgaatagctaactccaaaccagtaatgaaagcaatttgtaaatgtaatctcgtatgataccacaaaaccaagtaacaagaaagaaaagactcctccttactgttagtaagtgtaacatgtcctgatatgtccagaattaacttatgagacatcagatactgagctcaaataactacaccgaaggcttaagcacatggcttaccttagcaacaagttcagattcttttggttaagacattgcacttgtatgtcagcatgtttgagatataacttagttcctcttgagcaaagggacttttataatatttgtagcagcatgtctcactgtgactttattttagctcttcagtgagtttcaaaaatatttgtatgattttaaatgaggggctctgatctgaagagtcataaa

SEQ ID NO: 29808 - DNA, 1429 bp, Bovine  19866880890984
  misc_feature (1)..(1): n is a, c, g, or t
naaaggcatttttaccactttgactttctataaattgactctatacaggtttcaactatacaatttaaggatgcttaattgttactcatattgtcattcagtagataaaattaccctttggaataggaagataagtaggaggatttgtgtattttttaggatgtttccaattacaaataagataataccaattagcaggggcttaaataatataaatatttaatcatttcacataaagaaagtttgtacatttctgggaccacatgagctaagagatcaaagtcactataatatgcattgatatattagtaattaggtagtaaaacatagtaacattatgtaccctctgatatgatacactgcaaagggctcatcatttctttgtttttctggccaaaaatgtacacacagagtgtgatctccacaatagccaaagagatcttttcaaatgtaattcagatcatgaactctcccactaagaactctttcaattcagtcagaggaaaagcccctaccacaatggcttttaatgtcatatgagatcagcttccttccacttctctcctctgctaacttctctcttcctgaggcactgtcagccaactgagttcctggttgttgctgaaacataccaactatgctcttctctcagggtttttgttttgctttcctccacctgcaactgtcttccatccgataccttcctgacatgttcctacacttccttcagtgcaaatgctagccctttcttgaccaccctaaataaagcaagataaaactccttcctcatcataccatcagcacgccttatttcactttttttcttttatttccaatagaacttactatttaggaatatatgtatttttctatacatatacttgtgtatacacatgtgtgcatatacacacatatgcccagtttctctcattagaatatgtcctccttaatgccatagattttgttcaacattatatcgctagtgcctggaagggtacctgtacataggaggtattccataagtgtttctttcacttttttttttcccccacactatgtggtatgaggaacttccccaaccagggactgaacccatgccccctgcattggaagcatgaagtctcaaccagtgggccaccagggaagtcctccataattgtttctggaaccaatgaatctatgaatatgaattgaatgtaaacctggacaaatgctttatacaggttatgttccccctgggatttgggaagatgtcttcatgtgaaggaagcagagagaatttgaacacatgatttcattgtccactgaagaagttccccagaaaaggtaaaggcactgcttaccaagtattttttcaacattcctctcccagagccaacctgagcagagacttccagccagaggcaagaagtaggcagccagagacaag

SEQ ID NO: 29809 - DNA, 1840 bp, Bovine  19866880945211
  misc_feature (1)..(1): n is a, c, g, or t
natataataaaggatacatgaatatattttggatcctattaatacccacaggagtttgcctgtggtaaaaaaggactgtaaaagaattttaatacaccaccccacagaactgtctgacaaagaaatggtaacttgttgaacataatataacctaatgagtctgttgcagaattagaaatacaacctaaaattcctgacaaaaataatcagttaccagcagtagctccccttcacctcatttcagttttatttcaaagaatgccttgcggccacaaaaacttaaattcagttcagttcagtcgctcagtcgtgtcggactctttgcgaccccatgaattgcagcacaccaggcctccctgtccgtcaccaactccaatcataaggtgataaaaatactgaaggcagttaaatttgtatttgtccattcttcaaggaactaagaaaagaaaatagaaattctgcacttatatcctttacttttctgaccatttactagtcattttaaataagagtttataatttggctttaaaacctgatgccaactctatgacgcaaatgtaaattttcctaaccctttgaacaaagaacaagcactttctctacctgttaacatttgttgcaataacttaaaattgttcttttgtataatatggcaaagtttattagattcaaaaccaatttattctagtctgcctaccatccccctttattttacatcagtctgcagaagaggaaggcgcacagaggactgtgcatgagactttcttaatgcatcgggcctggaaacagtccacatcatttccagtcacattcattgactagaactcaattagatgaccatatataactgaaaaacaaaggtggcaaaactagtgtggcagcacacacctgaggaagagaaagagctaggctctgcaggaggtagaatcatcacacatcttcaaagcctgaagaacccgcagtctcaggtggagagaatatatcagggattagagctggtttggaaactgaggcagtactaaatcagtgtatcagcccagaggggagggtcaacagaaggctaaaataaggaagaatggacagtggtttgcagtgagaagatccagagcacgggctcaggattcacctaataaaatgcttgcggtctgctaaagtatttcttatctggggctcaagtaaataatgcagggtcctgggaatagatgtttcaggagtctggaatggtcaccaaataaggcccatttgaatttggatgccttcttgccttgactggttttgtgggagagggtatgtgtgcagactgaagccatgaaattaaaagacgcttactccttggaaggaaagttatgaccacctagacagcatattaaaaagcagagacattactttatcaacaaaggtccatctagtcaaggctatggtctttccagtagtcatatatggatgtgagagttggactttagctgagcgccgaagaattgatgcttttgaactgtggtgttggagaagactgttgagagtcacttggactgcaaggagatccaaccagtccatcctaaaagaaatcagccctgaatattcattcaaaggactgatgctgaagctgaaactgcaatacttcggccacctgatgcaaagaactgaatctttggaaaagacaccagcatggaaaagaccctaatgctgggaaagactgaaggcaggaggagaaggggacgacagaggatgaggtggttggatggcatcaccgactcaatggacatgagtctgagtagactccaggtgtagatttgtctccttcaatggactaaaatctccacagaagtcaagagtgttata

SEQ ID NO: 29810 - DNA, 1318 bp, Bovine  19866880960206
  misc_feature (1)..(1): n is a, c, g, or t
ncaaaagtttagtttaaaatttagagtcataaatatcagcttttgacagaatatgtcgttttttacacggaagtgtatgttaacataatgggtgttctccttcctattacatgtatcaatatttaaatgaacggttctccagaggcttactaaaatggcatttcatgttactttaaactaggtatttatggtacaacaatgtaaagaataaaaggcatgaaacattggacaatttttatagaaaaggattctagtaatatggttgagtgcaatgcaccatcaacgcaggcttgtatccaccctcattcattcagctcacagcagaaaatgcatgtgcctaaatccaagagagtagataagtcggacttaaaaagtgtttctctctttggtataatactttttttttttacttctttttcaataattccttgcagctctagcttatacacaatgaattgtctgttcctttattgaagtattgaaggggaggggttggaaggaacacaactttttaaagccagtaccaaagaaaataactccttttgtgtaaggagggatcaatagtagtctctgtgttctttctatttcttgtttgtaatttctattgatgtgtacaaaacctagacatttggctttaagtgttgatttaaaacaattttaacagaaggaatagagagaaagagcaattttaaccatcgttgacctactttcaaaaattccattgtgttcttaattcacaaaccccaacaaaagaaaaaaaaatcttgaagtatgtctacatgccacaacactgcctaacttaagtttcaatatttttttctaggtcaatgaatgtaattatgaaagagggccaaccggaattactttaaaataagaaatttccaatcatgataattattatcctatgtcatctgtgcctttaattattaatgggaaataattatctcccattgagaaagtggctgactacaatggaaggaggagcatttcacttgcacgtcatagtccttttccattcttggtccctgattgcctttataccaaacaaagaatggaaatgcccaaatccattagaatgtccagtttcttcaggaataattaatttttatttttaaaagccattatattttagaaatttataagctgaatagaaatttataaattgaaattaaaaaaaaataaattgctacatctatatagtaaaggatttaattactgaaaaatcacattcagcaatgtctacctaggcttaacgtacttatgggttaaagttaaaatacataaataaataaatggtgaaagcagtctagatattttt

SEQ ID NO: 29811 - DNA, 2173 bp, Bovine  19866881105420
  misc_feature (1)..(1): n is a, c, g, or t
nttgttaatttttgccccaacaacaactaagatctaaaaatgactgggacaattagaagtagataataaaagaacttaagtctttaagtggagtccattgttttcatggtgcaaatttcctggctatataaaaaagaatgaaaatatgtaaaacaattacctaaaaagaaattttttcaagcattttactcattcatgtgagtaaataaacaaagtcaattaacaagcccagaaaaaagtattttttttttaacagttattattaatggagtttactctaaacccttgctgtcaccaatgaaaaacaccaaagtagaagcacagaaacctactgtgacaaactttaggacaaccaaccagtttgcaagacactggaggtacatatggatccaaaacattttgtgaatcatgaacctcaagataaacttgttaatgtctttttttttttttttttaaatctttgtgactgcaattttgcaacaccttctgtagagggagcaagaggcctttggtatttgagccattaagacaaacaattttttcatttttatttctccttactagtttgaatgaaaacaagtttaagactttttctccctgcccattaaaagaagacactctgaaaaacctaaaggttctcaaatttcaaccatatatcagagtctctaggaagttcagagatgaattttcaagtctatttttgcccgtctttgaagactttttcaatactgatttttgaattcttgtttgtttgagcgaccttgggattcaaaatgacagttcagggtgaaatcaaagcacagtgatgcagtgacaggagtccactgtcaccagccagagcacagctaataacctaagggttacacctaccacggtataacctagaaagatgtacatcccaaatgaaggccattgagtacacggactgcgaaatggtgatctgatgggaattagagcagggatttcaaacattaacttttcacaaattcttataaacatggatataaatttagctaacacaatggccagaaagggttctgttagcaaaagaaatgaaaaaagtccacatactttctatgtcctaacatactttcatgaacaatgaatttttttcccctaggaaattgaggcatatatcgtataaaataaaaagatttgttaaccaaatattcaaaactcattaatgtcaggaatgttctgcttgttccagcttaattctaaagatttaagagttttcaaagaagcagtgtactatcacataagaatgtacaatttttgaaatcaaatctggttgtttgattttctcttcaatgataaagaatttaatcaaagtagttcccccccaaccccctgcactgtttagctgcaaatcaatagatggagtatcctgaagaaaatgaaaagcaaagggcatctaatattttactgctaaaacctactgtggagtgaagtgtttcagacactcagttgggtctgactctttgtgaccccatggactgtagtccatggaattctctaggccagaatactggagtggatagcctttcccttctccaggggatcttcccaactcacggatcgaacccaggtctcccgcattgcgggcagattctttaccatctgagccccagggaagcccttgatatatgtggggacctgataaatatatacatcctatctcttaatttgcaaaaatttcctagaagttgtctacaacaacttatctttactttaagatgtgagactgttatcagatgggagagatggagttgaatgaatcctgagtgttgtacagagcatttcacagggaaggggcagtcacacactggggctctggtgccctgaagctttattactttacaagctactgttggtcacttagctgattcagagctgtctctaggtgtggaagtgtgtattgaccacttcagaaaatagaagaaccaggatcttttcatcttaagaggtagaaaccacttattccatttatttctaggtatcctctcttcctgcctctgcgtgaacaatgcagctgaataaatatcagagtggaaaattcagctctcagataattttccatcttgaggcaacccgactctgtgatatagggtcctctggggccctagactctcccagagtctcaatctcttccatgacttcaggacaaaagttt

SEQ ID NO: 29812 - DNA, 2888 bp, Bovine  19866881128609
  misc_feature (1)..(1): n is a, c, g, or t
nttctcacttttaaaaaaattgtcaatacgtaggaaggcactgatgggctttttatcaatttcttactatagactattttatagatcaagtatagatatatgtgtgtttctttatgaaatattgtaattattatactgtttaaaaaaacatgaagtttcaatggtggtagtttaagttttacaaatattacatataactatatataatatgtactatatattacaaagtttcattgaagtaaaaatataatgctcaaactttcagttaagcaggatggactgtccatatatatttacttcttttctttccaaaactagaaaataacagtaaagagattctaaaatgtaaattcaaaaagacagaaaggataaaacaaagcagattaagaatagccttttgcaatgtggaatgtatcaataccagtataaatgataatttgggatttagaaggcccaaatatgctgaaacctaatcaagcagtggggaaatccaagaaacaatctaattgtacatcagaattcgtaaaaggctgagaaatggcaatggcataaatatcagatgagggtaaaggcctgtgcaaagcaaatggaaacttgataaattttctgtttgagaaccatttggaagtccaaatcccacagtggaagactggaggcttattctctggtgacaataaaatggaaagttcttgattgcctcaggaagccaagtactatagtggaaagagtactattctcaaaacagaagtatatatgcaaattgaaactgaccagatatctttccccattcaatttccaggagactggcagccagatttagaactttaggcaaaactattctctaagtaatgaccagagctaaagaaaagatcctgctatttccaataaaagattataaccagatcactacagtaaggctaaattcaacaaacttatagcttctaaacaattttttgtaaccatttaatacattaataaacgttaaagaatcaatagactcttaattcaagcatgtaacgaatgatagactcaaaagacagaaatgtacaaacagcagaaaaagcattaaaagggaacattatggaagaaggggtaagttcaaatatataagtagaaaaagattcttctcatcatagaagaataaaaagagacactgtattcatgaaacaaatatagaaatatatatgtatataaatgtgttgagtatatatattcatatgcttcctgtttgtaccttacatatatttatatagcaatacactttatataataatttatatataatgtgtttgttcagagaataagaaaaccatttaaagattaaaaatataatagcagaaaaagaagaactcaatgcagcagttagaaaatcaaagaaatctcccagagagtacagcaaagcagcaaaaagatgagaattaaatgaaaaaaaattagaaattaatgatccagtccaaaaggaataacagctcaataatagaaattccatgaagaaagaacagaggaatcagaacttagggaatcattacataaacaatcaagaaaatttctctgaactaaaagacatgaattcaaagattgaaagtgtctatcaagtgcccgttgagtagatatactggatttattccacagcacatcagtgtggaaattcagactcacaatttaaatagaagattctaaatcttccagaaagatgaaaataggtcacaaacaagggattagaaaactggatggtttgggacttctcaagagcagtgctggaaactgaaagataatgaaaatataatttcagacctctgaagtaaaaggatattgattctgattttctatttatagacaaactagcaaatcaaagacaaagatagacattttcagatgttgtagagctccctaaaatgaagaagtaaccaaaaaaaagaaagggaatccagaaaatgggattttccttcctttaagaaagaggcaaagattatctccaggatgaagatgatgaaatataacaggaatgtagcaaatcattggtcagaaagagcaagaatagaacagcccagaagtttccaggaagattatctttaacaaaataaaaatgatagaatatctgatataactgggagagtttgggcatttttcagtgattagtacatataaagtaaagccaaaaaaataaaacaaaaagtcacttaaagaaataaaaaatagtcatggtttatacacagcttctctgtgactagttcttgtataaacataataatattccctgaaaaattttaatcaaaattatgcaataattttagtgggagaatagaggacatgggaagtatgtgtttttactgctagggcctagtgagttaaagaaagctcaatccttcttttccattgtaggaaaatcaataaatactacctgaaagggaaagatcaagaaataacagtattgttactttacttacacaagtggaggaacattatcaaaaataacagctagttagaaagcttaaacagttaagaaaaggttgcctgtgagaaaatggaaatggcaggaagtttggggtattgctatgttttttttttttttaattaagaattacagagttgtttgactcttaaatgtttgaaaaataactttgacaatcataaaaatcaaatgtaggaaaatgtttacactgaaatgtgttgatttttaacaattagaaacagagtcatcaacttatacagccaaggtaatcgattttttatagaaatctcatattgcagcttctcttaaaatatctattcacatgcaacttattgttgttgggccattgatttaaaaaatatagcttggtgctgttattactgtcattattattaagtcatagccattaaattcaggatggcatatgtccattcac

SEQ ID NO: 29813 - DNA, 1597 bp, Bovine  19866881180936
  misc_feature (1)..(1): n is a, c, g, or t
ngtatatataatatatatccattatttatatatgtatattataaatatccatttatatatattataaatatccatatatataaatatatttatatatataatatacctatatatatatatttatggcttattcatgttgatgtatggcagaaaccaacacaatattgtaaagcaattatcttccaattaaaaataaattttttttaatgtgaatactcaaaaacaaaaagaaaaggaaaaaaaatccccaaattgtattatcctaaaagcagaatttttaaacaaaaaaaagatatgtttgttcttctggaatacagtttttaaaataactccattgctttagatatttctagcattaccataaacagacaaaaaatgacaaaaatcttatacattcattagaatgtttccaaatatcatatcaaaatttggcataccagaatatttagatcaaatctaattactggaaactattctaacatctgccgcttttttactttttaatagaatgtttacaaagtaaaagtgtattatgtagagaaagtcattatctaatgtatagggcctaattacctaaatcttgagtgtttccatttgtgctaatcaaaatgcataggaatataagttactgcaatcctcaaaaaattataaagaacttgcaacatgtatggatattaatactctttacagacctggaagaaaattatttttagcccaaaacaccttatcttccttcccagcagcattgagactctttttaaaactgaatacaaattactttcagcatttgttgtcattcagtcactcagtcatgtctgactctttgcaactccatggactgcagcctgccaagtttccctgtctttcaccatctcccagagcttgctcaaacccatgtccactgagttagcaatgccatccaaccatctcatcctcggttgtccccttctcctcgtgccttcagtctttcccaacataaggatcttttccaatgagttgactcttcgcatcaggtggccaaagtattggagcttcagcttccgtgttagtccttccaatgaatattcaggactaatttcctttatgattgactagttggatctccttgcagtccaagggactctcaagagtcttccccaacaccacagttcaaaagcatcaattctttggcactcagccttttttattgtccagctctcacattgacaggtggagtagggataattttagcattttgtaaaagaagaaaaagtaactggagtagtaaatgaagtacttgtggcatacccagataggaataggtctttattcagtgagaatgtggggctacttatctgctctctgaccatgggcttttaattcatttaattgtcatttgaattcacttggttcagatgtgtctttctaaaattgttttcacttgggattttaaaaataaagataccagaaagaaataattgagaatagttgaaatgatgctatgaaagaatggtataagatttgttaaagttgtaataaccaacaaactattcctaaaactctaaatgtctttttctagttggaaagtagtgaaatccttagattggtgtagctatgt

SEQ ID NO: 29814 - DNA, 787 bp, Bovine  19866881291078
  misc_feature (1)..(1): n is a, c, g, or t
nttttcagatgaaaataatgggtctataaatggaaaatggaatctattttaccataggtaatagctattatgactttccttcagcttctattgactgtgcagtcttatgctgacccacagtcagcataaaatggttaatcagcaaaactctgaggataacttgaactggcaattgccccaaactttagggtagttattataactcttccactgtctcaggcaaagataaaaggaagagagaaagtatgagggcagtgcattgagatacgaaagaaaaaatcctgggaaacctggcagtgatcttgggccactttgggaaatatattttggaggacaagcattttcatatttcagtgttacacaaatctccagagaagtagcaaattaggaaaggcagtaaattgagttttagcaagagagttgatgttaactctgaactcaaagtttgaattttgaacagttgcaaaaaacagcattgagaaaatatctctcacacattcatatttgttgttgttcaatcactaagtcatgtttgactctttgcaaccccatggactagaacacaccaggcttccctgtccttcactaactcccaaagtttgttcaaactcatgtccattaagttggtgatgacatacaactatcacatcctctgtctctcccttctcctcttgccctcaatctttctcagcatcagtgtcttttccaatgagtcgtatttcacatcaggttgccaaagtcctggagcttcaacttcagcttcagtccttccaataaatattcaagg

SEQ ID NO: 29815 - DNA, 1116 bp, Bovine  19866881331534
  misc_feature (1)..(1): n is a, c, g, or t
ncttaattttataaattgatgttttggttaggtaagagccattctcatattttactttaaaaagcaattatgagaacaattttaaaatataaaaattttaatccaagcgtttaatatacttagaagggtcagtgtatttatgcagccatttctcaaatcattctaatgaaaagatgaacaaatttgtatgtgtgtacacacaacttttccaaatagtgtatatattatatgtatgtatctatatatgcatatatatgtgtatataatgtacatattgatattatatacatacatatatattgcatatatctatatataatagctatatgaatttgattttaaagacagtttccaagaggtatgtttccatggtattgccacctgcaatttgagcattttatttttatttatgttctctcaagccagtccaacagagaagtcatttggacaaattattttttatgtccttgagaataagtgttaccatactttattcatatatgtaaaagtccccaacaaccacagtgaaatttggttgattgtaagtaaaccacaagtttaacagtttgagtaggtcacctaagtttatctcataaaggagatgagaacaagggaaggaattgaaattagagggatgcacaaaggaaagaaaaataaaatgactgaaataagacatttttaaaatctgaaaaccagaatttcaaaatgatggggtgaaaggagtaaaaactgaattccttccccatactgccttccactgcaggccaagcatgcagcattcccacctgatttttatttctgcttctctaggattcattcctcaatcctttataaacatagagtttgccttctgttttcttcaaaatcagatagagtaaattctcaaaggaaaatgagcttgaatacaaagcctacaaaatagggtgtgatttgaagggataaatgagatttttaacctgaaaagaaacagaatgaaatattttcctggaaaaccttataattttcataagaattaagcaagattccccaaaataaagactttcaacaattcagaaaaaaaaattattaatcaaagagctgcaacaatacctgggattgcagctaggttcaggaatg

SEQ ID NO: 29816 - DNA, 1282 bp, Bovine  19866881401546
  misc_feature (1)..(1): n is a, c, g, or t
ntcaaaaattttgggtaatggatttatacaaagtctttaaaataatatcctgaatatatttcagttaatggcattacatgatgactttaatatcagtatcctgaatatgttcaaagaaatagatataacctagagattctgaaaagaaatggcatttaagaaaatgtaaatctgggtactgaaagaaaaaaaaaaaaactaactgaaattaagaatgtgatggaaaggtttcacacgagattacaaacccctgaaggtattattaataaaacggaagataagtcagaacaatgtgtgaagaagtacagtagataaaaatgatggtaaaaggacaaaatatagagtagaaatctaccatatatgtgattggtgtcccagaaagagaagaaagaatgaaatagaagcaatctgtggaaagacatggctacaattttttaaataattagttttgaaaataataactcaagaatagcaatgaacctgaagcaggaaaaatacaaagaaaattgtacctaacatagcccagtaaaactttggataaggaaaaagggtaaagatcttgaaagcagacatagaaaataataacaaaaggagcagcaattagagaaaaataggcctccccatccctcagagagaatctgaaaagaggattgtgttagttatctatctgtgcataacaaattatctctacctaagttgattaaaacagtgaacacttattgttttatagattttgtgtagtaatcaggaagcagcaatgctgggtagttcaggctcaaggtctctcaagagactgcatccaagctgtccacttaggtgtgattatcttaagattcacatgggagagggtctttctgagctcacacaggtggctagaggctggcttcagattttccaggttttctcatatagttgcctgtttgcctcatttccttaatatacaggctgcctcatagcctgcctgagtgtcatcatggagctctttcctgggcagcctttctgtaggccagctggcttccctcagagagagaatgagagagagagcatgggcaaggaagtcaatgtctttttataacctaatgtccacagtgacatcccatcactgcctctgtgttttatttacaaaaataaagtcacctggtggctttgttctttcgtgtgtgtgtgcgtgtgtgtgtggtatgtgcacactcagtcatgtctgactggagggatcatagccctccaggctcctctgtacgtggaattttccagggaagaatcagttcagtcagttcagtca

SEQ ID NO: 29817 - DNA, 1580 bp, Bovine  19866881427344
  misc_feature (1)..(1): n is a, c, g, or t
nttgttctgacctgacacccatttactacttaataatctggttattaaaatcgtacctgttttagtctcctcagtgtttgggaaaagtataccaaaacataaaatcattcaaatcgctttagttgggaaattaatatctgaatgtgagacattaagataggccagcagatgaggcctgttccctcatttttgtttaaaaaagagactgttagtgatgtacaataacacgttggtgttctgttaagctgtgaacaatgggatattggagagaggatgaaaactttggggttgaaagtaaaggtctgacagagaaactgaatgagaacaaaagaaaataggatttaattgtctgagaacagatgggaatttaattctttgtagattggtgattatagttttaaagtcaaaatttgttttatggaaagcaaagaaatagtacatagtttgataatttttcagtttttctgtgaagaaagtgttgcagttcacatgaaaatgttttatttctgtccttgtttcttttaggtcagactgtgccaaaaccccaaacttcagttgaaaaatagcccaccatatatacttgatattttacctgatacatatcagcatttgagacttatattgagtaaatatgatgacaaccagaaacttgcccaactcagtgagaatgaatattttaaaatctacattgatagtctaatgaaaaagtcaaaaagggcaataaggctctttaaagaaggcaaggagaggatgtatgaagagcagtcgcaggacaggtaagaatatttcagattttatttttcttagtgttagtcgatgttgctttttgtttcatggtttggataaatgtcaccatgtgtgtgttttaagggaaatattgcatttgtgtatttgcttttcacattatttaaaccttgtagtttcacacaaagtttgcacaaaattacctgtgtcagtagctagttcatgagatggtgttcttatttttctgaataggcattatttttcagagaagttttagttggcagaaaagttgttcagaaagtagagttctgtttacctccatcctccaagtgccagtttcttcttaacagcttgccaagaatggtgcttttgttatactgatgaactgattactgatacagtattattaactaaagttcatagtgtctgttagggttcactccttgtgttgcatggctctatgaatttccacaaatgtataataaggtcatgtatccatctctctagtatcatggagaatagtttcactgctctaaaaatgccccgtgcctgacctgctcattgtttccttaccggcctgccttcaccacacctcttgaagccctagcagttgtcatctttttagtctattgttttgctttcttcagaatggcatatagttgaaatcatgtaatatgtaacatttttagactggcctcttttacttaacagtgtgtatttaaggttacccagtgtcttttcatagcttgatagttgatttctttttattactgaggatattccattatgtggatgtagtacaatttgtttaatccactcatctatgaaggagatct

SEQ ID NO: 29818 - DNA, 1091 bp, Bovine  19866881449748
  misc_feature (1)..(1): n is a, c, g, or t
nctcaataaccctaaagaattcacccctagttctggattgccccatcttgggacactctgtacttttcacacatgtaaatatcaacatcagactgataatctcatcaccacaccccagtgcacccccgacatctctaccctgggagaagaactaaattctcctgactggttaacacaatgccagaagtcagagagtgggttttattcctcctgctaacaggaaattcctcctatttccaaaatagaaaatagaaaacaaccacacacatcactggttcaacttaagtgtggctcacctatgcctaatttgagaaaggagcaaattatttctctgttcaataatctccttctatcaccattaacctttgagattcacaaatgaaaacaactcatctgctgtttggtcctatctccttaagaataagcaaaggggaaaaaagtaagacctgcgagctgagaaataaaatatcttctcttgggacttccctgtgagccagtggttcagaatccttctgcctatgcaggggacacgagttcggtccctggtctggttaagatcccacttgccctggagcagctaaacccgtgcaccacagctactgagcctgtgctccaggacttctgagccacaactactgaagcccacacaccctagagcccgtgctctacaacaagagaagcccaggcaccacaatgaagagtagcccctgctcgctgaaactagagaaaagcctgtgcagcactaaagacccagcatagccaaaaataaataaataaaatgatatttaaaaaattctgttacccttaaaagggtataaagagaatattatgacaactttgtgccaagggctttgacaagttagatgaaatgccaattccttgaaaaatacaacatatgagagctaacccaagatgcaacagaaaatatgaagagccctatctttattaaagaaattgaacttattattaaaatccttcccacaaagaaagctccaggaccagatggcttcactggtgaaatctacaaaagattaaaggaagaaataacataaaagctttcaaacttgagatatagttatatgtgctgagat

SEQ ID NO: 29819 - DNA, 1121 bp, Bovine  19866881608743
  misc_feature (1)..(1): n is a, c, g, or t
ntctcttttaaaatgggcttttgtctgttggttcgtttggctcttcacttgggaacaactcctcaaccgcgttgtttgaagaactgtgtgctcgtgtgttcatgagtccgaacttgttggttttagccgggaaaatccaagtcctcagcctttgatgacaacagtcgtgccctttctgctcctgtagaataatctttaggtttatataacttggcgaaatcacacagtgaaagtgcagtttttgagtgaggctcccaaagtgttttctaggggcttcagttctggtcttttaaattggggttaagtcagggagagggggaaactgatgtgttctaacgtagatagaggaaatctaagtttttattactgttgttgtgagttatgtattaatcaagccttcactctttgccatgtgagaatgatgcgtctttaactcttagtgttccgaaaacagatctaaggtcattgctcctaaacctgtgtgttgtgtgtaaagattgtgagtgaaaaattcacacggtattgaaaagttgaatctgggaccctggattttgttctcagtgatggaggaggatgtaatgggtacaagttaacctgtttgctgttgcataaatattttcatgaccaactaactttttttttctttctttcaaagagctaagattccagatggcaaattctatgaatggcagaaaccctggtggtcgaggaggaaacccccgaaaaggacggattttgggtattattgatgctattcaagatgcagttggaccccctaagcaagccgcagcggatcgcaggacagtagagaaaacttggaaactcatggacaaagtggtaagttctgtctgactgtgtctgtacaacagcagggttgaccctggatgtggttttctccagttttgtttgtactgtcatttagtaataattattggtatggcaacagtattttgattcggattgactgtgtttcttatatctgctctgggtgttttgaaaagttgaattcagagccaagacttttttttttttcccccaccttctgtcctactcttcaaggttcaaagttcctctatatgactcagatatgcgaagcttttactgttggctgctctttgttg

SEQ ID NO: 29820 - DNA, 669 bp, Bovine  19866881631524
  misc_feature (1)..(1): n is a, c, g, or t
ntgttatcacaatgaagtggcaacttttggcttttagactgtaccgaagatgcagcaactcataaaacaaacaaaccaacccaaaacacagtgctatttcagcatgacatcagaaactaataaaaacaaatgaaaaatcatgatgctgtaacatggagttcataaagcgatggagaattagccaatgcaatttttaaaagtataaaaaactgccctcatatacttacaggaagaacatttaaggcaaattaaaaattctcttccagggacatgaaccagctcagaatcagatgaagaaattaaaacatgagcacaaactacccaaggcctatgactcctcaaggacctcatgttaggagaccaagttgtcaagtcagggcacgtgtcagctcgcaaagaaatgtgctgcttccctccccgggtcaacacaaggactgtacaagtcttgacttagtttcctttggctctgctacacgtttggtcacatgctttcaaatcccaaagaggcactcattatcagatgcatctttttacatcacactgtgtgaaggtaaacgagtaacagaaatgtgcacaaacccgcaggcagtacacatttagaaaaccacctgtgggtcaagcatttaacacagacctgggttttgtctcaattctttactaaataataat

SEQ ID NO: 29821 - DNA, 724 bp, Bovine  19866881878485
  misc_feature (1)..(1): n is a, c, g, or t
nttcagatgactttaatttccctctgattcccaattgaaacatgatgttttgaggaagcagccaaataagacacatgttcttctgggtagctgaattagaaaatgatcttaagaatagactaagaatttggtaaaagaggaacaaaagtaggacatgtataatcctaagagatgagattctcattatcttgccttctcttggtctaatttttttcagtatctctttgacatgaacaatccttgtgaataattcatccatatcacctgaaattgtagtcaggtgtacacattcatttaatctgtatttgttctgtgagtatttcaagaataaagttaaaataagcagtgtaacattgtcaaagtttgattcttccaacatttaaatcattattgagcaccttgtttgtgctatggactgtcaaaaagacactgggaatatgacggtgtcttactagtctatttaagctgcttataacaaaaccctacagacttagtggcttataaacaacataaatttatttctcatagtcttgaaaactggaaactccaagattatgtggctggaggattcagtgtctggtgaagacccttttcaagttatagactgctgacttctctctgtgccttccctgtgaaagggtgagctagatctctggagcctttgtaaattgtcatttattaaattcatgaagactctaccctaatcacctctcaaaggctctag

SEQ ID NO: 29822 - DNA, 708 bp, Bovine  19866880397649
  misc_feature (1)..(1): n is a, c, g, or t
ntaaagcctcatcagaaagggcaggtctctgcctctgattgccccattcagtatctatcatggctttgggagttcctcttatagtctgacctcagggcctcttgatgagtttatcagataatacccagggagaaagataacatattataaaaaaagacagacaagcagaaatgtccactgctgagcctgatctaaccggctttcagcgactaggggtcatggagcagccacaccagcagccccaggttgtggctcctgggacagccacaaagtgctgtctgtctcccatggccctgcaccccggcacccacatcctaccttgttgatgaaggatgcaaagcggttattgaggcacttgatctgctccttctcgtccctcttcaccctctggacagtcggatcgacctccagctcgagtgggaccagcaggctctcattgatggttacaggggcgatacaggctgaagacccgcaagtggtgcctgctcgatacccaaagccaggcaggccacacctggaggccacccagggccgcccgaagcccacgttgcacaggctccgggagccgaggcagcccagggcacggaagctcccactgcccccagtccggcatggcccctggctcactgcatagtgagtgaccacccgggggaggacagctgagcaggagctgaagctctggccgccacatctgaagccctgctggaa

SEQ ID NO: 29823 - DNA, 1307 bp, Bovine  19866880598000
  misc_feature (1)..(1): n is a, c, g, or t
nttggggcccagtcaggaaaggagagggctgggtaaagggaggaaaagggtaggtgagaagtggggtctgggttgccctggctgaaggctctggcaccagcaggatcagggaagaacttgaagaatttggagggatggcactcacatgcggtgttggaagtagagcccaggtgcacacaaggggcttggaatagggaccagggtctggagttggcttttatgtgttttcattcagttcctcctaataacagtagcacctatgtgtgtccagcactaagtcctttgcatgcgaaatcattgtaaacctgctgattaccttatggttgttaattttagaaacatcaattacagatagtcattttcacagatgaggagcagagaagttatgtaactcacccaagtttacaagtgaaggagccaggatttgaacccaggcaacagagatctggcatccgtgctcttcaccactcttccccaagctggatcttcctattttgtgactagaatcccctcacagaagatttcctgagagtccccattgctcagatgagaaggctgggcctcctagagctagaagcatggacctcttgccttgtgggggcctgtgaggctttggggaccaagttggagcccaataaggagagaggggtgttctgctctgtcctcgtggtggctcccttttctctacctccagctgtccttttgtgtacatcaaggagctgaaagctgggttgaggtaccacctgtcactgcacccaggagtagggtataaggttgaggggctgtgtctccagggcctggagatgctccagacactgttgcagctcctggccacactccacgttcccaagtgctgttcgcttggggtgtgggccccaacctctgatgcccagctcagggggcaccttgggctggcctgtcccccgtcatggcctgggtcctgcctctgttcccatgtctgtttctggctgtactgtctccagggaatggccgtgccggctgatttctcctctctcacacaactccctctgtaggcctccaccatggacagaggccagccccagctcctccccggtgttggttccttctgccaggccccgaaggtcctagggatggtcaactgttgtctaaagtctgtcggtccacccagactggtaagtgccctgctgttgccctttgtatgcccctggggcctcctgagtaggtggttgggggccaaggtgggtgtgggagctgcttgaagcggatgtggtttgggggatggaggggggaagccctgcagaagtagcaggcggcgctgctaggca

SEQ ID NO: 29824 - DNA, 1588 bp, Bovine  19866880626148
  misc_feature (1)..(1): n is a, c, g, or t
ncccaccctcccatcgctccaagcctagaaagggcacgttcatgagtttcccagtcccccttcgggggaggcagtggtgttcagactcctgtcctccagatgcctatgagaggcacacgaaacacagtggactcttaagggcatggactctaccacccacaagtgtgtgatcttggcaagtgactctgctcctctggactgcagtttcactatatgtaaatttggaatgaaagctgtacccatctcatagggtgtatgcaccacgaggattaagggagtcaaatatgtcaagtgctggagagccgtcacacaggagacactgtagaagcggtagctgttgttactgtcagcagagggaatgggagcttggtttgtcaataaacgagagactaacttcctgatgagctgttaaggagttgagggaggcatccttatctttgggttgacactaactcagagagaaaggtagaaaggggctttggggtcttggctacactgggaggaagagtgggccatcgcaccccatggggggacaggcagatttattagaccaggtggccccattcgcttctgtctctctattcaaggatcaccgggcttttcttgagaaactgagtttaggttgtcttcgagggaatgaaggaggattctgcttaagaggagccatttgtgtcactttacacaaatcctttactgtctgggtctcgttccctgccctccctggaggtctgataaagagagcgattctctggggcataggaagctggccctcgcaggtgagaacccagtggaggccttggcctgctcactcttgctcctccttccccaggatgctctgcgcaactctggtggcgacgggctggggcagatgtccctggagttctaccagaagaagaagtctcgctggccgttctccgacgagtgcatcccctgggaagtgtggacggtcaaggtgcatgtggtggccctggccacggagcaggagcggcagatctgccgggagaaggtgggggagaagctctgcgagaagatcatcaacatcgtggaggtgatgaaccggcacgagtacctgcccaagatgcccacgcagtcagaggtggacaacgtgtttgacacgggcttgcgggacgtgcagccctacctctataagatttccttccagatcaccgatgccctgggctcctccgtcaccaccaccatgcgcaggctcatcaaagacaccctggccctctaggtctctccagggccctcggtgctccttgatggcttacggaccttggcttctggggatcgtactgttaggcccctggggctctggaacccgctcccggtccttgatgagacttggaagggccgccctggcttcctcgtggtgtggttgccagtctctggtcatccttgtcacctttactgacggtcaagtctggcctgcactgtctctccatactcctggtttcggggcgggcggggttcccctttcctacactgtacagaggacccatcactaggatggtgaataaagctgagaatgtgagtttgggttgagctgtctctcccttgactggtgttacgccctgaaacattttag

SEQ ID NO: 29825 - DNA, 741 bp, Bovine  19866880662535
  misc_feature (1)..(1): n is a, c, g, or t
ncacccagcgctgggacaaacacgcagcctgttcccaagtccacccccagccctccagcaccaagccctctcctcgcatcctttcatctcgtgccaagaacacgagtgcctgggcccccccttcccaccaggaccttgagtagggggaggccagacagaggaaaaccagaggctggccacagaaactccccctccagggtaaccccacagcctcaccctctgccccactgtcgcccctccctccatctctccaccaccccagggtcagcatgaaaggtcccaggtccctgttcctaggatggcagcccaccgggccaagcctgccctcttcctaaagagcagacttgttggaaggagagcccaagcgaagccaccacaaagcctgctggggtgagagaccagcctgccccacttctcataaaaagctacacccagggcagcccagtaccttgaagaagcctttgcagccctcacaggtgcggaccccataatgctggcaggaagcattgtccccacacacagcacagcggccctcgcttccacccggagccccactccgggccttggcagaggtcacaggcgcgtccagcctccctgagccatcaaggtggggagaagtgggcaccaggcctgggaacgctgtttgcatggaatagctctctccctcccccagctggtgggcggcctgcgaggggaacagcttcagggggcttgggggccaggctgggactggggcccggg

SEQ ID NO: 29826 - DNA, 1817 bp, Bovine  19866880719663
  misc_feature (1)..(1): n is a, c, g, or t
ntctggccaactgtgatcgacccctaactgttgttgttcagtcctcagtcatgcctgactctttgcaacctgatggagtgcagcacaccaggcttccctgtccttcactaattcccagagtttgctcaaactcatgtccattgaatcagtgatgccatccaaccatctcatcctgtgtcatccccttctccacctgccttcagtctttcccagcatcagggtcttttcaaagagctggctcttcgcctcaggtggccaaaggactggagcttcagctttagcatcagtccttccaatgaatagtcaggtttgagttcctttagactctcaagagtctactccagcaccacagttcaaaagcattaatgctttggtgctcagccttctttctggtccaaatctcacatccatacatgactactggaaaaaccatagctttgactagacagacctttgttggcaaagtaatgtctctgttttttagtacactgtccagattggtcactgcttttctttcaaggagcaagcgacttttaatttcatggctgcagtcatcatccgcagtgattttggagcccaagaaaataatgtctgtaactgtttccattgtttccccatctattttccatgaagcgatgggaccaaaagccatgatcttagttttttgaaaggttgagttttaagcgagctttttcactctcctctttcaccttatcaagaggctctttagttcctcttcactttttgccgttagggttgctgatatttctcccggcaatcttgcccacactgaccacagggaggcagaagagtgtcggtgtgagagtcactgccctgcctcctacctaccaggagatgtggatctgggtgtggagagggaaaagctagctgagaagagaccaagggagaggggctgtgactggggttgctatttcaggatctgcctgccagaaacagtccaaactggagcagacccaacatgctgcgtgctaagtcgcttcagtcacgtccaacactttgcaactgtatggagtccaccagacttctctgtccatgggattctccaggcaagaacactggaatgggttgccatgtcctcctccaggggatctttccgacccagagatccaacctgcatctcttatatctcctgcactggcaggcaggttctttaccactggcccagggttaccactaattccaagagccaggagctggaaacactgactgtatatgccaactttacattaccagcatatttaataacaagccacaggaagtgatggggcagtgatgaggcattgctggggcacccaagaccttcacatttgggacactggcctaccgccctcagcaaggacaagtcactagcctgtcagaccacagccacccagcaccagagatgggaccaggcccagcaggcacgagtctgtcagcgtctgcagcactgagcatcctgagggtgtggccacttcagtgcccaggacgcaacacagttgccaggaggcccattctttcctggggggctgaccacccaggcccacatcatgagcacttcaggaggttggatggagcaggtcagaggaagcagctgtgtgcaggaatcccaggtttgaggtctcaccacagtccaggtttttcccaggctgtcatctgtactgtatgcggatcaaaggttccttgtgtggccggtaggactggaggaaagtgctctgggagacacaccatgccgaggttcgggaaatctgtaatagatagccgcccccgtccttgctggaaagggagccaaggaatgacagtcctttccacctcagggt

SEQ ID NO: 29827 - DNA, 2968 bp, Bovine  19866880806900
  misc_feature (1)..(1): n is a, c, g, or t
ncttgcctggagaagtccatggacagaggagcctggtgggctacagtccatggagtcgaaaagagtcagacatgacagagcaaccaacagtttcactttggtatctcacatccatttctagggaaacattgtcaagatcagtgtgcttttcattgatttattcttccgtattttacaatgctttttgttacacgggggcaagctctaaccaaactaaatgaacagtgtgtaagcaagcagcagtgctaaaggagaaatggccagggtctggggtcttgtccatggtcctggagcagataggtgccaggatggccaggaagtgtttgcacatttctctcatttcaggccactttttggccatgtgttatttcatgaggagttttgtgatgtcatacccttggcctctggggccctggtgaattggagaactcaggaggttttcaggggtttggagatggggaaggcccattgtcagcaagtccttaatgagatgtgatcctacctggcttgctgcagtctgggtggcctttttctccttgctgctgctactgctgctaagtcgcttcagtcgtgtccaactctgtgcaaccccatagacggcagcccaccaggctcccccatcccttagaccagctcatttcctctgaggagttggctgattcagctgttcactaacagtgacttaattttaaacagagctcagggttgctacaggagttctcaggagacctgggcaggagggtctttcctccatcccagcttccccagacttcatgcttttctgcagccaggctctgctccagactttcaccctggcttggatgtggaacacccagttggcagcaggctccctttagtgggcagttcaatagcatctctatccactttggcactgtgacttcctaggggtaggggactggtttattcaaggtcaggacaggagccctggtgactcagatctttcctcttgatctgtaactctccttgacttcaggcctgagcagaggaatgggggcaggccttaaattcctcctcccctccatcacacctgggaccaggggggtgctggcccacttagccagacccaggaggctcccaaggggatgatgaaggctatgtatcactaaggttctagatactgcacatttgcctcctgtcccagtggcacctaggttgtttttagtagctaagttgtatctgactcttgtgaccccatggactgtagcccgccaggttcctctgtccatgggatttcccaggcaagaatattgcagtgggtagccagttccttttccgggggatcttctgacctagggatcaaacccacatctcctgcactggtagacaaattcttttccactgagccaccagggaagcccaagcagcatttaactttggcccagggacagaaagcctaggagcagggatggcccttgcttgtcctgtgtcttgctcagtgggggcagcaccgtggccagcacctggaatgtggtctagaatggtttaagggttctgagagggctatctcctgaccttttctaagggggagggtaagccctgaggacaggactcctggctttgtctggttgggtgcatgggccggttcacatgagtggctgtgtgggcctttgggttgagaagtacaccggcctccccgggattctgggcggtagctaccagccccttgtctagaaagaggctcctcgctcgccgcgaggggtgagggcgcacggcgcctgggatccgccccttgggcccctccccgacgcagccaccgcccacccgccggccttgggctcccgcacatctggcggttctcagcgcatctgggcagccggcgccgaagcatgaacagctcgcaggcgggcgccacagcccggggcgcctggcagagctcctgctgcaaccagtcgggggtgccgccggagccccccgaggggccgcgcgccgtgcaggcggcggtgctgggcgtgctgtcgctgctcgtgctctgcggggtcctcttcctgggcgccggcctcctgctccgcgcccagggtttaacagcgctgttggcccgagagctgcgctcgtcccgggagggcgagcccggtggcgccagcgtcgatgacgacgactcctaggcgcccggctgcgttcgggggtcgcgacctcccggcggtccgtggactccatgccagactttgagggagcggccccccagcacccgaagtctgcagtggggaaccctgccgcgatgctggtgcgctcgcacaggtgagagtgcgcacaggtgacagagacgcagccatcccaggcccctggcttcttctttctcccctcctctccttccggaagcctttcccccccgagaggcgattcgagtaagattcctcactgtggcctccctctcgaggcagggatgggggtgtgggttgagttttagggcagaaccaggggcctggatgaccctgggggatggagaggtgtgctgccccctccccctcaggttggggtgaatgcacgtggcccagagcaagcagctttggggtgtgcttgtgggggtaggtgtcaaggttcctaacagctgggaggcctcagaagcacgttgctccaggaggctggagctgagggttcccagctgcaggggctccatctggccctcctgcctctctctccccaaggacaggaaccatctggagggaagggcctgggtggcctaaagacaaggtaattctaggccaaggctgtctcaggccgagccacaggggccagtgagggaacccttttctgcccttctctatttagcatcgcacctaggggttcctgggaggtttttgtgggtgtgcctgttcactggaggtacctctgatctttcttgccccttccactgtagagccccgctcctgtctgccaaggcagaggcagggtcctggctggcccctgagaggggagggcttgggtgtgtgaggaggggccggtgggggtg

SEQ ID NO: 29828 - DNA, 1346 bp, Bovine  19866880868055
  misc_feature (1)..(1): n is a, c, g, or t
ncccaccctacccaccccccgcactctccaccccacgtatacactttcatatccatgtagagacctatacgcactcagaccagccacaggcacacacacggcaacacccagagaccacaagcacagagaagcccaagcacacacgtgctccacagtcctcggtgctcacgtgcacgtgtctgtgacagcctcacagtacgcccacttgcatgtgtgtgtgtgttccttacatgctgtcatccctcagggggtgaatgtgcacacagtctccgctctgggtcccctcaccttccctcccctcttccaggctggttggcaggggccccctcacctcgtcatagaggcgcttcaggaaattagactcctccaccagggcctccacgttggcctccaggtctgactttcgcaggtaggcacagtccacatcctggtggtggggtagagaggagggggcgagcgtgtgggaggaggccccgggaaggtgctctgggtgggtgtggcgaccagtcccactggaggttgtgcacacagaggtgccgctccctccctcccggagcccatcccctttaccttctttagaaccacgaactcattctccgctgtggccctcaaagccacctcctcttcatacctgtgtgtgagagagtcagaggctggagctgaggagtcagggtttggcagccatcctgggcaagctcttctgggagtcaaatggggtgaactctgcaaacgtcatcccgttctctccccattctatttgtgcattgtttgtgggctagccctgtcccagcctggctcattccacctgagtcctgctgcctctgggatgagatcagagaatgcacattccatgcccaggtctacaatcatctttccatccatcctagatccaaagagagctggtgccacgggcagagtggatgtggagcctgggtcaggaaggggagcaggaggagcaagaaagccatggaaccccactgggcttccttactcctctgaaaccatctctaagacccatgggcctccaaggagttgaggtggagccaaagaatctgaagaaacctaggctcctactgcccatcctcttgggtagcaggcagcccctcttggcagacaggcaggaatcttaatgaagctgcttcaagagggttgtgggcagagccttcccccttaaccctgttaccacaggtggtgccacactcacttcttcttgtagccctccagcacctcctgcacgtggttgagctctgaggccagcctcccgccgtcggcctccacatgctcagcctcccgcctcagcgtctcgatgtagccatgaacaggggctccaggtgctctcgcagcag

SEQ ID NO: 29829 - DNA, 1242 bp, Bovine  19866880964921
  misc_feature (1)..(1): n is a, c, g, or t
naacgtccccagagcccacagctaggaagtgtccaagctggcatttaaaccaggccttccgatttggactcccttgcccaggttgctaaatacctgctgcttcaccacgggtgactatgatctgaagattacttggtgccagctgaggccacctgctcctcgcttccccaaggcctctgccctactcggaaggacaggtgtgggatgtggagatagaaaccagctagcctggtgctgggcaaagacctgcagtggctctggctgtgaagtcaagggcagaccccggagagaacgtggggcgtccagggaggatccaggaacagcagcacagggacagcattcggttctggcaggctccctggaggagttgccaccctcagaggaagttcctctgcccttcttcctgaagttcctaacctctcaggggcctggcgagcctccctgggggtatagacgacatccccaggtctgtactcaatgagcattaaagaatagccatcattatgttaataagtggccccaggacacataggaaagaggggactttggaaagaaccaagagttcagaacctgtgggagccagaaatcacagtgtcctcgaataagaaaagctgccttcctcccccgtctctgcgcagagcagtctctgaatgttcttccaggagtgacaattccagggctggcaaacagggtgagcccctcccctggctggtggtcttggaaggaactgggactcacaggacctgtttcttcttaaagagccaagagacagtgtccagagcaagtttgaagcatcaaggctttcccggaactgggttctcccatcctttcagtcaagtgggagaaagtatctaaagggagtctccccattatccacaagaggccattattgtggccactgagagttaagtggtttgtagttttgtgggtgagaaatgaaggccctggaacagaacctttcaagctggaatccagaaggttctaggagaccatgagctcaaccctctgccctgcaggaagcatgatcaaaacagcctctctggacctgaaccacctccaagacatgctgcttgaatgggtttgggctctcttgatctatctgcccctgaaacacaacgatatacctgagaatgtatcctgtatggagccccgaggacagaggtgatgatctctggtggtctcccccaacctggggccctagaacttcttcctggagatggtggccccagtccctaccccaca

SEQ ID NO: 29830 - DNA, 1232 bp, Bovine  19866880997622
  misc_feature (1)..(1): n is a, c, g, or t
naagaactggccccattgccctccagggttagaaggtcatggcatccaagccactgcctcccatgtagagcctcagggaatctgcctgcctttgaaagaagaaaatccatcaactttttctgttttgtcttgctttcctgggggaaccccaggctctaatttccttacctatataaagagagatgggatcatctaagtggtaaggatgctccctcaggggtgatgagtgtctatcacatgcccaaatgagagtgaagcttgcttgtttcctggagcatgtgctttgatgaccacgacttcctttgccaagcccttgtggtacccagttctccctactctcgaagtccccattctccctcagccctgcctacatctgccctcacagaggctggctcgtcttcctccagagcttcactcacatcaagattaacagaccaagaggtagcaaatctccatgtctattcagccctgggggtggcgtggaggggtgcaggtccagagaggggacggatgctgactatgcagtcgtcactgtgggtgggcgactcttggaacgagctgcttccaccaggaccacattcagtttgctagaaatagagacagagggcttcttgactttgcatacgatttgcataatgtcatagacacacagtctattttcaggcagctttcaggttaaagtgttgtcactgctgccctgcggggtgtcacgtctggatgagtctcttctctgttctttctcacccacccactcttactgacctagatccccaactgcaggagccagcggcagggtggggggcagactggggttgtccggggagacacgggggcagggcaaaaggcacactggcatttcctttgttaccaccaccacccaaagcaatgtggagctgttcaagggcagccgacaggcagaggcaaggaacgggaagcaaggtggctggctcatgctctgttctgcacaaactgctcccgcctcttctaccagaacagccagttcccataccctcgatttagtcttctgccagtttgaaggaagacatctaggtaaacctgttcctctcagccaccataaagcttggcttggcccagctatccctcttgggcatttattttcagcagtaaggtttgatcttagcctcctgtgaaatctgaccctctttctgtccctctcctgggaaccccatctgggagaccagtaaagctaggtctgatgatcagtgtttata

SEQ ID NO: 29831 - DNA, 1130 bp, Bovine  19866881092728
  misc_feature (1)..(1): n is a, c, g, or t
ncagaagagaaagacagtccaagttcaacacgtgttcagatgccccactgaagcactttgaatcaaaagtcccctgtgggttggacctacagggtctatcctggactttcccatttggaaagtcaggaagagtcagctgaccacagttttcagcatgtgctaatacttgaagaactgctctaaacaaacctgtgacacttacagagccctgtccggtgtcaggcaccgctcaaagcagtggacagacaggctagtgtgggacacagagaaaatgctggcaacaggctcagatgcagaggcaaggacagaacctgagacggcaggttctcttcctggagaggggagcctgcttgaggtgtggaaagccctggcagggccagatggctgggaggggcaaggagaagggcacccctgtgggaattctgaatagaacctcaggtttccccagacctcacagtggagaggtgggaaggacacctgtaatcctgacctccaacttactgtggcctgagcaccggacagtcaaaccctccagcagacaggacaagaagagagggggttaaacacagcagaagagaccagagccaggtaccagggagagcttcctgctagacctgtctgaattccaaactggcaagcaactgaggggttccctgatccctgggcctttcaagaaggggagccacctaggggcttcagaagggtcttttctgcaccaaggcaggaggctgtgggcaggcctctcagggccgctcccgcacgggaggctcggaacgggagagcgcgattcagccactctcacaggtttggccttgtttttttcacacagcagaaactgcttcgtcagctcctctgtgcaatcactggtggaggagccctgccccaggcctctccctccccctctgccctctgtcctgatgcaggaacacagacctgcctgctcccagcacaggcttgggacccggccctcagcctgtcctctcccagctgggccatccaggtgcactgggcagccagcgcagaccccagagccccccgggcccaggcccagccaccaggagggggcagggagaacacacagcctgcccctggggaaacagtggggctggggagtcaggagtcccaggctg

SEQ ID NO: 29832 - DNA, 999 bp, Bovine  19866881115443
  misc_feature (1)..(1): n is a, c, g, or t
ntttcattattcatggatcccgtatttgtgaatctgtccacttgctaaaatttatttgtaaccccaaaatcaatacactcagtgttcatggtcactcacaggtgagcacagaggggtgacaaatttgagtcaccccaacacacacgttcccacagaggttgagtaagaacgctctggcttgtttcagccctcatactgttaacacgcgttcttctcatggtatgttcagtgccaagctttctgtctttctgtggtttatgctggtggccccaagagcagtgtggagacgctgtctagtgtccccaggttcgagaagacagtgacacaccttagagaaaatccatacactgaacaagcttcattcaggcaggcattatagtgctgttggccctgagctcaactttaatgaatcaaccatatatattaaataatttgtctttaaacagaaacacaaacaacgtaaggtgatgtgctgaccagctgatgaaagcacagcaaccagcagcagcagcggtccaggatttgctaacccagtgttcaactgggcttcacagaacagttaccgaaaataaggccacctgactgcgttagccccattttacagatcgaacaatgacgtggacagggctgtgccgtggcagcccctggcgcactccggcacaccatcctgttttatttccttcacagcactcatgactgataaccgtgtttactcatttattttcagtctgagcctctgcaatcataagttccatgaggagttagggatttttgtccctcttgttccctgtggcctcctcgtgccaagaagcattccaggcacacacccaactaaatgaataaagaaacctcctatatgtaattgtgtaaatattagagtgattgatactttaaagggaaaggcagttactttcattatgttaaattcaaaatatttagcaagacaaatgaggcttcagactaaatgcagagagaaaaaagccaaaaagaacaccacag

SEQ ID NO: 29833 - DNA, 763 bp, Bovine  19866881213667
  misc_feature (1)..(1): n is a, c, g, or t
ntgacctcgttgggccacctgccagttccaggagctggcgctgccccacttcgggaaagaggatgctggggacgtgcagcagttctacgacctgctctcgggttccctggaggtgattcgcaagtgggccgagaagatccccggctttgctgaactgtctcccggagaccaggacctgctgctggagtccgcctttctggagctctttatcctccgtctggcctaccggtgagcgtcccactgtgtgctcagccctcagctggcgccctgccctccagcccccctaacagctgtctgcaccccacctgccaggtctaaaccagccgaggggaagctcatcttctgctcaggcctggtgctgcaccgcctgcaatgtgcccgtggcttcggggactggatcgacagcatcttggccttctctcgctccctgcacagcttggtggtcgacatccctgccttcgcctgcctctccgcgcttgtcctcatcacaggtgggaggccggtccccagacccagggagatggggaaggcctgagggcctggctctggatgtaccagcatctggtgtttcctgggcctcctgcattgtggggtgagggtgacgaggtgcagagagggcaggtgtggctcagggcaatgcagttggtggttggcagggcccgggtttcaggcctagctgtggctgacggcaaaccctcagcccctgacgtagcccagactactcaagatcctaactgtgtaggtgtcatgtgtggcctaaagt

SEQ ID NO: 29834 - DNA, 2086 bp, Bovine  19866881237489
  misc_feature (1)..(1): n is a, c, g, or t
naaacgggatttgaataaggctggaatgcccagcccagtcctgcgtagctgctgcctcttttactccaccccaaagccttccctgccaggctgtcttagcgcagacagacggggccagccttatcgcttgcaggtacttttatgcctatggatgggcgccactggttggtggggccaaagtttctaggggctctgttgtctggattggttgtgggagtgtcaggacgggggtggagctgccctgtccagggcccaaggaggcaggagaaagcctattacgggagaactcccccaggctcttggccaggaggtaatgccagcttttgccccctcctgctgtcccccttggtcatggcacgccctgtttcagcttgctttcttccccagcctccctccctccctgactgatgaggctagggtcacggagacaaggcaaggaggtaggatgagaacctcctctctgtgttagcttttgacttgtctgtgaacttaaagatcccccctgaatgattctctctgctccttcagattcctccagatttgagggggtgtaagccccctttgtctgagctcctgggttcttcagggcacagaactgcttagtggagggacccagacttccatcacccccagcagacttctcctctgccctacacagccacctcaggtagtctgctggactctgagtgctctcgtaaaaataatagggggagatgctgcaggaaagcagagaagttccttttcaggactcgaagtccaggggctgctctccccgccacactccgccctccagcatatggccttttaaaggtctggatcccagttacctgatcccttggggtactggggaaggaggtcgggctcctttgctctttccttctgagagcatcccaggcaatgtagagtgggtgcccatccccagatggcaggaccggggtgcgcgtgggatctacagcctttgctcagtatgtagggtgagggtggggttggggatgggggtagggagaggctaattgctgtcttggctgctttcataggcaactgggccttcactctcagctcctcttccatttgcaggatgttgttcttcagctcaggcactgttgggggaggacaggagggggttttgcagaggctgagccatgcctgggaatattcccagaagtgccaggttggaggaacggcgtatctgctcccaggactgggctctggctttgcctggctgcctctcccacccacccttctcccagcccccacccgtgccttacccagttagggagaggcagggggctggacgaacacagctttcccctgttccagcagagaaatgctggctacatgccctccctagggttcccaggctgcccggggtgtggttggccttccgacttgagcccacccttgctgggaccttgcctaggggctttgtgacatggacattgaggtggtgctctgaccaggtaccaaggattcctgggttctgtggtgggccatggccttaacgcctcagtgtcccatgtctggctgggagtcctgcctcctggccgctcaaggacctatacttagaggtcaggcttcaggcctctcttactgacttccctctccccccactttggtctcttccctctccagagatgccctgtatccaagcccagtatgggacaccagcaccaagcccaggaccccgtgaccacctggcaggcgacctcctgacccctgagctcagcaagcccaccatggacctggccagccccgaggcagcccccgctgtccctaccgccttgcccagcttcagcaccttcatggacggctacacaggggagtttgacaccttcctctaccaactgtcaggcacagcccagccgtgctcctctgcctcctcctcggcctcctccacgtcctcatcgtcagccacctccccagcctctgcttccttcaagttcgaggacttccaggtgtacggctgctaccctggcacgctgagtggccctctggacgagaccctgtcctccagcggctctgactactatggcagtccctgctctgcaccgtcaccatccacgcccagcttccagcctcctcagct

SEQ ID NO: 29835 - DNA, 1470 bp, Bovine  19866881716950
  misc_feature (1)..(1): n is a, c, g, or t
ncttgagtgggcaacgtgcagctaagcacctgtgaaggcgacgacgtgtgatccctctgcagaagagcccaggatttggtgttaatcccgggcagctgtgctgcactggacttgctgagctgtggacttctcacctcaggcacaccgcccccacccccttggagagacggctggccagggcagtgaggggtgtgtgtgactgctcctggcccaagggcagcggggctgggcgcagggacattccccactgccctttgctgtgtcctgggggaggggctggaactccttctctttacggtatccagtttacctgcccccttgctcacaacattctgcgtatttccgtcctgtctcccatctccagcctgtgcactttcctccttctccagctgggccagagtctccatgtctgctgtgaggccttcattttacaaatgggaaagctcagagggaagaaagtgacctgctcgagtgaatgccagagctcaaactggaccctggggctcctgattgattttgagctctggcggggagtggtatccctgagctttgggttgccccttttgctctgttctctcttgccctgatttctcaccactctttgagatgctgatgcaaaatatggcctctctccccaaaagaatgaaccttcacaccacacatatggcatatggtttctgggactggcaccccaactccgccccccgccttggtgtcctctctcccatccctgctcccccgcagccttgctggataccttcttggtgctgcgaatggccacccaggtgccacaacaactcccaggtagctgggctcagcttttctggcctgagcatgagggtgggatgagctcagagggtcagctggaatatacatctaaggaaatccaagtggacagggcagaggggccagaggtcaagatgatgacttggattggcctttgggttcaagtctgggtggtgttaggggtgtaggaagatttgatggcaggaaaggctgtgtcccccagcgtcgtggtatcagctcacacccaggcagggctggggacggtgcagtggggtgaagaagagggggtaggcaaagactttcttcatccaacttcctgtcttcgctgtcccttcagctcagtgcctgggaagctggcccatggtgtgtgctgtggaggacctcagtgttcctggaggaagagcctgagacgtttgctaagaaactctgaccctggtcaaggctgtcagactgaatggggagggaaagaattcagaaaattgggaaatgggtgttgttgtcacgccatctgtcaggctcggcttgggagtggcagggatgatgactgcaggttggtgtgccatggagtgaggccaggcatttggatcccaacaagctccattagcctgtgctgtccttgatgaaaggctgggtccacacatgcgggtggcttactcttcctctaaccccgagtctcaccctagg

SEQ ID NO: 29836 - DNA, 1574 bp, Bovine  19866881779483
  misc_feature (1)..(1): n is a, c, g, or t
ncatacgtctgtaacaggcaaggggaccctcagcccaggggtggagcaggatccaccccgtccctcagactgccttcccaacccttccctccctctgcacccagcttctctcccacctggatctcaaagccaaaggtctggttctcctccttctccaaagtcagcactttcctgcaggagacacaggggccatctcatcaagtctgtcaggattaaagaggagcctggcaggccaatagtgtggccctcccctgatgccagagtctgctctggaacatcaaggcagggcttactgtctccagtgacaagccacactcatccccagctgttggaatgtccttccccatactgaaatcagcttcatcgagccacacaaaatcaatcccctcgagtgggggacacactgcaatggctagcccccagagccagttgaactagttgagtttttcggccacactcccagcttcctagtgagccccagaatactactgactgactagctgaggcccccaattcggccccagcctggagcgctgtctgctccagagccttggggagagggctggccccacccccagaggccggtcacgaggctcagcccggaccccagctgcccctcccagctgcggtgagggccagcccaccagatgtgagggctggggggaggggagactcgaggccgccccttcccgcactgaaggcctgcccactggacacaatggtctggagctgctccagatcttcgtctgctgggggagcccagagtttcctctgcccactcccacccccttccttcccgccccgccagaagccgagctgaagcagcctccaaagtctccttcaaggctctcggcctcagcaaggccctggagacccaggcctctcagtgcccagcctgacccacatacccgccccccaaaagctgatcggcaactccctaccccagcgcgagctcctccctgcattgcaggcaggccttttcctctctgtgtgtatttgggccggggtgggggtgggggcagggtgactgtgtctactccagtgctccctggttttctaaaagggttggcaaagttttcctgcaaagggtcagacggtaaatatttcagcttttcttttcgagacctgaattatttgacagcctctgtcttatattgttctttgtctttatttttacaacccttgagaaatatcaaaacaactctcagctcaaggccaatctggccagcaggccacagtctgctgatccattttagaaaccaggctcacatcaggatgggacacaggcagagtagggctagtccttctgccctcaccccaggcccttccttagaggccaccaccgacgggactagcagagcactgaggttttgggtgcagggctagacagtcgagcagctggatgcagcttgccatggtgtgggccttcagggtttgttgggctgggaaggcccaggggagccccccaaactcctcctgcttccctcttcccagatccagatttctccagggaggggtgactggcagggactgggggggtttaaggagcacctgatactcaaaagtccctccct

SEQ ID NO: 29837 - DNA, 1168 bp, Bovine  19866881814139
  misc_feature (1)..(1): n is a, c, g, or t
ntgaagacaggagagttatgacttcccaagaggtctttgatgcagacactgaagtcagactgccagtttttaaacctcaccatgctagtctcttaaaagacgggcttgttccttggaagaaaagctacgacaaacctagacagcatattaaaaagcagagacattactttgccatttgccaacaaaggtctgtctactcaaagctatggtctttctagtaatgtacgaatttgagagttggaccagaaaggaggctgagtaccaaagaactgatgcttttgaaatgtggtgttggagaagactcttgagagccccttggactgcaaggagatcaaaccagtcaatcctaaaggaaatcaaccctgaatattcattggaaggactgatgctgaagctgaagctccaatactttggccacctgatgtgaagaaccaactcattagaaaagaccctgatattgggaaagattgaaggcaggaggagaaggggacaacagaggatgagatggttggatagcatcaccaactcaatggacatgagtttgagcaagctctgggagataatggagggcagggaagcctggcgtgctgcagttcatgaggttgcaaagagtcagacacgactgagtgactgaacaacaacaatgctggtctcctcacctgtaaaacaggtaaaagaagggccctaccctgcaggtttgtcctgaggatcagacaggtcaatacatatacagcagcacatttaatggtgtccagccacgagaagtcctccatacatgtcagatattgttccatagattgcctagcactgagcctgtgctcacacctcaccacagagcccctgtcccagcttgccttgcctgtggcttctgatcagtttttcttacagtaaaatctggtttttcctcaaactggtccttcccaggcgtgccgttgtcatgggaacctacaggggccgcctgggtttgggggaggaaagggttgtggatgaaagccaaagaatcccaccgctgctgttgcagccactacagcagtaggctggccaccattctagccccccaaaaaagatcctgacagtgccagagggtaaggtttataggggcttacttccgccctgacttgccacaggtcacatgggtgaaatcccatgattcaacatgctccaccat

SEQ ID NO: 29838 - DNA, 1319 bp, Bovine  19866880626664
  misc_feature (1)..(1): n is a, c, g, or t
ncccaagccctttcatgaatatacttaaaacttcccccccagtttgcagttctgggagacactgctttgtggaagattcccagtgttctccttacttgctgcaagtaataaatccttccttctctctctctgacttggttgggtcttgtggctcaacacccaccaagaggtgaactcagtatggaggctcctgctggctccctcactgggctttaatccagtcacactgttatgaaacaggggctctgaagaaattacttgggtcactaaggtcagagactcataaagttccagcatcctcaaggaatcctcactcccttgaccttaaggttaacagactaaagataaaggagtcctctgtgcttcccacctcaggggcaggaagaagagcagaaatgcttcaagaaggcttatgcagatatgtcttgaaacagacttggaaagatcaatgattcagaatgaggtaagcaaacttgttgaggcaagtcccattcaaatgttcaaggcagtaaagtggtctgaggtgtccacagaagtactaagaacaataattaaacagaatttcgcaatcttttccaaaccttttgctgccatgggacttttccttcaaacaagcttctgtcggagtccaaatacaaacccatgtgaaagcaggttgctctagtttcagaagggtcggggaggggttgggcacggttaaaaaaaaaaaaagtctattaataaaattagaaaattgtaaatcatcatgggagaaaacctttgaattcatatttatatcatagtctaaagaaacactgatcagaaagtgaagttccccaaaccgacacttcattagtttttaaagtgaagagcttttggattttaaggacatttttacttaaggctggagaaggaaatggcaacccactccagtactcttgcctggaaaatcccatggacggagcctggcgggctacagtctatggggtcgcaaagagtcggacacgactgagcgacttcacttacttaaaggcatgggaatagggaatatgatttttagtcacatggaaatgagccttcgatggaaattttcagatttaaggactgtgttctgcaggcccggggcaatgagtccccaggccccaccaggtggcgcgcatattcggcatttccagaacgtttagttctctaactctagggtcagacggcctgcctcgtgctttgtaggtttaggaaatccgattggatgtcacgctggagaaaataacacttctgttcttctgttggaaacttcttccctttcactttcgtcccaactagataaatccgcctaaccttgg

SEQ ID NO: 29839 - DNA, 1350 bp, Bovine  19866880783804
  misc_feature (1)..(1): n is a, c, g, or t
naaaagctatggttttttgagtaatcatgtatggatgtgagagaaagctgagagcttaagaattgatgcttttgaactgtggagttggagaagactcttgagaagactccttggactgcaaggagatccaaccagtccatcctaaaggaaatcggtcctgaatattcattggaaggactgatgctgaagctgaaactccaatactttggccccctgatgcaaagaactgactccttggaaaagaccctgatgctgggaaagattgaaggcaggcggagaaggggacaacagaagatgagatggttggatgtcatcaccgactcaatggagatgagcttgagtaaactccgggagttggtgatggacaggggggcctggcgtgctgcaatccatggggtcgaaaagagtcggacacaactgagcaactgaactgaactgaactgatcctaggtgggatgcccactgggaagtatgggagacattgtagttacagttcccctcttctcagaagacaggaaaattgcacttccctgccccatggaagcttggcatggccattggactattttgaccagtgaaatataagtgaaagaatcagatgtcttttcaggtggaagcatttaaagcacagggcacagttctccatgcctgctcctacctctcttctgtcgggatggcagcgttatgggatggaagtgtttcctccacctgggttcctgagtagccatgatgagcagatggccaagcgaatatgtatcagccatgtattataactgagaaataagttttgtcataacaagccactgagaaagactaaggtattgtctgctgctgcagcataatgtagcctcacctaatatagaaggaatgttagaggggagagggatttaaacacatttcaagtccctttctgcactcagaaaatgaatgtagattctgctataggcaaaactgctattctacatgctatttagacaactcattataagtcacagagagtctcaaaattcttctttgttggaaagtactgctttccccttgcacacaatatgaactatgcattcagcaggatgaggtcatgttacggcatgaggctgaccactttgggatccaggaattggcggcccagtcattcaggagtcacagaaggggccacacctctggaatggagcagggacggaagtctgagagcctgtctgggagagagagccctgtgccctgggcaggggtgatagagggactctgctattcaaaggtgccagtaaaaagctttgaacaagctaacagaaacacacaccacacatactcactacatagattttaaaactggcaaagaaaggcaggctaagg

SEQ ID NO: 29840 - DNA, 3587 bp, Bovine  19866880939078
  misc_feature (1)..(1): n is a, c, g, or t
nttatttttcatagctctggaggcttggagaccaccaaggtcaagatgctggcaaatatggtgcatgatgagggcctacttctggtttatagacagtctttttttcactttgtactcaaaaggcagaagatgtgagggaactttctggagcctcttataagagccttcatcccatatatgaaagcttcattctcctgagttaatcaccttacaaaggccccacctccaaataccaatttgaaaattaggttgcaacatataaattttgtgtgacacaaatattcagtctataccaacaaatgacatcaaatattttcttaaaaggggcatatttctaagatacttatatttaagatgttagtttggacaccttatccctcaaggtcttgttttcattgttcagttgctaagttgtgtccaactctttgtacccatgcactgtagcatgccaagctttcctgttctttactatctcctggagtttgctcaaactcatttcccttgagtctgtgatgtcatccaaccatctcatcctctattatttccttctcctcctgccctcaatctttccgagcatcaggggcttttctgatgagtcagctcttcgcatcaggtgtccaacgtactggagcttcagctttagcatccgtctttccaaagaatattcagggttgatttcctttaagattgactggtttgatctccttgttgtctgagggacactcaagagtcttctgcagcgccacagtttgaaagcataaattctttggtgttcagccttctctatggaacaactctcacatccatacatgactaatggaaaaaccaaagctttgactagatggacctttgttggcaaagtgatgtttctgctttttaatatgctgtctaggtttgtcatagctttccttccatggaacaagcatctttaaattcgtggcaatagccccagtccatggtgattttggagccccccaaaataaaatctgtcactttccaattttccccattcatttttcatgaagtgatgggataagatgccatgatcttagtttttagaatattgaattttattaaataatagtttaactccaactattgtagtaagtctacagctatcctaatattcattcaaactcttaaaagtggtatatggggggaggaagactgtctataatctcttggtcactctggctcctgcttccagctttaattgaagaaatatttggaaattgtttcctttttctgacatttttttattagcccatatatacatatacacacacaaacaaaaaaccctcaaaaatctcatatatatatatatatatatatatatgtatatgtgtgcatttatacacaaaaacactttcactgaagattcctttccatttcagggaagaaaaaataatgtgtatatataattttttcttaaacccgaagtgacctttttcaccaaagccaatattctatatacatcatttgtatattacatatataatttgcatgctatatatatataatcaatcaggactgtcagtttatagcatataatcaataactactttaaaatttattagaagtctaacaagttattaaatggattaataatttgactcttagttgatcagaagctagtgttagaatgattgcctctgaaggaaggtagacctggtgtgacatcttggctctgaccctatggctccatagtgattctggcccttcccagtttccagtgttcagtttcctgtttggaagcttgggtcctgctcagaatatatcatcaatgtgtagacattcttcaggctggcagggaggattggtggcacactgaggcctccatctctacagggtctgattgatgacagtaatctgaattttcctcatctgtaaagtgggacacttaatctgtattggtttcctgaggaatcagtgaagtgactcctggaaattgactagcaaatacgtaattcccactttaaagtctctcacttctttatcaaagcttatgtgtgctgaattttgttattgtttggaagtaaccccataacattgttattattgttacaaagcattggaatgtgaaccaaattttttccttcactcttaaaaaataaatctaggatttgtctaattatttaaatatgtctgtactataaagaaaattgttgtaaaaagtgtgaatcaagcataaattcatatgaattactggtgctggaaggcagggagacagttaattgggaacactattgttaatgcttccctgttagagacttctattgttagagacttcctggttgctcagacagtaaagcttctgcctacaatgtgggagacccgggttctatccctggatcgggagatttcctggagaaggaaatggcatcccactccagtattctcacctggaaaatcccatggaccatggacggaggagcctggtgggctatagtccacagggtcgcaaagagtcggacacgactgaagcaacttagcatgcacacgtgtgtgtgtgaatgtggaaaattaatgcctctaatctgtgaaactgaaaggtcccagatgtctccggggtgacttgatgaaatcacagctattccttcttgattcccagagcgtcttccagagacagcacccttctaaagcctgcatggatatcccctgggatacccattaaagcagatggatagtccatgtgccctcagagggccactaggatttctttgagtatgaatgtccatcccacccatctatgatatcatttctgaaaacacactcatcccaaccaaggccaaaattgcatatacctcttcgaagtgactcagaatctggctgtatttctcctttgcttcttccccacaagggcatgacatatgggcatgctgaaaagaataccaaagaatgatagatgttattaaagattgcaatcttctgccattgacatgaagtaggtaggagttctgttctttccacctgtagaaatcttttcatacttctttatttgggatcactaaagtgtacatcagctagaaaaggaagccagcgttttacgctcaaatatagagctcgttgcttctgttcagaaacaggcagcactgaaggagtttgtgagccctgtgtcccttctggcctgcacccctgttctaatctatttccctcccagggagcgtcatgggaagagcgaattgggttctgaggtcctatcttgaggttgagtctggtggtctgctgattagctgcctgggctcaggatgccctaaaacaccataggataactcacagaagaaccatgatttcattcacatatagtgatgattgttggtgacatcaaagagccagcactttatagttctttagacattttgcatagagcatgtatccaaaagtcaatataactgagttcttattacctagtcacatagctcaacacagattaatttagaactctcgaactcagtttttccatccattaaatgggtctaagatgagcctgattgctaagttatgtgctgaggtggatccttttacccaagacccatactcacacacagcttggaggtccttcttgatggtgagaagagagttggcaa

SEQ ID NO: 29841 - DNA, 1616 bp, Bovine  19866880985132
  misc_feature (1)..(1): n is a, c, g, or t
ncccggccttcctccacaaacggataaacaccaaacccccttctgtggcccctaccactgccgaacccccgaaggactgaggcacactgctcccatcagagcaagcgaggccgggccaggccgctctgggccaccaaaggtgtctgaagggaccccccccaccctacggccagaaaaagcagatggtggttcctgccaccctcaagcttgtgcgtctgaagcccaggcagaagtctgcctacctagggcccctggctcatgaggttggctggatgaaccaggcagtaaaagccacccggaagaagagaagagagaaggccaggtaccattctcggagacgtagtagctaatgaggcgatggaagcaggccgaaaagaacacagaagaaaactgacaaactcacagacgtcctcaggacccatgggtttctagtctgagcccaataaaatggtttactcgtcatgcttggcctggcctggccttcctccatcaccacaccaggctgcggggggcccccaggggctgccatccaggtgccacaggcagcctggggcttagaagaccgggtacagcggaggggcctttgtcgtggctgtttaagaagggcctttttaaaagtgtagacagggctgtgttgtctacgtggtctaagggctgtgcaggcacaaacttgcctgagacctattccttcatgagagttttaggacataggcggttggaacaatcagtgctattgcaatcctggcaaaagtgagctggaagacttagttggaagggacaccacattgagtacaggagtctgcttaagcttcccacatggttggatatacacgcagctgctaggctgtgagacaatggctaggcagcacaaatctggggttctaaaaggtatttatggaagggaagtgcagccaaggggtcacaggcattccccctgtgtcttccctatattttgtgatccaaaattaatcaattaataaataaataaaaggaggcaataaaagggagaaagtgtataggaaatgcatggtatattcaaagtaaggcagtaggaataggttcaaatgaatcgataaatacaacaaatgtaaatggattaacacttcaaatgaatacaaaaattaccagatctttaaaaaagaaaatccaattataagatatttataaaggaatttgaaagacagtagatacgtgtataacagaatcactttgctgtacacgtgaaacatatgtgttaatcaactgtattccaatataaaattaaattaaaaaaataaaatttttaaaagggaaaaaaagtatttgtaaaacctatttctaaaacacagtgatgcaaaaaggttaagagaaaaaaatggagtaatatgtgaatgggtaaatactaaccaaaataaagttttatagctacactaatatcagataaaacagattttaaggcaaaaaataatgaggtaaagaccttattacataatgcctagcagtttcatcaagaagctgcaacaattctaaatgcataggcatctaataacataacctccaaaacagaaagcaaaaattggcaaagcatgaagaaaatgtcaaatccacattgtagcaagaaatttttatgtatttct

SEQ ID NO: 29842 - DNA, 2150 bp, Bovine  19866881089771
  misc_feature (1)..(1): n is a, c, g, or t
nacagacatggaatccaccttcatggatttcatagctaggggcagaaatagacattacaaagttaacaacccaattttattataattgtgacgtcaactaaatgagaaataggagcttttaagagagcaactcaccttgactcaggttagagggaggcttccgtgggaaggtgacattcacctggacatggagaatgagtggcagctggccaacaaagagggaggcgctgagatcattagcagggagaaccatatattaaagaccccttgcagggtgggaggggaaaggaagcaggagggaggttcaggagggagggaacagatgtatgcctatggctgattcatgctgaggtttggcagaagccaacttaattttgtaaagtaattatccttcaattaaaaaccaaacaaatgtaaattttttttttttttaagtaaaggccctttagaactgagaataatgggaagcaggtgtctctgaagcaagggtgattttactgatagctggaccgggacctttcaggaccctctgccctctccataccttctcataacctgaggcttggaagtaggacagaacttaaactgtttaaggaaataaaaaatgaagcccgataagtgagggacgtcatgcttgagggagagagatttaagatgagcttgaagcaactggcaggggtaaaattttcagactttaacctaagagcacagggaagctattgaaggctattaggtagagagaaaaatacatatcttctgaacaagaccatgtaggggccatttgctagcaatccagacaagaggaaattgcagtctggactaaggtggtaagaaacaggaattgagagaagtgtgagtgatcagacatgcagcaactgcttagatgagggtggcgacagcaggtgatgaccaaaacaaacctcaggtttctgactccaacaaccgggtggggacgaagccggtttgcagaggagggtgatacacttgtcaacttcaaattggcacttgccaagggcgcttgccatccacccctccgaggattaaatcatgtgctgctgtaactgctgaacctcaatacagcggttgtgtgttgtgctgggaggtcagggcggaaattgggaatgaggcactctgtgctctggaaaaattggcagaacaggtcttcagatagttggatatttttaggagctgactttataagcccaatttttgcatctcatcaatctagaaaagcactaaattccttcatgatgacatctgctcctagtgactagcagaaaactttcggtaagataagtgcttgattgcatgaatgcccccttcaccaaaatgacacaagtactgaccttcccccctccaccccgccccacctctttggagctgtttctcagagctatctaaagtgctgtctcccagctatggttctgattttgccccaaataaaactcaacttgcaactctcatattgtgcttttttttttgagttgacactctctacattgaccctgttgagtcagagttgcctctgaggttttgagtgaatatgtccagagtggtcagctggacagagacatggagtctggagataaattgcagtaggctggctgtcactgctgtcgagacagaaagcgaaatgatggcctggagcgaatcaccgaggggaagagtgcagagtgacgagagagtccagaaccaaaccccagagaagccagacatttataattcagagcaggagaggctgaaaagcagcttgaaagagcgacctgagcagtaaaaagaaatacgagaagagtggcatccctgaggacaagggaaaaaccgcgccaaggggcaaggagtgctcagccaagtaaaatgctactgggaaatcaagtaagatcaaaacaagacagcctctactggatgcagcaagtggggccctggtgacttcatctctaagactgcagaggagtatcgagaggtcaaatagatggggttgtacgaattggggagtggaaagtgaggacaagtgtagacagctctgctgagacgctgggccaatcggggaggaaaagcagttgaagacagaggagtgagatgggagagcccctgaacacagagttttcagaaagcaggagcaggtgggatgaagggaaaagcaagaggggagg

SEQ ID NO: 29843 - DNA, 1224 bp, Bovine  19866882245808
  misc_feature (1)..(1): n is a, c, g, or t
nagtggaagagatggtaagatacaaaagtatgtcctgtggagccagatggcatgggatcgagccctacctccatcactcagttgtggtataaacttagttaaatgacttaacctgttttgtgtcttggttttctaatttatcaaatatagacaatggcttgtagcattgttgtaaggaataagtgtgctgataatacctttagtgcacttaatacctggttcataggaagaacaatatgaatttcagccattgtgatattactctatggagcctctccacaaagaagagctctgaacagaccttgcagctccttgttattcaaagcattgacttaatctgggagtgtgggtgaaccacagaatctcagacctcattccaggtctaccagccagaatctgcatttcaacagaatctctaaatgatgcaggtaagatactgtgcttctaactccacctctacatgaggtgtgcatacaacatccgcacgtacataagaagcgctgttcatcaccacacaggacgctgaccacagttcctagacacagcgacacagaaacccgctaccaggtagcacgcttcatgcataacagcttacagttcactggggctctctgctccctctgcattgtgcgtgtgtgctaagtcactcagtcgtgtccaactctgtgtggccccatagactgcagcccgccaggctcctctgtccttgggatgctccaggcaagaatactggagtgggttgccacgctcgacccaaggatcgaacccgcgtctcttacatgatcgaacccgcgtctcttacatgtaagctgcattggcgggcaggttctttaccactaatgccacctgggaagcctccgtctgcctcagccctatcttaaacagtgtgtgctttccctcagatctgaacatagttctgatatgtggaaagaaaacagtggaggcataatggggagggagagcccaggaaattaacaaatgaggtaagaccaacacaccctgcagacacagaactgggcagaccggccatcaatactgttgagtaaacggatgaatttgagcagggaggaggctgtccattcaggccgctgcatcccatctctacctcccctgtcctctccccctcccttacctgatcatagttgtcatggatgattctggttgcattggttgcttcctgtctgcagtgacacagattctgctgcgataaaatggagatagcat

SEQ ID NO: 29844 - DNA, 3026 bp, Bovine  19866880182857
  misc_feature (1)..(1): n is a, c, g, or t
naaaaaaaagatagacacaaagaaatcttccatttatatacagttcaaaagcagtaaaaatgaaacgatattgtttaagggtgcatatcggagaaggcaatggcaccccactccaggactcttgcctggaaaatcccatggatggaggagcctggtaggctgcagtccatggggtcgctgaggttagggcacgactgagcgacttcactttcacttttcattttcctgcactggagaaggaaatggcaacccactccagtgttcttgtctggagaatcccagggacgggggagcctggtgggctgctgtctatggggtcgcacagagtcggacacgactgaagtgacttagcagtagcagtagcagcatagaggtggtgaaactataaggcaaattgaggaattgattattaaaaaatcaggatgtttattatctctggagagtgaggaggggtcggaattgggagcgaacacaggaagaacttctggggatgctggcaataagcatatttcttaacctgatggtggtttcataggtattcacttaatataatttgttccattgtatatttgtgttttatgtacaaagagtacattctatttcttatatatgatgaagaaaaatgaagattaagaatcatgcaccatgttcttatgctccattacctaattgaaatcccctttctttggttaacagatattaacctttgtttctacatcattttttattagtcaactcattggtattcagccctggctgtgtgtcagaatctccaggggagtgtgtcttcctcccaaacatagttgcttgagcccatcctcttaagattttgcttcaggagagccaggtgggagcctagctaggccttgctagtttgcagacactccccaagcaatagtgataggcagctggggtggagagcctctggtttcagctcctgctatctcattgcaatttctgcagagtattcccctcagtcacacacttcacccccaatattcatccaagctgacaagctgagcattttatttttaattgcattttccttgaagttagtttgccgttgagtaaaaaagactggtcctattcaaggtgttatcttatctggcatttattctagctttccattcaccccttcctaaactccagcacctcgacacttcctttttggtacattcacttccttattttaagcccagggcacattcttggttccttacagccaatcccatcactcttttctccccagtgctgtggcgggcttgccacccatcccagagtagataagtgcctgtttatccctcgcctttgtttctgggctttaagtcagtttcctatcacggggaaacattccttccatcctctgctgactcatctttatcagcatttactggagaaccttatcaatagccttttgaacagcaacgtaaattaaatttatccctcttatcctccttctttatttacccttccaaacatcactagcaactgcaaaatattccagattgacttcctcttggagaaagcactgcatttcttcccagtagatttaaaataaatgtttgatcatttgttcattggaaggtaatctccatttctgctcaagtcagggtacctgtaagtccctgtttgccttggacagttctgccttatccctggtaattgttaatggtgcccccttttacttgaaggaaaaaaaaaaagtcaggatgatgcattttatgatcactttattaaagtccattatcaagtatacttgaaagataactagaggaagaggaagagactggatcctcatgctaagaggcacacattaactgtgtaggtttgatcattataaaccctcactctcaaagtgtggtctctagactagcggcataagcatcacttgggagcctgtgaaaaatacagactctaaggctcagtccagacctactgaactagaactttcatgtgaataagactcccaggtgatttggatgcacattacagcttttgaagcgctgtcctgaacctcaccaggcttcagtttattagaaaaataaaaattgtccagcctccacacagcattaaaattatatcagtgtatacaacttgctctgttttaataacaaacccacaagaacaacagagaagtacattaaaaacatgtacttacatggtggatgacttgcttttctcttaaaaacaacagcaacaacaagatggcggaggatgaggtggatgtggagtacatctctctcttggatacttcaggaatacaccttcagacacagaagtgcatgcagaacactagctgagagtggacaggagtacctgaccagtggaaaagaatatatagaaccatgcaaaactcggtagggtgaaggaactaggaggaaaaacaggagtgttagtaggactggacctgccctcaggcagtgggggaactgaagcagtgggccaatccccatattggggcaattgtctgagtcagaggagaaacattcaaggctgagagcgaaacagctgatctgtggcagcccaaatggaatgagaatcagacagtccttgccacagccatacataccccagacagggatgcagattccctggaaggcacagcagctgggagttggagattagggagtgtggagcaatcccaaggtgagggctgctcttaactgtggagagacagatcaaggggacgtgagggaggagattgtggtgggaaatgcctgtggaggaaagccaggcagccacggaagcaaggcgatactgctgagtcacgcatagtggatggagccatcaccatatcctctctcttcccacactgccacatctgcagctaaacagtagagaggctggcccatcaaatgcctgatgtactgaactacagagtaggaccccacccagggtgcccctttaagtgcctgatgtgccaatctacagagtaggaccccaggcagggtgtcccctctatgtgcctgatgcacccaacagcagagaaggaccccaggcaaggaagccctctaaggacctgagtg

SEQ ID NO: 29845 - DNA, 1436 bp, Bovine  19866880342961
  misc_feature (1)..(1): n is a, c, g, or t
nacagtctcctgtctttgtccgattctttcagctggctgcaaggagggaaaaaaaaagtcagtgaggttaccgtgatttctcaagcatatgaaatgtacaagaggcaaagcctgaaggtagcaatgtttaaagattacaagctgttccaagaaacaaattcagttttcatcccgggcaagctccctagggaggcagagcttttctgttttacagcctgtggttaaacaggaagaggacccaggcgagctctgaccaggcagttctaaccacttgcgctgccgtatgtccaggatccacgatgttcaggaaatcctactgacacagtcactctaagaactatgaatgccagtcctgtaattatgtgagtgtttgcacacatgcaggttgataatgaggttgaggaaatgtatgaaggaaagagccttgctggggccagtctggggaaaattgttctagggcatgtccttgatggaggctgagatgagcccccagttttgctctgagaggggaaggaggaaacagggcaccacaagaagtcatgcttttggtccatgatccctgaagttggagggcttccctggtggctcagacagtaaagaatctacctgcagtgcaggagactagggttctatccctgggtcaggaagatcctctggagaagggaatggctacccactccaatattcttacctcaggaagttccatggacagaggaacctggcaggatacaatccatggggtcacaaagagttggacacaactgagcaattaacacattcacttttccctggagttggactgtcactgaatcccatcctaccctgttcttgttgtgggatactggcctgttctttaacctcttaaagcccaattggtaaaatggggatgaaatgactagtgaagccagatcccttaatacagtgcttgttataaacagcacatgctcagtaactgtcggctgatgtatctcataattgttagctcagatgcatcaaaaagtgatgccatgttcttggagcactagccagggaagaccctgcatggcagctagcaaagagctcccagcaggtggctggcggctggcccagcatcagccacacacacagccctaagcaggtcatccccacaccctatgggttgcattctatgtttgctgagacccagagcaactcccacaatttggcttcacctagcaacacatcacagtattttccactcccccacatcagagacattctcaatactgtatatgaaaaaagctccaatttttacttggcttgcaatgcaaaactgcaggtggagaggaagggaagaaggaagaaaggaagagaggaagggagaaagggagggagagaaggagtcagggacagagggaaggaaagacaggcggtaaaggaccttcccaatctcaggggtccacaacccaaccttgcca

SEQ ID NO: 29846 - DNA, 1466 bp, Bovine  19866880581318
  misc_feature (1)..(1): n is a, c, g, or t
natactgtaattggccatagaagggatttatttaagtaggcatgttgaatacagtgggcatgtaatatgacagtgacatttttcattagttgtcattgagatgtagtgtctttttaatggaggtttcattgaataataatcctgttggatgtagagacagaaatattttcatgaactaacgtttcagcgcctaattcttttttctgagtattattaatttagatttaatttttagaagaaaggtatatgtatctaaggggaaggctgttgtggttcttttaaaacagtgtgttcatggcttggctttgcctttgttgattatggttggctttggacagcctaataaattttaagaagtgctgtccagcgtatacaagtaggatgcctacctatcattagtcttattaaattacattttccagaacagtgatgttgaaaggttgtacttatagtaaaagttttatacacatactgttacccagcttgatcacctgcttgactaggtttgactcagaatgacttggcttttctaggaattaaattcatcctcaaaggaggaagacttgccataattaagattattcagaagaatctgctgtgcacctcgagggcagttctgaaagaagaggtgaaaaaaaagtatagttagattataataatggaaaattatttgtcttctttacataaaacagaagccatcctttttgcccatcacagcatcattatttaatacacaaatgtgaaggtcttcttttgttccccaagtattccttattaccccttcaacctgctgatgacttcttttcccacactttctaaaggctggggtgagccctggggggagacttcaactccagccacaactgtggataatggtacttcagcctggggtaaacccgtagacagtgggcctagctggggcgaacccattgctgcggcatccagcacatccacgtggggctccagctctgttggtccacaaacattaaacaaatctggtaagttactgataattgctggtttccgttggatagcactggtgattcattgactataattaagtaattggataacgtttatgacgttgataatgtatccacatgttatcgtaattgtcaagcaactttcatgctatccagcacaagagactgagtataatagtcatggggacacatatccaagcggtctggctcaggtaccagacaggcccctaaatactatacagataatgagcagagttcaggaaggacccttaacattcagacagacattgttactattcttctagggattccaaagaccaagtatagagatgagatactttctgcttctgacctgcatgctgtacttttgggccattctccttaaaaatatgtattaagatgaatttttaaaagttccattcatccttgagttcctaagcaaatacgaacatgaatgccaccaatgtcccatgtttaggaatc

SEQ ID NO: 29847 - DNA, 1896 bp, Bovine  19866880585066
  misc_feature (1)..(1): n is a, c, g, or t
ngaaaaagtgaagaaggactactccaaagacatcaagtcagagaaggtagctagtaaggaagaaaaggccaggaagcctaatgagaaaagtaaaccacttgatagcaagggagaaaaaaggaagagaaaaactgaagaaaaaagtgtagataaagattttgagtcatcttcaatgaaaatctctaaattagaagtaactgaaatagtgaaaccatcacccaagcgcaaaatggagcttgatattgaaaagatggataggacacctgaaaaagacaaaatttcatcatcagctgctccagccaaaaaaatcaagcttaacagagaaactggtaaaaaaattggaagtacagaaaatgtatctaacacaaaagaaccctctgaaaaattggaatcaacatctggcaaagtgaaacaagaaaaagtcaaaggaaaggtcaggcggaaagtgactggaactgaaggatccagctcaacacttgtggattataccaggtatctgataattggggaggggtggggtgggggaagggttgcattgtggattataccaggtagctgataatggcaggggtgaaaaaaggagaatatgtttcttaagaatgtattgatgttaggggttagctggttactcttgtctttgaggataacaattgttaaaagataacagatgttaagtagattttgggagtgagccacacttacttttatgtaatcatacacacatatcttagagcagagtaagtgggcttttgaaacttgaaagggcatttattatatttaagttaagtctttttatactcatcagtgtttaacagttacgagttcttcattgaatacaaaatattttaattctttttagtaccagttcaactggaggcagtcctgtgcggaaatctgaagaaaaaacagatacaaagcgaactgtcattaaaacaatggaagaatataataatgacaacacagctcctgctgaagatgttattattatgatccaggttccccaatccaaatgggataaagatgactttgaatctgaagaagaagatgttagatccacctcacagcctatatcaagtgtaggaaaacctgccagtgttataaaaaatgttagcactaaaccaccaaatgcaatcaagtatactgaaaaagaaagtgaatcatcagagaaaattcagaaactcgccaaggaagtgagccatgaaactgcacagcatgaggtcaaaagttcaaaaaactctgcatctagtgaaaaagggaaaaccaaagatcgagatcactcagtattggaaaaggaaaacccagaaaagagaaagaacaacagcactcagccagagaaagatagtaatctggaccgtctgaatgagcaaggaaattttaaaagtctgtctcagtcttccaaagagactagaacttctgggaaagaagataagcatgattccgttcgagggtcctcaaataaagacttcactcccaacagagacaaaaaaacagattatgacaacagagagtattcaagttccaaacgtagagatgaaaggaatgaattaacaagaagaaaagactctccttctcggagtaaagactctgcatctggacaaaaaactaagccaagggaggagagagatttgcctaaaaaaggaacaggagattccaaaaaaagtaattctagtcccacgagagacaaaaaacctcatgatcataaagccacttatgatactaaacgcttaagtgaagagacaaaatctgtagataaaaatccctgtaaagatcgtgagaaacatatgttagaggcaaagaacagtaaagagtcaagtggcaataaatcacttagtatacttaacccacctgacccacagattgagaaagagccagttactgggcaaattgataagaaca

SEQ ID NO: 29848 - DNA, 887 bp, Bovine  19866880627305
  misc_feature (1)..(1): n is a, c, g, or t
nctttttgattacaataaaagttttcagtaaacttttcaaatgttgaatgattgccttatttgaaggaaagtgtgtcatgacttcacttccttcttccatttccctatttaaagtatcctttgagtctttagtataaactgaactgtatgtataaaatcctgaagtaaacatggaagatatacttcatttgttggctgataaaaggtggccagaaacaaggaatcgtggttaatttgatttctggttgaataagtcttaaagttctagatcgcacttaccatacgtggcctatccaatctgtgtccagcagcgagtagtaataggtccagaagcagtaggtagagactacaatggatctccttaatggctctggttcaggaagtttattgtgggcaataaaaagctattgaaaagatgttgggagctagggtaagattggtactttagaaatacggctgtgtaaatagagattaagaagacagtggctaaaaggaaaagagactagttctagtgtgaggtaatgatcctgaaatactttggtccagggcactggactggtagtgagagaacaggtttacattagcagcaactcagttcatttccttgatattatttccaaagtgtaccatatttacagtcttgtatgctgctgttggtactcggttttaggtggtatacaaacatacgtgaggatgttttctaatgcagcatttaatacgtaaggaaaaacattaagtgattgaaagcatgtaagggtaataacgaaaatgctgttcacatcaggaaagccattcaggactgagttaagcttggggagatgttgcctttaagtgaaaccaactgacttttaaagagctcttttgctgtattcttaagtcactctttt

SEQ ID NO: 29849 - DNA, 1521 bp, Bovine  19866880651160
  misc_feature (1)..(1): n is a, c, g, or t
naatccacttaagcatcttccaatgcaggagacgcaggtttaatccctggtccgggaagatttcacatgccacagagcaatatgtaccatgcctaagtaccgcagctactgagcctgcgtgcagttactgaagcctgccttagagccggtgctctgaaacaaaagaggctactgcagtcagaagcctgtgcacagcaacaaatacccaatgcagccaaaataataaataaataaaagacttcgctgagtttccctgtctctgaaatgctgataaagtcgcatacaactcaaaaggatgtctgataattataggactgccatccatgccagtttaccaagaacaacctcagtctctatctgttgttcttttactctcaagagagtctagttcggacaataaattacatggttcctctaattacagaggataatggtgttgaagtatagtgaaaagcacatggcagagtctcaacaaatgttgatttcctgtctcctttgagagaatttagatcaaattacataactattaagatcaatttcaaggctaaaagagtatctctccaaagtgattttcatataaatgaacctggaggaggtagtcaaagaatgatgttctgatgccaactgtgataaatccctcccttcttcttacattatagcttcctctccattccagttcagccacctggagtctcacctggaatgaatggttcttcctctgaactccccaataaccttttatctttttaatcctctgctccctttataccattttttttttaaatacatatcaaaccctttgatccctgaactctttcctttcttctgggccatcagtgagctgctgtgatgttacttttcttcctaaccctgccaatatggaaagctcctccaagcacttctggccatgggctttaatattgtgtcttttgaacaacatcctgtctgcatacctctgactgtcagtgatacacggcttcgagagagcaccagagaaaagaataatacatggagagcttgatgcatgacacacccatgacctccaacaaccgcctggccctccacaccacctgtcaccctactgggcatgcctagccaacccttccctttcccgacagaaacaatctcaggagttcatcattttaaggctcctgtctgattcctgttccatctggttcgcacaatgatcttctgtattatgtctgtggcatggatttctagttctatcacgttttcatcagaagatgtaggctgagccatttctggggcattttgtgaagaggtctgctttgcaagttaacatatcatcaattttgtgcatactagggaaaaggcgagtctcttaaggaagagttcaggcttcaagagagaagtatttggcacgagctttaagaatattatttaagtaatctatactcatatttttttacctgttttatctgtcaaagacggacacaatatgttttaaaaccatccctcaatggcatttctataaattcctcatttcatttctagcagttt

SEQ ID NO: 29850 - DNA, 1715 bp, Bovine  19866880676055
  misc_feature (1)..(1): n is a, c, g, or t
ntgcttgaagttggccctggctgctgacaccagtgccccaacagtgcaaccttcaaagctctctccccaaaagctgccggggtacttaactagcatgtgctttgagtttgggcaagagagagaaaaatgcagagctccacccccagactctagtgtcttctcctggatcccaagtaaagcattgagttaccccaggaagaaattgcctgaagagatgaaaaggcagtttagtttctaccggtaacaaaggccttttctgaagtctcggagctcccgttgtgggagtctatcctaattttaatctcattagtggtatggattcacacgcacacatatacatccatacattagaagtggttatataatcctacagacaaaagctcttccctttacttcaacctgctctgctatcttcctgcaccatatggtgagtctttttatcatatggttcacagagagctcaaagtctttgctacctgttcccttaatccttttccagagaaccttttgacatttgctgtctgatcttggattcctgccttctctttggttctatcccaattatggctccttcctcccagcccccagtctttcgtatgcaattcttattgctgagtatttttgccaactcatcttcccaagtcactttctgaattcgtccaggtctctcatcaatgaagtgacttgctgcttttccgtagccccgattttcaccccttgtgtgtggagctcagtcgctcagtcatgtccgactctgcgaccccatggactgtagcctgccaggctcctctttgaagggatttcccaggcaagaatattggagtgggttgccatttcctcctccagggaatcttcctgacccgggtattgaacccacatctcctgcatctcctgcattggcagacagattctttaccactgagccaccatgtaagccccagttcacccctcaggagatagtacattacagaacaagaaagtataagagtctattttcccaataaaatgaattatatcaaagaaagtgaaacatttggaatttcaagttttcttgtcaagccagagtgaggaaaggggggatttattgggcagacacagcctattttccccaacttccaaaggcaggaagtgcagctgggatgagaagcttccaggaatccagccattattgtcttcatcctggggaacccccgtctgtcaccccagcttcttgctgatgtctcttgttctgactgtgcctcagcaacacctccctcagccttccagcacttctccattctcaatcgaatccccaaatctagaacagcctagaatttaaagccctaggaaaaagactgatgggccaatatggctcagggatcatgagatccagttagctttggccgggaggacaggtcacttttccaaccatctgtcaggaaggacaacaggaatggactgtctgaaaagcagctgtggtctgggaagctcctcaaagagaaggaagaaaatgctgggctgcatggcacatgggcctgtgttcccttccgatctgtagattcttcaaaacattgcctggctctttggggaaaataataaaaagttaaatctagttctcttacgaagggtcagatagagcctattaacatgggatctctgtttcaggcgataattcatggcctctggtccaattaatgtgctggcatagttcaccctctgcgcatccatctcaaccg

SEQ ID NO: 29851 - DNA, 1200 bp, Bovine  19866880712698
  misc_feature (1)..(1): n is a, c, g, or t
nctgggcttgtttcctccacagacgaagtagcttgtgcagacccagaaatctgccggaaggtctgtagcaaccccgccggctgctctgacatcgcgtatcccaaacttgtgctggaactcctgcctacaggtaatgatccatcacccttcagctgagtccccccgagaaaggaggaccctggctgggctcccatccaaggtgggggacaagatgagagggcccccagctgaagttcaggccctggctacgcagggggctgtaccctacccacctctgggtccctcctctcagctcccagccctgagttctgccttgtcagcattgaacctctcaggactggttggccgcagacctgggcaatggggtcaacagtgaaggcagaaaaaagcccaaggcccatagagctcccttctgcccccagggctccgtgggctcatgatggctgtgatggtggcggcgctcacgtcttccctcacctccatctttaacagtgccagcaccatcttcaccatggacctctggaaccatctccggcctcgggcatctgagaaggagctcatgattgtgggcaggtatgattttactctggtggctcagtacggtaaagcgtctgcctgcaatgtgggagacctgggttcgattcctgggtcaggaagatcccctggagaaggcaatggcaacacactccagttactcttgcctagaagatcccatggatggaggagcctggtaggctacagtccatggggtcgcaaagagttggacacgactgagcaacttcactttctttcacttttcacagtcttattgggtggggccgggcaagagtctgaaaagtcaggataacccagggaggaaaaagctgagccattcaaagggaaagtccgaacagtgacttctcctggttggctcagccccactctgatggccaagctgaaggacaccaggaccctgtggatgagtaaggcattcattcattcaagagcacttcctatctgccaggtgctgggcacataacagtgaaaagaaaagactcattttgctttcttggagctagaataagaaaagcataagtaaacaggtggttttaaccgcattgagtattatgacagatgagccagaactagggcttcagaggaaagtctctaacttgggttgggatttgaggggtcaataggagatagccaggtaaaagcaag

SEQ ID NO: 29852 - DNA, 1931 bp, Bovine  19866880752448
  misc_feature (1)..(1): n is a, c, g, or t
nttcttgactcttggggttgtctgaggattaaatgagatccataaggggaagcatgtcacagggctgaaatgctcatgaactcccatttaggatttgtgtgagtattatttccaaggtctacaagtccttatccaaaattatgaaatccaaaaagctctgaaaaaaaaaaaaaaaaagaaagttccttgctgtgtatttggtaacaaaactgtgaggtcatgacatggactcagttgctgataaaacctgacctaacaatctaacttgagaaagtaactgtcatctttacagatttcacttgttggaactattttgaagttttgctacagagtaactaatgcatctgatggcagggtgctgctgctgctgctaagtcgcatcagtcgtgtccgactctgttcgaccccatagacagcaacccaccaggctcccccgtccctgggattctccaggcaagaacactggagtgggttgccatttccttctccaatgcataaaagtgaaaagtgaaagtgaagtcgctcagttgtgtccaacccttagcatggactgcagcctaccaggctcctccgtccatgggattttccaggcaagagtactggagtggggtgccattgccttctccgctacccagggtcataaagccatctatggtaaatgtaccctcgtctctctaaaattctaaacactctgatgcatgaaatgtactcgggttagcaaactacgtgttccccagcctttatggccgtctccatatatttacaccaccttttagtatttgtctgatacgtctctttaaatcaacttactttttttaaaacccaattttatttaaaaggaggctttataacctgactgtaaatggagaactagtattgctggccataaatagaaggccacctcgaaaataaacacaatgaaaacaaaatgatgttattaaattccagctagacactgtgaattgaaaagcaaatagctttctcgccatgtggtaagatgctatttaatgccatgtccagattccaggcatcagccatggtaggtaccctctgaggcatgggagcctctgtgggtgggctatcaggtaacccccaggtagaagggagggctaggtaacctcatttcatttaggctgggtggcactgattttcaatgcctcaaggaacagccttaataagcgcccttaatgtgatttgctgttgttgcttagttgctaagttgtgtccaactcttttgtgaccttatggactgtagcccgccaggttcctctgtccatggcatttcccaggctagaatactggagtgggttgctgtttccttctccaggggatcttcccagcccagggattgaacccatgtctcttgcttggcaggcagatgttttaccgtctgagccaaaattttccctaagccaccctaaccatcctgtaacaggccatttccgcctaatatacaaggcccctcgggcctgtgttgctgagacttcgtgttgaaagggctatcatataataaccagatggtagccagcctatgagctgatgccaggcaggaagctggtgtttgttcattcactcatccataaaaatgtctacggagggcctactgggtgctaagcataacacctggctccaggaaatgaacaaaatctctgcccttgtggatgtgggggagaaagagagagaaagaacaagcctttcttgttcaaacaacatagcatgagggggaccatgctatgaaggaaatcaacaaagtgtaacatagccagtcacagcgggaggagaaggaagcttctggaaggggcatctgagctgaggttggatgcagaacatgagccagccatgccaagagcaagaaggagagcatcctagctgggtgaccaacaagtgcaaaggcccagaggctggaacccttgagagcagcgcttcccaaa

SEQ ID NO: 29853 - DNA, 1715 bp, Bovine  19866880781293
  misc_feature (1)..(1): n is a, c, g, or t
naaacacctgggatttctatactgataaagcaggaggtgactggaagagatggacaagtggcatgctacttactcttctcatttattttttattcgacttcatttatcaaagtatacctgctcaagattttctgaaaatcaaatagggccaaaggggctgtcaggaaaagcagctcctggccccattcctgctcctctcccccaaagttaccatggttagctggtaacttttctgtcttgagcgaacaaatgaaaggcattcagtcatgtctgactctttgtgatcccacggacttagcccaccaggctcctctgtccatagaactctccaggcaagaacactggagtggattgccattcccttctccagggcattgtcctaacccagagattgaacctgagtctcttgcattgacaggcagattctttaccatctgcatcaccctagtttaacttgaaagtcgctcggtcatgtccgactctttttctagtccatagattctccagtgggtagccattctcttctccagcggatcttcccaacccagggatcgaacccaggtcccccacattgcaggtggattctttaccagctgagccacaaggaaagcccactccaaatacagttgttgaatttttatggttcctatattgattcccttataactttcaatggcatactccaacctctagagcttccatcagctatcgacagcataccttggctgttctctgtgtaatacctggatgttgcagccccaccattccttccctcctccaaccatccagctccaatcataggtgcagataggagggacctaattttcaagtatttgagtgcaaaagaataggggattttggttactgaaagaaggtcagtaaggctaaagtttaaataacatgaggatgtgttttataaccatatttcattttccacaccttgaatctagaagtgacaaacccataactgaactatgtgagaatataaaggggagttatgggatggcagatagggcgccctcagtccacatctgcttagttttcaccatttccttaactgacattcatgtgggtgactttaccacagacgagtttttctctttcagcttatgtttcttggaagaagggcatagacaaaggtgaagctggggggtacactcagcccagttgtacatctggcagaggctccaataccttcagagccttacaccctaacatgttgccttctcactcgtgatcatgttttactgctgaacccctgggcatcatcagagtggccccagaagagaatcaacatggatttttcacagcagtcttttgagaggtctcaaaagttcctcctactctgagaattgtcctctctccctcagctcacaggagctggtcccagtagctgtgtccataccaccaccaccccgtctcaatgaccacagcaggtcgggctggaaagtggcatgagacacaatcagtttatctcccctgaaagtttttaattgagactaaaactgcccttttgagtctgggtggatctcttggatagaggagacataaaacctcaaaatctagcttccatctggaggatcaacaaatagagatggcaaaataatctttttccaactaaaaatatggaaagaggcagagatgaaaaatagagtgactttcaagccttttgatggcttttattccctggttttatctccttgctgaggcctgat

SEQ ID NO: 29854 - DNA, 1535 bp, Bovine  19866880790793
  misc_feature (1)..(1): n is a, c, g, or t
nacagtacttctggctaggtaggaaaattatgtgagatgattgacatttgcaaaatattaagcatgaggctaacatgcaataaatactcaacaaatgtcacacattatggattgcattatgtcccctcaaaacttctatgttgaagccataagcctgtgcctcaaaatgtgactgtatttggagaaagggtctctgatgaaagaccatgtgagtacacagagatgttagatgggcagtggtctacacgtcaaggagagaggcctcaggacaaaccaaacctgctgacaccttgatcttagaccatccacttccggaactgtgagaaataaagtttttattgtttacaccacccagcctgtggtattttgttatggcagcctgagcagactaacatatcccctattgttattattttgaaatcccgatgcaaagttgagaagcaaggtgcccttggttttcactactgataaaggctcccaggccaattatgcagaggaaggcagaatccacattccttccagccctgtcacgtgggctgactggctgcagagaccaccactgtatgactcaggccatctctggtttccttgcagggtgcagatctctagagaccagctgacaactgctatgagtcaggggactcaggggagtccctgagattccaagacatgctccattacccagcccccggttccttgacagatgctgagaatgtgtcacccccaaatagtgaggttctcccttggtttctcagtcatctcgattgccctcccatcaccttctagaaggtcagaaagtcagattccaccaaaggctgccacagatgtggttttaaaatagtcccttcagaagcccacaattaaagcctaattacacatctttgccaattagtgaaggagttgccgtatccgatgatagcagaatcccccaaaatccacaattgctcttgcctgctcccccaacaaaccactgtagcctttatttgtaatcctggaaaagtaaccaaacctctgatcttgatgaattatctacaacattgtgctaacaacacctctcgttagaagggtgctaagaagtcattaattttttaaaaagtcattaatgcaattgatattttctgactgacctactgtacattcattctttcattcagcaaatatttactgaatatctgccacatgtcaattgaataatatctagaaagttgcagtttaccttctcaaagagagatcaggaacaagtagacaaaatgacttcagacagtgatacactatacaggaaacaaatgcagtaatgagatggaaattaaacaagaggtaggttagagatgggatgacacagaaggcttctaagaggtctggttgataagttggccatgagagggcctagagaaagaatatgctcccagaacaatgcaaaggaaaccacaggtgaagcagctctgaaaagagagaagcattttatgaacagaaaaacagacagaagagcagtaggaggagggagagaatgtccaggagagagggacaggggccag

SEQ ID NO: 29855 - DNA, 1952 bp, Bovine  19866880861092
  misc_feature (1)..(1): n is a, c, g, or t
nattgtaatctattttctaatctaattttttgtaatctaattttcacaaagattgaaaatgacttcaagagaccactgtacacccactagtatggctataattgaacagcagatagggaggcagagaagttggaattcttgtgaattgcaggtgttaatatataatggttcaactgttcaaaacagtttggcattttcttaaaaagttaaatataaacttaccatatgacctagcaactgcattcgtagaaataaaaccatacgtctgcacaaagacatgtatacaagtgttcatagcagcagtttttacaagagccagaaagtagaagcaatctaaatgtccacttataggtgaaggataaataatgttacacaatggcgtatccactcaacggaatgttttcaacaataaaaaggaatgaaatactgatacatgatatctgatgaacttcaaaacatgcgaaatgaaagaagccagctgcaaaagaccatgcattgtatatattgtgtgccatttatgtgacgtgtccagaaaagcaaacctatagacacagaagcccctagggggcttccctggtgactcgtggaaaagaatctgcctgcagtgcaggacacctgggtttgattcctgggtcaggaagatcccctgaaggagggcatggcaacccatttcagcattcttgcctgggaaatcccagggacagaggagcctggtgggtatagtccataggatcacagtcagacatgactgaggaactaacaattccattttctttcacagagatagaagtgcttctttaggttgaaacaagaatagactgtaaatgggcatgaggggatgtttttggagtgatgtatattcaaaaacttgatttgtgatgttggttacatgactataaatttaccaaaattacttgattacatactcataatgggtgaatcttatggtatataaattctacctccagaaagctaaaaagagaagtatccagggaggacaaaactaatgtggggggtgtgggtctctcatccaaccagggtgtttgtgttgcttctggtgttggtctccatcctctggatccctgtggtccaggccagccagggcggccagctcttcatctacatccagtccatcagctcctacctacagccacctgtggctgtggtcttcatcatgggatgtttctggaagcgggccaatgaaaaggtagctctggatcagcccttcagtccattggatgggagaggagggacttggagaggggacacgcggatgtcaggtgtcattgtgtgtgtgggaggggcgggtaatgagatctggggagaaagatccagggaggatgtgacctggctttttaaaaacaagcaatgaagcttctactttgattcattttgtctttcaaaagggaagctgaattaacagggaattacatgtagtggatcaattgtatgtaaaagataagtagataagtagctcccaccctttttgaatcaccgacccatgcagtgactgtcattataaagaccagctctggaaagggcttgctgagctttccggaggcacgtgtctaagatagctttgctttgctctgctttgcagggtgccttcttcggtctcgtcttaggcctcctcctaggcttggttaggctgatcctggacttcatttacgtgcagcctcgctgtgaccagctggatgagcgcccagccgtggtaaaggatgtccactacctctacttctctatgatcctgtcctcggtcaccctgatcactgtgtgtgccgtgagctggttcacagagccgccctccaaggaaatggtactttggggtttgacctatagcctatgacctatagccattgagacccttcactgctagcaacagaaaaccaggactgattttcaaaaagctgaaaagtccaggggttcggtctttggaggaacttgatttcaga

SEQ ID NO: 29856 - DNA, 1197 bp, Bovine  19866880868740
  misc_feature (1)..(1): n is a, c, g, or t
ncctgatgcttaggcagcaggtttaggagatattttcgttccagaaattctccttgagaaatagtgagccaagtcctcagctttctccttgttgggtgtgaaaaccgggtgtttggatgtgggcaggaaggagtctcaggtaccccctgcctcttccaactggatggtgctggcgtggtacccactgtgggggtcatgatccaatgcctggggtctctgtgcttgtggctgaaggcatgggtgtgaaattctcccagccatgcagatgggtgccatgacaattttgtggtattgcatcacagacctggcctcatcactgctcagaaatcccattacacgcctattgccattgatttcaaaccccattactcacttggagccctctgtactctatcccatgcccaattctcccctcctctccagaaggatgaatttttaaaataacagctctattgagatataattcatatactataaaattcacccctttaaagtatacaattcaatgactttttaaaaatatttacttattttttatttgcctgcactggatcttagttgtagcatgtgggatctagttctctgaccagcggtccaaccctggccccctgcattgggagtgtgtagtctcagccattggaccatcagggaagttcccaatgatttttcatgtattcacaaagttgcataatcatcaccactatctaattttggaatgtttttataactccaaaaagaagtcccagggacttccctggtggtccagtggctaagacttcatgcttctaatgtaggagtcccaggttcgatccctggtcctggaattagatgtcacatgctacagttaaagatcccatgtgccacaactgagacccagcacagccaaataaagttcagtgcagttcagttcaatcactcagtcatgtacaactctttgcgaccccatggactgcagcaccccaggcttccctgtctatcaccaactcctagagattactcaaactcatgtccatcgagtcagtgatgccatccaaccatctcatcttctgtaattccccttttcctctcaacttcaatctttcccagcatcagggtcttttctagcgagtcagttcttcacatcaggtagccaaagtattggagtttcagcttcagcatcagtccttccaggaatattcaggaatatttcctttagga

SEQ ID NO: 29857 - DNA, 666 bp, Bovine  19866880871824
  misc_feature (1)..(1): n is a, c, g, or t
ntgtgaaggcttgcaaaacactaacctggaaaatgagcgcctacgctccttttgaatctttttgtattccatcaattccttagcaaaatcatttgtaaactcatctagcttggactttttcttttccctagtaaaataaagttaaagagtgaaagttaacaaaaaccatttaagaaaactaacaagacaaatgtaattagattatgaatgaaatgaatgaaattgccattagttttccactttaaaactataaataactaggaatccctgaggaagttgcttgtatgacttggtttaagttttaggtgatttttcttacactaactggaaacactggaaaatgcttccaaagatacctgtttaatgttacatcagaaaatgaacgtgtagagtaatttcaaattagaacacttactcttcttttagtcgtcgttgctctctatagaattcttccctggacaaaggtggtgcttgtgttgttgggatggtattagaatgagcagtctgtactccagatgacacccaaggtgcagataaattggttggagctggaggaaaccctggagggggaacactatacccagcaggtggtggctggccaggaggaaactgaggagagaactgtggtggaggaacacctgggagaggaagtgtgtggggaggagg

SEQ ID NO: 29858 - DNA, 2127 bp, Bovine  19866880935231
  misc_feature (1)..(1): n is a, c, g, or t
ntattgatcagtaaaatttatctgtagtctgctttttgtgtgctatctgtgtttagatatcaaagttgtgatagcttgataaaatgatttgctatgctctgaaatagattcaataacatggagattttcatgtaaaaccctctgggcctggggcctttttgaaagtagttctttgacaaaatctttcatgtgttacttgcttgtatcaggcctttttttggagtcatttctgtttcctagaaaatcattcacttcatagaaacatgcaaatgttttggtatagagttgaacactgtaattgcttaaagcttgtgtttttccaagtctatcttttctcctctctagtttatcattttgtctccaactgcgcgtacagttggttctgttttttccaacactgtgccattgagttgtctttcagccttcaatttttcagctttgaggtttcatctctttctgggtttttatgtattttttaagaagctgggaaaaactgtttgaaggcagctagccaaatgcattttgagcaacatgttttttctcttgggactttttaacccagatttaaagtttcatcttgttcaggttggcaggttttaatgggaagaagtccttttggggatcccaactcatccagcaaaggcactagagttcccagctaagtgtcatctgccaatgtgatttactagcttgccactctgattctcacagagtcattgataaaaccactgaaaagggaaagttcaagaatgtagctcagtggtaaagaattagttaagcataatcattatcagaagattcatctgaatataaactcacttcaagttcagtgagttcactgaaaagccagagcccctaacgctggctgagttaagtgttattcacttatattatacactcattgagtatttcctctgggtaagaaaggcaccttgctggtcttagacacacaaagctgaaaagatgcagcccctttcttcggacacttaggttgtgaagaaaatcctttcttaaattatgtgatcacacaagcttgcctcacaagcaagcttttcttatgtaggcaaacgttaagtttcttttttttcttatgtaggcaaacattaagtttccccttcaaaaactacagaagtatcatatttcctgtaatcagtgaaactatgaaaacatagaaaaggtagtaataatataccctgctcaattccaactctatttccacattaccctactccaaagcaatccatgttaacagctagatatgtttcctcaacatcttcttcaccctcaaaacacacacatacatgcacaagtggggtggggggggatttttttttatttttaaaattgaatgagatattagctgctacttgcttttctccttgaatacatcatgggtttctttccagggcaatagacacatatctaactcaatccttttaatagctatatcatattccatagaatggaatcacttcagtgtattcaaccatttccccatgggtgagcattcaccttgcttccagtttcgtcttgtttctagtcattcttacaaatatgtcactacatactcgtgcttttatttttataggctagattaccaaaagtgagattgccagatacaggcatgggtttatcatcctaaaaggtattgacagacttgaaaatcttgaaagattttagcaagtaggggatggttaccaggcaaatactataattattaaactaaaatgctgcctgcccacacaaattcaagacatttgtttgaaaggaagctttctagaatgggtctgttggatgcacaaaatccagggggcactgctctgagaacagtaattgtttgtttgttgttagtcactcagtcgtgtccagctctttgtggccccatggactgtagcctgccaggctcctctgtccatgggattctccaggcaagaatactggagtgagttgccaattccttctccaggggatcttcctgacccaggggtcgaaccatggtctcctgcattgcagacaggttctttaccatctgagccaccaggaaagtcattgagaacagtaaaaacaacagcaaagccatttactgagcccttcccatgtaatcagccagcacctttaagtgtgcat

SEQ ID NO: 29859 - DNA, 1008 bp, Bovine  19866880942313
  misc_feature (1)..(1): n is a, c, g, or t
naattacatagacagaagatcctggtgggctaaagtccatgaagtcacagagtcagccatgactgagtgactaacacacacacatacaaatctatcagtagaaagaatacaggatttgaagacagatctgggtttgaatcccagctcctgcatttactagctgtatgacagtgagtgtgtgattgtacttctcagcctccattgcctcatctgtaggattggaatggtgctacttacctcacatgtcagacacctccacatagttcccagcagataaaaggactcttttccttttctgtaacagttaagttcaaggcttccctggtggctcattggtgaagaacccacctgccaacgcagggttctgatgccacgtccggggacatcccacatgcctaggaccaaccaagcccatacaccacagctgttgagcctgtgttctctagagcccaggaactgcaactgctgagcccagggttcgtaactgctgaagtacatgcgccctagagtccatgctgtgcaacaggagaagccaccccagtgagaagcctgcacactgccacaaagaccagcccctgctccccacaagcagagaagagcccgagcagcaatccagcacagccaataaataaatacttaactttttttaagtacatgggatctttaaaaaaaaaaaaaacacacagttcaaagtaacgttataaaatgctaattaaaatgtactacatgaagtttatattgaggcttcattgtttataatgttaatcagaaaaaatattcaggtacatataatgcttgctcatatctctctatctggaacgagcaagaatcagggagtaaggaaaagtttctggaatagttaaaaaataggtgtcttaaagtctatgcaccaaaagatcatgtattatactcaagcctattttatctttccacacagttccaacaaacttggatacttggtttctccaccacagcaaattagaagaggagagagaagctgctacaggt

SEQ ID NO: 29860 - DNA, 1084 bp, Bovine  19866880955570
  misc_feature (1)..(1): n is a, c, g, or t
ngcttatggttggagcataggtttgggagccccctgttcagggttaagatctgcttctgctacttactggctgtgtgacctggaccaagttacctaacccctctgggtctcagttttctcatttcttaaacaaaaggggacagatgataacagcttcaacctcatatgactgtgataggattaagcaatccgaaagatgccgttgaacaaggggcacagtagggtcaggctaagtgttagctgttcttatcacggagagtacagaaggtgagaacccgaagacgctatggtggtggcggaaagggttaaaggggttgtacttcgtcaagggaggcagactggaactccagggtgagccgtggggagggagacttgggtaaatgaggggtgctcactgatgaggtaaggacctgggggcgacagacgagcccggctcccgggcacaggtggagcggataatcggggcgcggaggtggaaagcattcaggctgagcaaggtggcagctaagtttagcgctggaagggagggatttgaatatgcgtgaactgccctcccgcggtgccaaacggctgaggttttcaatcgctcctcacagggagtcatgcatgaatggggaaacagagtcagcaggaatgcccgtctagggggctgtgtgcccatttctcccgggttcgggccactggcttcccaccccgcgtcggggaccagagagggggctccttgcttttgtccaatgaaactaggcgtttggggcagtggatctccagggagtggattcctttttgacatcaaggaggcctggtttggggtggtagcttgtacacaatcagaagtgggaaagggtcctggctcacttcctggtacactccctgaaactcacatccccgggtcctggcctgcctccccttccctccgctgcccaaccctccccagcctctctcctctccccttcctctctacccctcttcccctgttccctctatctctctcccacaaatctatattcagtttctgtcttccaaaaagaaaaactgagtaggaggacaaattgtttaaaagcaatgcatctattttaacaaaacg

SEQ ID NO: 29861 - DNA, 2787 bp, Bovine  19866880970500
  misc_feature (1)..(1): n is a, c, g, or t
nccctgactggctagaatctaaggttctctaacccctcagccctgggcttcccaccatttttagccacaatcccacatctttttttgtggttgcattgtctctgctaataaataatagccagcattattaaatgtttcccacgtacttggtactgctctaatgcactttcaagacataactcacttagtgttatgtcatgagatagatattgttcccattttacagatgaggaaaccaaggcacagaagaatcaagtaacttgaataaggtcccagaatttgtaggtcatggaatcagtactgcaaacccaagtggtctgacttcacaacccgaatccttagccagatgctgtgctcccagccactctgagggcagtgggacagccttggtgggctgagtggacagagccccagaagatgaggtctgcaggaagctggaagggaggcaaggaaagggcccccctgagagtgggtggccaccccattgtgttgatggctcaggcccacaggcttcatcaaatccctctgagatgcaaggctcccactcttgtcaaattgaacgggctttgcagatttcagtttcaatcctgccaacttgaaagttttagcatttcagctgtttcagaattataaaagcctacaaatgctaaggtgctttttttagagttttaaaaaaatgtgtcttttccccaccatcacataacaatctgaaggtttttttttttttttcagattcttgccaaatgtgtatttttaaagattgcatttggccaaagaccagaagtggagactctgggaggaacgttgaggaagttctaagacacgttcagaggggaagctctttccttgcagcataacccaaggtctgctggggtgatgctgtttatttcagctttctcactcccttgagtgacagagtgcatccctgggacactgacacttcagtgagttgggtgacccagaggacatttggatagcaaccatggccagggaagaccaccattgctgtgtgaaaagcttccggttctgcaactgtcaccaggagccagatggccctcagtggacagttaccacgcccactggaccaggtgccagctcagtcttcactaattaagtgtcgtgtgcatgtatgtgtgtgtgtgtgtttatgtgtcaaagactctcccccggtgtgaatcagctcaatcatcgttttgcagtgtttcagcttcagattgcaaacatctaccaacaaataggagccttgctttctaacgagctggagatgtgtggaaaatagaatcactcatggtagtagggagccacagatgttccagggaggcagcaggctgtgccaagcacagacggtacgtgtgcccacgagacaggatgcagaatcttgccatgcaagtgatgcccacacacctcaaaagatgaagggatgaagatgggtgggatgcaatctggttccttcttccaaaggcctggccttctaaacagctgcatgacatgacatttagatatggtccaagaagctgaatgtttaaatttgaataactgccaccaaggtcttcactaccaaaggaagggcaaggtaagcttctaaggaatctgaaagacctcagttcaaatcccagctcctacacttactgagtgctcttgaaaagtcatttaacctttcagggcctcagttttctcatctgtaaaaggggttaataatagggttcatgtgttgggtttttgttaggactgaatgagagtgcaaacaaagttcttgatgtagtactgactcatagccaatgcttgataaacagtagttatcacaaccatcactatcatttctacttctgcagttctaggaagatgatcttgactctgctgagtgtcatttttctcctctgtatgatggaaataatgatgcctaggtcacagagctgagtcaatgtttattaagttccaagacagtactcaatacataggctctcaaagctggattcatttcccttctcccctgactagccttgagtcttactaaaaaacatcatcaaatctaattgctgagaatcaatattggcccagcatgatgcaggttccctcaggacctgtaaactgggaggcatgggcattgactggtccccaaggagatgatgctctaataggtaagacaagacactgagtgggatggttatgctgccagggagaccaggaggcttggagagtctcatgaaacttgctcaaggatggatagcaggttggtttccaacccaggtcattccgactccagagtctatacttttgaccatgattgtgtgttggctatcacgagagaatggagacaggtaaaaagttcccagtttctcttagttgcttcagttctctgttttgagaaagaaaaagaaagagagtagggagaggaaaagaggagagagggaagaggaggagaaagctggctttggagttgtgtgcagggcaaacaaacatgtccacctagcatcctgggagctcacttctcactcagctccccttgaatgaggaagtcctacgtggaggtcaatcaagctcgaggctgtgttcctccttcccagcaggaggcacagcttagcctgttcaaagtgaacatcaaaggtcacatcattttggggctcaagtaaaacagtgtcagcaaaggcatccttggaagaaatcccatatggtggttgagagcacaggtcctggagccacacagaattggagccagatctcagctacaccacctactagatgggtgaccttgagtaagtgacttcaacttgctaggcctgtgtctgt

SEQ ID NO: 29862 - DNA, 3251 bp, Bovine  19866880972249
  misc_feature (1)..(1): n is a, c, g, or t
ntggtcccgcgattaagactccacgctcccaatgcagggggcctggtggggaaactagataccacatgccataactcacacccagggcagccaaataaaaaataaaatcatggttggactgcatgtgcagagttcaccaggggggtcatggaaagggcagggcatttaaagagataatcactgttcctctaagtcagctgaaagtgggatgtgacatgaggcccatgtaactgccaggaggacacctgacacttttcataaggtaccccggacagagaaagtcagcaacatgagcaactctaagcatgtaccctctctaaggcgagttgcagtaagtgttaatctatttaatgatctggagtgattttccaaagctggtcagtgaatcaatcttgcctgtaaactgttctcttactgtagagatccatctgtttctctcaagaagctgtgcagttaagggctctagctgtggcatgagcttgttttgagtgcaagtcctagagatcctgcttactctgacatcttacattagttacttaaacttcctctgcctccttgaagggacaggaacagcttctcctccaaacagtttgcaaagatgtaacagatgatgcacatggagtccatgcaaactggtggagcctcattcatatgagggtgtgacaccttatttcctctgtattctgtagcctaagaatcactatcataatcatgcaatctgatgctcctctaactgtattttcagctttctaagctttgcccttccacatagaaagcaaagttctcaagttcagttcagtcgctcagttgtgtccgactctttgtgaccccatggactggggctagggccatctctcttcttccttggaattctatggacctttgattactgaatgaatacacaaaggtcaccatcaagagggtagagaagcaggctgtgtccattcctacccaccccagctctgtatgcctgggttgtattcctggatcctttcctgcactcaagattcttagatggctttagctgcctaaggcccagacacctatctctccggtttcctctctttggagacactgaacaccctatttgtactgttagcagcaggctatgtcctgctccaacccaattgatctccttggcctcaagatgctgtctcccacctgacaagagcaccaactattccttccctgtagatacaactccttcttaaagtttcctactgaactagtagtcaattactaggtgattggactaggaataaagcaactgacctatgctgaaccaatcagattctctttcctgagtttgaattggaatgtgggaatttggcggataggcaaacaggggctatggaagccatgttaccatgatcagggaaaaacaaagaaagcgcggagaaagaaacagatttagtctagaaagccttgaagttctagatcttcatgaggctcaggttctgcctttcggtcgtttctttccaatattttcttttttaacagctaatttgaaagaagggtattctatttcctgcaactcaaccatagagactactgccaagagcttcctacggcaacacccttacatttaaccatatccttggataccggtgccaacccaaacttgaccccaaattacaaggaccccttagacactctccgtgctcaatggacatgtcaccgggggccagctctacaagcggaatcattctcatccccttccctgtccctttttgcattctgggttgacgtccctcccagcatgccttgcaactgagttcttgctgggccacgacagcaaatttggggaggaagtaacttctgtccttcaatgactcatgaaatctaattctatttaaaaaaaaaaaaaagaagtgcatatgttcaattgaaaagaaaacatttaaaatagatgttttgctaaggagactcaactgcctgtgcccactggcagttgggaaattgcatgaatgtgccgggctgacaactgtccctgggaaacactgcaaaaaggctggaggaaacgcaatccttttgtgcctaggcagccaggtgcccctacagcacagctcaaaggggtagcctcatttattatttgttctgcactttgtatatcatctcttttaatcttcacttcttatgtcactttaaagatgatgaaaccaatattcagatctgttaagtgaattcctgggaggtcacacagccaggaatctcagacctagatttatttgactgagaagctcctacttatccctttgtacttctagaaaaattggcctaaaccccattctcctaagaccagttcctctaatgagcaattcactgaaaattcaacccccttctgatggcttttgcatccgtgtattaatgctgaagctgaagctccaacactgtggccacctgatccaaagagccaactcactggaaaagaccctggtactgggaaagactgaaggcaggaggagaaggggaagacagaggatgagatggtgggatggcatcgctaactcaatggacaagagtttgagcaagctccagaagatggtgaaggatagggaagcctggcacgctatagtccatgggattgcaaagattcggacatgacttagcgagtgaacaacaatttcagtattaacttttgccaccttgtggtacattcaacacttttaaggtattttatcacagactctcctgaaataatataaattcaaaatgaagacaattacccacaggcacctccctaaatcaaataaatgttttgatttgtctatatctctgattcttttccatgtgcaaatccaattttaacacatttagaacaatctcttaaatagaatttgatatcttacatcttctgttaaattgagccatgcatatttttcaaggatttaaaaaatccagttgtctaagaatacttctgatgtaactttgcttttctaaacaagttttttgaaattaaatttgcatcattttaaggatgacaaaaactgtttcatacattggtggggagtctttttcccttttatctattctgaccagcatcaagattctttttcttttattaagaagcttttatcttccaaattctaagtctgtagcaagaaaaacatatcaagtctgcagcatgctatactagatctgtcattttttttttaaggtagctgattcataaaggaattctgggtcccaagatacaaaatgacactccattcaggctacacggccggtcgctgctcctcaaacacgccaag

SEQ ID NO: 29863 - DNA, 2693 bp, Bovine  19866881000622
  misc_feature (1)..(1): n is a, c, g, or t
nctttgtttgacctagcttttattatagattcaggcctagctatatagttaaatgtttacttgtagaaaacttgggaagatgaacatttatctttttattcagtggaggtacaaatagtttctgttcattagaggagataactccaaatgttgtggacaatttgcccattccctaggacattagtcagttttatatataacttaacaatattatttcagtttttttcatctaaaaaagaaaacataacatctttctttgagccagctttgtcattctgctggttcccttcactgatgaattaaataaaatttgacataagctcactgtgtattttagtagaattatgtttttaacaattgaacattctaccctaacatgtgaaagtattcccaataaaaccaatgtttctgagattgaaaagaagcctacaaaaactccaagattgatttttttccccctcattctatgaccctgccgagagcccatttttcaatatagaagcaaatgggcctttaataatttatggaagatcccaaagaatattaaataatagcaggggctttggggtcaggtagacctggtttcttacctgaatcctgccattttctggctatacgacttcggagattgccaaccctctgagcatgagtttctttacctgtacaacaaggaaacaaaagtagcaagtactttcacctgtttctttcttagttcttaatttatgtcttatggttccttcatgcctctaaataatatgttgactagtagtccttgattcatgcgttttagacaagatgcattttctaagacaaatgattttgctttcttaaactactacccttccttcaatacttttagtttcccaataagttacctgtggcttccaagaagaatcattcataaagcctgagggcagctggcatctcattcctggactggatactagctgaggcagcacgactgctcatctgctcatgtgcacattttagcaaggaagtcagaagacaagagcagggctgagagagagaatggcagtggggcggcctgttcggaagggagaggtcttatgagttgagtggatctatggtggatacctgagagcttatgccattttgttcacatcccacccaggagaatagccagttaggcaagtagaccctagacagggctacatgatattcaggaagattgccctgcagtctgttgccctgcacagggctgcctggccaaggggtcaagcagagattaagagtcagtccatgcgccattccccaaaccacacctgttgatccagaactgagtctatccaaagggaggcagacctttaaaagcataagggttctgtatggggcaactgcaggtccagcagcatagggctatgcattgccagtgatgggagccacggtgggatggcaaagactgaccagactcaggtatctcacatcagggaaggaagttgcagtggaaggtccacagggcctccagtaactaatgcacatgcttctaatgggaagtcaatgtgttgactcctgcatgcagagaatctgaccatcagtgttagatgcaggaacagtagcaatgaacagtaatgctttgcaaatccacccgctaaataaagtgacattttggccttttttccttcctgttcttggccacagcatactgaatttactcccaaatgaaagagggaagagtaaggaaatagcttgcaaccaggtatgcagttgcaagttttaacaaccaacagtggctggaaagttatgaaatctgcccaaaatatcactaagaaaatgagggattggacataacacagttgaaagccaaaataaaacagttgcctcattatatgccacttagttgagacttatcaataaataggaaatatgtcatcacgctttgtctctaaaattctaaaagttgaaaattcagtgatgtactatgtaggtactatgatacataattatatttcaggagttggcaaattacagccaatgggtcggatttggcccatggtttatttttgtgtaatccaaaagctaagactattttgtacattttcaaatggcagaaaaaattaaacaatatccccaaatatttcacaatacataaaaatgataagaaattcaaatttcagcattatataactcttagtgttgtatatttttaaattatggaaatttgttttctttcctgttatgttaatacctatatagtatcctcaattttgctgcttggcctgcagagcctaaaatatttactgtctggccccttaagcaaaagtagtttgccaatccctgctacacctcactgcagagatatgtaggaatctacaataacaatttatttcgagaagtaccctttgtattcccaagagtgttgaatttctttcttttttcctggtactacgttgcctttatcatagactgttcatctgatcaggtattcaggtattctgtcctctcttctttcctgaagaactctcatttagttctttgcccaggcagtccttgtcctctttctgagccatgaaaagtttgaaagaaagtcaacgagatcttcccctctctaatggtatctaaggaagacagcccctgccaaggtatgtaaggaaaaacatctgttggagccggcaagagaagaaaactttggtaacctgtgttctggtggctatgaagaaattaaaaaaaaaaat

SEQ ID NO: 29864 - DNA, 2294 bp, Bovine  19866881064430
  misc_feature (1)..(1): n is a, c, g, or t
ngagatccaaccagtccatcctaaaggaaatcaatcctgaatattcattggaaggactgatgctgaagctgaagctccaatactttggctacctgatgcgaagaactgactcactggaaaagactctgatgctggaagggattgagggcaggaggagaaggggacaacagaggatgagatggttggatggcatcaccaactcaaaggacatgagtttgagcaagctccggaagttggtaatggacagggaggcctgatgtgctgcagtccatggggttgcaaagagttgcacacgactgagtgactgaactgattgactgtcttgaaccattgaggggggaaaaaagaaatgctcaaactgtttaccctggcccactcactctatattattgagccccagtccaactcgctgacctccttggctaggattttccttcttgttcatgagattcctgccactctgtccacctcaacaagtcatgtttattctcctttcagagcttctgcacttgatgatccttcttctgggaacaatttccttggttcttcttcaggctgactccttctccacctttgatttttttcagctcaagccacctcctcggaatgccctccttgattgtgttccttaaagacttccttctgccactgcccctactgtgtatcctatcgagttacccaattttcttttcttttcttcacagtacttatcactacttgcttcacggtatttatcactaaatttttgtttgtttgcttatgtgttcattggctgtctccctcacctagaatgcaagttccttgggggcagggaatccgtgttgctcaccactgcatcctcagtgcctacagaagacctggtctttgtagatgtttgttggatgatctcgcatggcaaaatggccctgcgtggtctggcatctacctaactgtagtgcacagtgaacatctcatttttatctccctttttctagtaacaacaccctcaaattcctcatagaatcagccccttacccagtctcagttcacacaaattgatttggtcttcctccctgtgtgtccagaggcagaatgatagcacagacctgaaaatcagtgaatctcatttcctggatactacaattgattcaggtagatctgaagcaaatgggtcaatgagaaactacccccaagacatttgttctaactgttgattgagacatatcctatttcttctagggttgctcagctggtagaaggcaagccaggagttccttgtacgtgagaagagagccaggctgaggatggagccggtggagagggagacagggctgagatgaaaaagcagactggatgccatttgtgtgaagtctgggattcagttgctcacgagcttatctacttttgtgcttttaagtcacaggcactgattgattgctcttgctttttgtacaccctttcagttggatttctgtcaactctaatcagaagctttgtggggggtgggggaggacaagattgggagtttgggattagcagatgcaaactagtatatataggatagataaacagcaaggttctattggacctatatgcaataccccatgattaaaccataatggaaaataatatgaaaaataatacatatatgaaaaataatatatatatatataactgaatcacctcactgtacattggaaattaacacaacattgtaaatcaactatacttcaataaaacattttaaaatagaaatttcatgactaataggctacctctctaattctacttctcttcatctgtataaattaggaattaccactgatccttgaacaacaggatttgaatgctctgttctacttgtatactattttcaatagtaaatatatactatactatatacagtttatatatatggtactatataaaccacagttgggtgaatctgtggatgcagaggaactgcatccatgtgtagcgggcagactataggttttttgtggatgttcagctgaacagagtgctggcaccctctaacccctcgattgttccagaatcaactgtatgctcatctgctaaaattgaaaaggggtgaaataagaagtctgtttttgtcatgtaataataactttggagatgatcgaagccaccttagatgatggctccataatgctataacagacccaagcttctccaattttattttattttcagacatcttaaacatgtacttgtcaccttccagtaacaagtcatctggtcaacctctgaaactgagttccagttctatgcaggaagaaatataaggtaaggac

SEQ ID NO: 29865 - DNA, 2218 bp, Bovine  19866881131407
  misc_feature (1)..(1): n is a, c, g, or t
ntcaatgtgcaaagaaatgtggtagatccattcaatggaagatgatctggctataaaaaggaacgaattactgataccaccccatgacatgaacaagtcttgaacacattaccataattgaaagatgtcatatgagaaagactccatattattaatatatgattccatttataggaaatgtccagaataggcaaatccatagagtcacaaagtagattagcagttgctaagggttgggatgcagaaagttggtgaactgggggatgatggatattggggtttcttcgtggggtagtgaaaatgttctaaaattgattatggtaatggttgactgaactgaactgaagggttgcataagtctgtgaatatactaaaaactattgtattgtatacattgaatgtatgaattgtagggtatgtgaattatatcacaagaaagctcttaccagaaacatgtcatttcatatggttcaacccaatattgtccaatgtcttttttacaaagtttctttaaaaaatatttatttattcatctgcatcgggtcttagatgtggcacgtgggaccttccttgctgtgtgcaggttctttagttgtggcataagaactcttagttgcggcatgtgggatctagtgccctgaccaggcatcgaacccaggtcccctgcagtgggagcacagagtcttagccaccagaccaccagggatgtcccccaatatcttaaatagcatcagcttatatggtatggcttgaagaactgaatataggaagagaagagggagtataagattacctgcatgagaaggtagaaaaggagacaaccagtgggagcagcaggcggctggtttgctttttggggagaggacttagacttcctgcataggaagaggagaaagaagcagcggagtggaagatgttgaagaagcaggaacaaggttgacggatgacctccagagtcatggcggaagcaatcacctgggaaggagtccagcctctctcccgtaagacaggaaggaagagggagaggatgaattcagatactaattagttgatggtgcagggaattttattttcttcttactggcctcaattttttctggaaagaaggcaaaatcgtttgtaaaaataaaagaagagagagcaaggtcgtgggtttgaagagagggaaatgtcagggcttggtaaggggaatgaatgaggaaacacgggggcttgggagggcttgagggcttgaagatccggctgccagcagaggaatggactctgaagtgatgctgagacatgacccctgcagatccctggagtctcgttcgtttgggagccatcacctcctgagtcattcctgcttcaggccagacaaccccaattctttcaatattactcatacattttggctttgagcctcttactctctggacagcctcctctgaactggctgcctttggcaacctttctcccagaacagaatgttctttgttggtgagcactgatccaagtccacctccctgattctgagccctatgctttcattaattcaacctaagatgaccagattccacttggcagcctcatggcattgggtcagtgccaaataaatacaaggagcagacagaaagctacctgataatatatcagcctcccgccttattaggcaggggagaaagtggcgcgggtggagaccagcagtttgtcaaagaagttagaaagatgtttaacaaggtgagtggtgaacgtctaaaggtgtaggatcagggatcagggtgaaaacacatatgtgggccattcccccagggtgtgtaaggccagccagactggcacgtcacccgtcaccttgaacctagttactgaacacagcccgtcaagcacattaccctggagatccacagcccattggggttcaggagtgtcacaagataaaggggaaggtgcaaaggaaccctaggaaatatctttccacctcagctgctgcagttacacaggtgttactgctggtctaagtctctaagtaccagaaggcatacagtccctgattctagaaggggtaggataaacatggtagaaggaacactgcctttggtgtcagataagaccctgatgctgggaaagattgaagcaggaggagagggggacgacagaggataagacagttggatgacatcaccgactcaacggacatgagtttgagcaaactctgggagacagtgaaggacagggaggc

SEQ ID NO: 29866 - DNA, 923 bp, Bovine  19866881160092
  misc_feature (1)..(1): n is a, c, g, or t
ntggtgatctcccgtatctagacattacattacacatttgtcttttgaatgccaggatactgacaaaaagtgacaactttaatggccgacagtaaattaagagagttgacctcatgtgggcaaccaaacttatccactgtgccaattttatttaactggctctggctacctggcactctgtcttcagggtttgcagcttagcagaggaaaaggagaatggcaataagacttccgtccttcattcagagactggaggagtttcccaacagggggtctacacagtgggaatttggagtcccagggtattacaaaagatatttaatgcttacagatttaatgttaaaaatccaaatgtttggttatattcaggaaacatgaagatctagaacagtgggggtgatttcacccgaggggacctctggtggtatcttaaggagttttttgactgtcacacctgagtgagtatttctggccaaggctgctacacatcccgtagtacacagggcagacttcaaaacaaatgatctggtcaaaatgtcaacagtgggtctactggttaagagtccgagcttccagtgcagggggcataggtctgatccctggtcaggggactaggatcccacgtgcctcgtggcacagccaaaaaagaggtcaacagtgcccaggatgagaaactcttatctaggagtgctgcctgtatatgtgggttctgcctctccaaagagactttcacgttttttggaagtgaagaaccatgcctcttgcaaggcaacacaatatagcccaaagcgtaacatctcctgcagtttaccagtggtgtggcctcctggaagttacttaacctctttgtgcatcaaagtcttcacctgtaaaacagagaccgagatcctgaaagcacctacctcagagagttccaggatcag

SEQ ID NO: 29867 - DNA, 1624 bp, Bovine  19866881170244
  misc_feature (1)..(1): n is a, c, g, or t
ntaatataaaggaagtacatacatgtttcaaaaaattacaggtgcatgaatagctaatagctgggaaacttggtcaaggctatactcaaccctgttatacagtctgaatcttgagctatgggagatggcgtcagcaccctggagagtggtacacaaatactgagtctccgggggccactgggttaacccccaacagctgcctcagtgacattcagacacttagtatcatcagcctcttggtcattactcgaggaaagtcaaacactagaagaagctgaatggttttgtctctcacctcttggctttttatttttgatcatcttcgatgcatttaaagcaaaagacttgaatggagctttttgaagagataaaagtaatacctgcttttccaaagactttccacttttccttttaatttcataagctgctgacttcttcctacttgatttattcctggcttatgctatgcttcaggaaaagcaggactcacacctggcatgttccatgatttgaacacaaggaaatgtcatcaagagaggcttaatggtttttgtttgtggggcatgaaaaatgaggagttctaaaggttaaagtcagaaggtctttcttgtcatcgagaaaaattccaaccagagctgaaaagtagggattatggctgaagccactatcctcccaccaaaactgctctcccagcatcccttgctctgaggcacgtgactgaattctctgcaacagcgtgtaggcagaagtgatgggtaccacatccacatcagggcttttaaaaaagcagcttgtgcctcctctgtactctttccccctctgctctctgagtacagacaaaaacaaggctgtagggactgatggagccatgtaggatggaaggaacctgggtcacttaatcaccagatggagagcgtgggcaaggccagaaacacccgtcttggactttgcatgaatgaacactgaacttctattgtgtctgaatcagtacagatttagggggtctgtttgctatgacaactgaatctaccctacctagcttatgtgtttggctgccacacagattaaccaggctgggcttgctgtggggtcaggaagaagagacttttttttttttttttcatttttggccatgccacatatgagatcttagttccccaaccagggattgaaaccacgggaccctgcattggaagtatggagtcttaaccactcaaccaccaggagagtcccagaagagacattctgagattttccatttactccctcccctcttggccacagttaacttagctcatcctttaggtaaaactcaagagcctctttctccaagaagcctttcctgactgcagccagagccaagcccactccctcaggttctcccagcatacagcaaacatcacagttgtactttacatctgtttagtgtgaagttttttgattaatgtttatattcccattaggtttttaagcatgcatttttcaaaattcacagaatgacatgctacttcatgcattttgttgtgtgcaaattttaccttaaaatgatcaaaaacaaatattaaattctggtgaaatgaggtgcgtgcgaagaattcagggtcaagtgtactgatgtctgcat

SEQ ID NO: 29868 - DNA, 3906 bp, Bovine  19866881181370
  misc_feature (1)..(1): n is a, c, g, or t
natgttttttttcttgtgcttgggcttattgagtttctgggatctgtgggtttttatagcatttgccaagtttgggaattgttggattgctatttcttcaggattttttctgttttttcctctcccctccttcatggattccaattacatctactgatatattggccttttgaagtagtctcccatcttactgaggattacttattttttttactctttctcagtgcttcgtttcatatagtttctattactataactttagttcattactcttttcttccacaatatctaatctgctatccatcttatccagtgtatgttgcacctcagacatggtagctccatctctagaagtttgatttggttattttttttttttttatctttgggtctccatataattttttgaacatatggaatacagttctaataactgttttcatgtccttgtcttttcattctaacacctatgtcatttctgggtcggtttcaattgcttgatttttctcctcattattttccctttcctttgcatgccaggtactctttgatcgaatgacagacgttgtgaatttttactttgttgagtgtgggttatttttctattcctttaatattcttaagctttgttatgggacagttaagctgcttggaaacactttgatcctttctggtcttgcttttaagaattttttttactgagaccagaactatgtttagtctagtgctaattattccccacaactgagcaagacttttttgtgagtacattgcctaataaattatgagctttttctagtctggcaaaactatacactattcttggccctgttggagctctgagtactgttccctataattcagtggtcctttagaggagcagtttgccccagggagacatttggtaatgtctgaggactttttttattgtcatagctagggttgctactggtatttagtggacagaggctaggaatgctgctaaacaacctaggatagcccccaacaaaaaagaatttttccatctaaaatgtcagtaatgccaaggttgagcaactctgctacagcccttccaaatcattccttccctggcctccagtggtcccctcacatgcgtgtgctggtcagtactctgctgaattctcaagaaggaccctctacagactttttttcccatgcaactccttttcttcaatactttgtcctgcaaattcttaccatctgttctaccaaatttcagctctcgctttctctctcactctctttttggccacaccttgctgcatatgggatctcagtttcccacctgggaatggaactgggcccctgcactggaagcacagagtcttaactgctgcaccactacagaagtgcctcagcactgtctctgtagcttaggaagtcagctaagctcttcctgggcacctccttcctgtgctacagcctataaactcttttaaggcagtgagcaagggtaatcaagggctcacctatttgtctccctttctcaaaattcaccatccttcacttcttcaggtccgtattttgaaagctttgtttcatgtattttgtctactttattgttgttgctattttatgtttaggccatgctattttatgttgtggcatgtaggatcttagttctcccatcaggggatgaacctaggccccttgctttgggagcatggagtcttaaccactagactgcaagagtagcccctgttgctgttttagacaggagggtaaatctagttctagttactccatgttggctggaagcagaagttgacttcttatttattatcactatcaaatattctctttctctcctgtcttgtgtcaagaaagcgacttttcttgtttctaatcttgtcaaccactaattatgcactatatttatttctgtatcttctcagtaagcaccacttttgttactcacgatacactctccattccctatatttttcagtttggtttctgttttaatttctgtctcaaacatgagattcacttgtgttcttctatttgaaactgtaagctcacattttagttgtacttgaatctagcattattttaaaaatcaccataacatgattttatttttgtacttaattattccaattctttgatttataaatttgtctcaggaagcaaagtttcctctgaattgaacaatatccattgatttcatcttgtgttcagtaacagtaatctagttattcagtaaaggaaacattttgaagttcttgtggtgtgcaaagttgtatttactgttggattaagataactggtaataaatcataaatactagcttattaggggaaatatgagtcatgaataataaaaggcaaaatcttcttggtattgtgtacaaataatttaatttgtatcattaacttcaaatgtgctggagtaaatgagcatttctctaaaatccgctcatccctttggggagcttctccaaacctattattaagtgaggaggcagtctatgcagaagatattcagggaaatattcaggaatttgtaatccttacagataataaataacaatgggagcaagagtgagtttgaccaaaaggttgcttaatcctttgggtttggacatttgtttctatttcagttgctgtatcaacatataagcttacagaattttagatgcacagatgattttgtcagcagcctgagagattctaatcattggcagcaagggtttcaaaaatataggaagtccagttacaatcagattacttcctaaagatacaattttacaatatttctttggagttaggaacacataatgatacaatgtgataatgtcctgagttctgtggccaagtttcaaataatgttgaaataatgtatctaaaatggaagatttgatacctagagtccctaaatcaggactacctgcccattgaatgaatctttcaaatactttgcaagatactgaggaaaaacaaatagccaagtaatgatatttgcttaaggccagctgtgtttttcagagcagtgctatgcgtagtaactgagtggtttttcaaggcactcatgaaaattaaccagatcagtttgatattgtcatatacttgccagtatatagccagttcaaccaaaaaattttggtcccctttctctctaatagttttcctaccttttcaaagctcccacccactgatgaagcaaaggtcctgttcattaacctctttatgctgactatgcgcacagcgaccctcttccttgggtaggactgtgcaattgccatcaaagtgctttaacaatttagcgccacttaagcagcggcatttttttaaccttctcatcttcagctttgagtgctggagataatgcagaaaactgccttttgaagttatattgaactcactgacttccatcagaagcgtatcagtagttgcaaacgttacagtgtaaattaaatccttgaagagtctgagccatttgcaacactggaaagcgagatgctaaggattttttattgcttggaatccctaagctcaaaatgtctttgtctttggtgtgtatttgaatactctatcttgattttccatggcactctaaaattgcttcgcaaatagagaaaagtcagatatttaatgctagggatattctatagaactcaagaatacctaaaattatctagtactaatttattaatgtttaattagaattgatttataacacgggtagcatcgctacaaggatgcatctttgccactgttgataaatgttcaaattactactttgaagaacttaccaatttttgatttatctgatttgggagactgaaaaaaaaattgtatcatgaactatatagtaaagaaaatacttttacattcaaagatccaaagggacaaagaaaaagatagaaggaaacatgtaggtcta

SEQ ID NO: 29869 - DNA, 670 bp, Bovine  19866881184357
  misc_feature (1)..(1): n is a, c, g, or t
ntgaaaaaatgttagttgctcagtctgtccgattctctgtaccccatggactgtgtagcccactaggttcctctgtccatggagttcttcaggcaagatactgatgtggatagccatttccgtctccaggagatcttcccgagtcagggatctaacccaggtctcctacattgcaggtagattctttatcgtttgagccaccagggaagcccctatcacacagtagtagttaagcaggggtaatgatttgatacctttacttaagagggagggagggagggagagaggagacggcaggagaggttatggggggatctgtaggcctcgaaacatccaccaggatgaacactcgtcctcaacaaacgcagcctccctttgcatagaatggctgaggagtgtcttcagagataacagcagtatcaccacagccccctgagcttctcttctgcagctcttatctcaaaagtaattgattaattttttgtgcacagctgggtgtctggtgaggaagcagtttaattttgttttctgcaagagaaactgtagttccggaagagctgcacgttcagaggacaaattcacagaaggagaccaagacgtgaagttgtggaaagctgtttagtgcaaactggcccagctgacatgcaggagggcaagcagactcctagat

SEQ ID NO: 29870 - DNA, 724 bp, Bovine  19866881185161
  misc_feature (1)..(1): n is a, c, g, or t
nctgagtcaaggcctgctgcacagcatcataattgctcttttctgctttttcactctgtgctgagtgatggcttagctctgagcagtggggaaatggcaggggttgggttctaagagataataaggtctgaaccaaggaaaattcattctgggccacccccaaagatgattttccagttggagtccctggggctgagcataggaaatggagagtcttagcccaagactgtggactttctccaatctctcttaaagcaggcagaagaatggggtgggggaggagtgtgaaattgtaaacagcatggtcaaggtcagcttccctgagaaggtgacatttagccccaaatttgaaagaggtaaggaaccaagtcaggtgggaagaacgttcctgccaggcagaaggaacagcaggtgcaaaggccctgagaggggagatgccttgggtgtttaaggagcaaggaagtcagtgtgactggacaggatgagtgaggaggaagagagaacaggtgagagagatggaggtcggaaggaagtagtaagaacttggactttgagtgaactggaagcctttggaagagtttttaattaatttacttctttggctgtgtggggtcttagttgtggcacacaggatcttcggttacagcacatggattctctggctgtggtgcttaggctcagtagttacagtaggcaggcttagttgcttcgagacatgtggaat

SEQ ID NO: 29871 - DNA, 1313 bp, Bovine  19866881214891
  misc_feature (1)..(1): n is a, c, g, or t
nactttaaaagggtgaactttatgctatgtcaaagtgttagaaaaaaatttttttgagggagaaattgaagaagacattcagagaaggaggaactgaggacagagcaagaggtagaagggataaagctaaacagataagcttagcacagactatgagtttgggcttcaattccagagtcattacagaagcggtggaagtttctaagtgacaggctgagaattgcagcttgagcatgattaacttgcagcaatgtagagaaggcacattttacattcccttctagcttttcacagtgagattctcacttatgtgcctcacatcatctagggactcacaagtagaatattaagtgaaacatatttctctgacatccttgcacggtcaattaacagcaacaaacagagatttgctcagttgtgtctgactctttgtgaccccatagactgaggaccccaacaggctcctctgttcatgggattctccagccaagaatcctggagtgggttgccattctcttctccaggggatcttccccgacccatggatcaaacctgggtctcccgcactgcaggcatattctttactgtctgagccaccggggaagcccctgacacggtgaagtaatgcttaaaacacatttaaaatcagtgcatatttcacaccacacagcactatgttctactgttttatggggatactccaaaagagtaagagaaaagagagaccaaagtcaacaaagcacagatgtcaaaattgtaaaaaatattcagtatcactgcagcaagccgttcaatcaatgctggctgactcaaaattactagtaagaacagcaaaacaaatgacttggtttcatcgtgtttgtttttatacaaaatctaatcaattgatgtttgcagaaaatatcttgtaaggttcaaagtataaaattccttaaccaagtttcaatctgttttgaacattccatttgaaacgggaagtcagctgagtcatggtcacacaacacactaaaattcaaaatgccttttccctgttaaaagagtagaaacactaggatttctgcttcataaccatctcacacagagtatgcaattcaagaccaccttgataggacatttaaactatatagttgggctcccaaagcccaagttccaaattcagattcaattaaccaaggatcagaaaaaattccagaaagttctaaaaagcaaaacctgaatagctatacatgggcaaatgttcagatagcatttacactgtatttacaactatttacataatatttacattgaataaagtattataagtaatctaa

SEQ ID NO: 29872 - DNA, 714 bp, Bovine  19866881258879
  misc_feature (1)..(1): n is a, c, g, or t
nagcctggtgagctcttcctgcgacgacgtgtcgccagcggcttggcatttcactccctggcacagcgaagtgtcaccgacgcatgtggctctctcaccactcactcctccggatcagtcaggcaaatgtcagcgaagacccagcccagcactgacaccctgctgttttcaattaattgattaactaactcatcacaacccaaccaagcctctggtggcaagcaaaagtggccagctgcggttaatgtaagcaacagagcgattttgtgtaaggcagaacttctcaaaggtggtgcaagcgacattggggtctggataactctgctctggggctgcgctgagtattgtaggatgtttagcggcagccctggcttccacccaccagatgccaggagcacaactgccctgccccacccccaacgttgtgacaaccaaaaatgtctccagacaatggcagaagtttttggtggggatgggggaattaaaagctgctcccaacagaaaggattaaggattaaacctaagaaaagacggcaatcttgaaacagagcaggaccctgtggggctcctgggcctggaagcatttctgtgtcccccattctttccttgtttatagggagtagactccagtctccatgatcttccttgagttccagagggcagattcaagttgttgctactcagggaatggaggggggctgcagagataaggaa

SEQ ID NO: 29873 - DNA, 1670 bp, Bovine  19866881469256
  misc_feature (1)..(1): n is a, c, g, or t
ngggctccgtggtaaagaatttgccctcaagcaggagactcggtttcgattcctgggtcaggactatctcctggaaaaggaaacggcaacccactccagtattcttgcctgggaaaccccttggacagaggagcctggcaggctatagtccatggggtcgcaaaacagtcagacacaacttagcgactaaacaacaacatcaaaacaacaaggatctactgtacagcacagggaactatattcagcatcttgtattaataataacctctaatggaaaaagaatctaaaaaaggaatataggtaatataaactgaatcactctgctgtacacctgaaattaacacaaccttgtaaattaactatccttcaatttttcaaaagaaaaaatttaaaaatagaagacagtttcaagagtgatgagcatgtattaagatatccctctgggacacatatcaatgtccagtcaaacataaaccccatgagggcaagtatctttgcctgttttgtttgttggtgtacccccgcaagcctggaatagtgtgcctggcacacagcagatgttcaagaagtatttgttgaaggaaggaatgattgaattcctgataaaactgaattgggggcaatggttctcttgttctttcagttatttaatatttactaagagcctgctaagcatggagaaacaccattagatgagcaggcacgtttcctgatgctgcattccaggggaggaaggaggactttggacattaattacagggatgattaatgtaatattttaacatcccctcctgtgtcctggggcttccttctacacagccgtggtcacaatcagagcatgttaatcagcgtggctcgtgacacatcattattttcactggttgtgactgtgccagagggaagagtgacccgcaggtaccgttctcaagaagcctcttagaagcatggggcaggaccatgttgttcaagacctaacctggtctgggggcttctgagaaggcttcctggacgaagaggcaatcagatccaagtaagtacacactgcacacactgggtcagatattttgcaggcaataatatcaatcgtcacattattttgagtaccatgtgccagacaatgagtggttctcatttattatttctcattcactttgcctaagactctgggaagtcagtaccattaagaactgcatttcatagggaagaggcaacatagggctggccgattaagaggcacagactattaggtataaaataagctacaagggtatatgacacaacacaggaaatactgccaatattttatagtaaccataaatgaagtttaacctttaaaacttgagaatcactacaatgtatgcctgcaacttatacaatattgaatatcaactatgcttcaataataaacaaatataagttttaaattaatgaattgaaaagagctctatctcataggtggcccatggcaggtaagtgacctgtgacaccaaaaattcagttagggacagagccaggatttgaacccagtctatctgaactagaagaaatgggagtagccatcatggtcaacaaaagagtcctaaatgcagtacttagatgcaatctcaaaaatgacagaatgatctctgttcatttccaaggcaagccattcaatatcacagtatccaagt

SEQ ID NO: 29874 - DNA, 1025 bp, Bovine  19866881579842
  misc_feature (1)..(1): n is a, c, g, or t
ntaataaaaggttttcttactgtatttgacaaactacaagaaataaatgtgatggtatattttgctcacacttcccttccattttctcttttttaggtgctatttcaagtggtttcaggctggaagagtctccatttgttccctatgactttatgaacagcagtacttcaccagccagtcctccaggttcaataggagatggctggccacgtgccaaatcgcctaacggctctagcagtgttaattggccaccaggtaaatgctggcatcttcttttgtgagagtttgtttccattaagatttcagtacctctggacatacaaatgatttggccccagttctatttgattggactgacttgcacagagggtgggggagagcacagaaatggcgaatgagaagttgagcgtcgggtttgggctgctgagtgacctggcctgttaccggtgcttgtatgctgtgaaggtggggttgattagtccgacacaaagcatgatagaaacctgtgttcattgttcttctccaaatgtctggggactgacatgacagcatttccatctattgaggaatcaccagaaatgcacttacagcctgctttgtccaatccaagttgctgtagctttgtgattgtaataaagcacttcaaaatacacttttaaaaatatataaacccagagaaattacttcaggcaaaaatttgcaagttactcattaataacagcttatattagttgtgatattaaatcaggctgttagggtgttggaaaataatttgagaatattgggaaatatttgagaattgcataaacttcaggaataaaactttgggatagttaatagtggatttttagatgattaagcctgaactaatttgaagtttttatttccagaatttcgccctggtgaaccatggaaaggttatccaaacattgaccctgaaactgacccttacgtcactcctggcagtgtcataaacaatctttcaattaatactgtgcgggaagtgaccacctcagggacaggaa

SEQ ID NO: 29875 - DNA, 1238 bp, Bovine  19866880555509
  misc_feature (1)..(1): n is a, c, g, or t
naataatggagtgggttgccatttccttctccagtgaaggaaagtgaaaagtgaaagtgaagtcgctcagtcatgtctgactcttagcgaccccatcgactgtagcctaccaggctcctccacccatgagattttccaggcaagagtactggagtgggttgccattgccttctctgatatacagtatgtataatggagtgtgaattcatttttattcactaaaatggtatcatgatgtgctaagtttcaattcctgtatctcataactacattataattcatatagtaatttaataaagtaatattgacaatgtaataattggtaaagcttataataataaaattataaaagaatgttaccaaacctgcctcatgcagaagagatcatgaacttgggaagcattaacatctaatgtacattagtcgaatgcttttatttttcaatctgttttctaatgtatccatagttctctattcagaaaggtgaattccattctatgcaatttcatatctctgtgtctttcatatttctaaatattgtaataaacacaatattttttatgattcagaaaataaagacattcaagtttttatttacatacactgggattagaacattaggcatttatttttaactctttaaaggttttgacattcatgttcaataggatggtaaaaaaagttttttaattttttgaaaaaacttcactgtctgattttctgtatttccagatgtgaacctggagccctacatgatgtatgagtataggatttctgcatggaatcgctatgggcgaggattcagcaaggcagttagagccagaacaaaagaagatgtgcctgaaggagtgagtccccccaggtggacaaaaatggatcatcttgatgatgtaatagtcttaagctggaagaaacctatacaatcaaatggtattaaactatttttaaaattaaaataacataatcccattaaatccataagggaactgaaattagtgagatgcatttaattggcacacatctaaccactaaaaagggaacttcagttttgtggggaaacagtggaaacagtgtcagactttatattttggggctccaaaatcacggtagatggtgattgcagccatgaaattaaaagatgcttactccttggaaggaaagttatgaccaacctagacagcatattaaaaagcagagatattactttcccaacaaaggtccatctagtcaaggctatg

SEQ ID NO: 29876 - DNA, 3268 bp, Bovine  19866880627615
  misc_feature (1)..(1): n is a, c, g, or t
ntctacctagagaattcccagtgcattaattatagagtcaggacagtccactctgtcagtgagacgcatgaacctaaatatatatgaaatttgggtttaaaaactgtcatttttcacaatgcctcctaaagaatggaggtcttatcagtttagcctcttcacagcctagtcacagaattaaatgcttgtaagttttatttggtcatgaacaacatgcacactctttaaaggagaggatatgagccttgaatgaagaacataatgaagcttcccaccaaagtttctcattgatttgctagcttctaacatatgtgggcttcatcacttacctttgtagtacttaaataagtttctctgctacagagacaaggaaatccatagcataggattcaataacccatgagagatgaggtctaaagaattaaatgtggttttgctttttgtagctacagctccaatagatgaggggcagaagagtgagcagaaaccagaggtgttcaggactttatgtaggatagattaaaataaggagtctctgaaggaaatcttgatcagaatcggaaggattgatcaatcggttcctttgggaaggtgccaggtggtgctgaatttggcaagcgagactgagaatttcaagtttagagcatcccaattaaattgatgtttttgtccttatagcttaacgtctattattgtatgatcaattcctaaattcctatctctgactttatatttatcctgcattgtggatttgtattttgaacactctacttcacagagacctcaatctcaaggtctaaaaaagaattacactattttccactcccaaatgcgttcttcttcctggggttttctctcccccatttccctataccagaagccttagagtaagactcttaaaagtagaccctgcttcctccactctcaaattcaagtgagccactctattttatcttttatttcttccagaagttttggttttatatgcaatcagcaacacaagactctgcaggtgtcaccatgatctaacttacattggaggaagatagcactgctggcaagtcaatgatggatagaaaacacgtggaccaggaggaagagctatcaatttgaaagttatggcacagttgtagaaacaacacaaacaaaaacagcatctcactgcattcctgtcttatgtcaggcatcatatattatcttctttaatatcactggaatgtcaacttcatacaattggggactatgttctcctcttcaaggtagttccaatgcttagatttgagtacagatcggtagctcaaatgctgattgaatgaatgaatgaaaccagaagacaatattgtaagataaatattactaccatttttttaaaataagaaaactcgggctcataggagaaacttgttacagatatcacatagattaatagaggcagcaaaacttgaactcaggcccatttgagaccaaagcttctctctctatattcatgctgtctcttgataaaagacttgaataaggacaatcagaggaaaaagtgaaaggataattttgagagaacacgtagacaggcagaacaagtcttggagacagatgagatacaggggcaaacgtgaaggaggagtcagaactaccactgatggaacaaaattataggtgaagatgaaaagttctgaagagcagatttcccaaactgggatacatatatcctggacatttgtggacttttgtcaaagtatttttggagacaaggacaaacatgtccctctttccccaactagttttgacttgtagaatttgtgaaacacataactcccctctcccataacactagggaaaaccagcagaagcccactatttctgttcacaaacatgagtatggatatttctccctaaaatgcacaaaattagaaaattgtatgtgcaagtgagtgatgagaactttactaaattgttttgaatatatagtcacttcagagtgaactaattgtataccagcagaaaaagtttatgtgggcaaaaccagtgtgttgaacatgtataaatactatttgtggtgcaaacatcatttaatttttgtcacttactattgctttaaaatgattcatcatgtgtaatcttccccagacacgggatgaaaaacagactggaaccatgatgcctctgctcagtctcaagtaacacaaaattctacattattttttttttccagatatcacagcaaagattaatacctagaaaatttaagtaaattcattttctctttaatggaattgtgagtacatgtaatgagctcatttagaagatattcttcaaggcctcattcttaactgcaagacaaaattgggaatgcttttccttctcccagtaagactgctataattaaaacaaagttagagagttggatgaagtgagttgattacagggagcattggaggctctaagttcactaacagatgagaaaaacttaagaactatattagaggtaaaataaaagagcaatctaatcagggttttctttttctctactaaagacgatctttggggattactgctccaagtagtaaaagagattgacgagcgagtcagggaccgtctcagtttgcaatttgaccttcagcagaagagtatggttatggaaatatccctccagaaggtcttgggaggtcacagcatcctgcctcagatttggggatttctccctgttgttgccctaacgtagtttgtaaggcagtgggggaaaaggttgctgtttgtgcacacatatttatgacaaaatgaagagaggaagaactgcctggacattgagctgttattggggtcggctctcttcagattgacttaacatccagaaatataatagcatattatgatttagctaaagagattatcaatagaagaaaagggtagaaaatgtacccctgaatgataaattccacaatacattgttttttggatgtagacaaacacattggaattcaacatcaaatttgcatgaaattttaagataaaaagcaagaccttaaaataatttacaaggttatggtgactgcttcaggtttttttaaacctcctcagattacatgtttattctgtcttctcttatcctaggatggatcttgtggaaaagtctgacaaacacattttggaaaatatactataattcttgatgaactagataaactacaggatggagtcagatcaaatccctcttctactttgcttattccctggtaaattctccatcctctgcagataccagtctcttcat

SEQ ID NO: 29877 - DNA, 865 bp, Bovine  19866880629822
  misc_feature (1)..(1): n is a, c, g, or t
nacaaaataagtgaggccaaaccagcttgtcaactactaggttgattgtaggaaaaataaagaaatttaaatctgtggccaaaagaaaaaaatttaaaagaaaacaaatcattttctaatgctatggaagtttaaagatgacaaacaggttaccttggtcagcatagaaagtgccagtaaaaaggactgagtacatcaagcgtccattagggtgaaaaggcggttcccacctcacgtgggcttttcgggatccttctgttttgacaaacacatttactgttccttcaggaggagcttccagagttcgattttccacctgtgagtataaaaagatttatttttgtttgcaaataaaataagtacatgcttcactttgagcatatttcttcaaagaatctcttttggctgtgaagtaaactattttgacagtcgcatcttgtatgaatacctcattttgtcagcaggatcaaagcatacctcatgttttcttcctcctgctgttaaagcttagaatttgaggtcctgaccaaggcagtttgtgatttccagaatatgtggatcagctcacactgtgatcatgcctatagctgtgcatatccacagactatttctagggtggcttaaaaacaatttttttgtgattgcaaaagggaagaaatgcataaggtctattttcataagctcctgactggagtaatagactgctgggcattgtcaaaggccacatcaagcatcttcacagacacacacacatactcacttctctgagctgtgttactaccaggtatgtgcaaatggcaccatgccagacatcaggagataaatgtacctgagtgaatctatccctaaagtataatcacaaaag

SEQ ID NO: 29878 - DNA, 2087 bp, Bovine  19866880629850
  misc_feature (1)..(1): n is a, c, g, or t
ncgctacagtccatgaggtcacaaagccgtggacacaactgcgcaacgaaatattcatgcaccacatttcaagaaccctgtctcaatcagttaacaggaagttaaccaagaaagcattaaaactttaattccacaaaacaagactgaagttggaaaaattaataacagactagtacacttggaccacacaggaagacagatgttgaaacaaggaaggctttcagatgctatgcctctttgcagtgaaactacacaatccccaaacacctgggtaaatccttttgtgagatcccttaggattcaaagaggaatctggcttctctcagtcaagggcttacacttggaatgtagaccttctttcagccacaaaatgtgcaaaggcgttcttgataattttcagtcatgttgccagaccagaaaactcttctgggaaaaatgtattcccaggagcaaaataatcccttcattaggcagctgtgggaattcgctgcactttaggatctcatcaaggtggaaatttggaggagcaagcagagttttgtgaaaggagatgcttttcctgaaaaagggaaaggagagcatcggccaagcccatgttatatatcctgttcatttactttacctcgtaatctattatgtttttacattgctgaacagggctcacctgatgctccaggttccttcctggaaatttgtaccaagggtcttctattgtcatccttgtggctcccagcatgggtgcagtgtcactattaacaggcatttcattccattctaaagacttaccttaaatgttacttctggaatttgctgctgaattaacgtgtttcttcggtttagaaagcacaacctatttgaatacatacaattttggatctctaatttcaggtcctgaagacgattttactaagtcaagataataaatattttccaaaattttattttagcctcacacccatgacttgataactccttctcacttatagtcacgcaatattgtggttacatcttcaaaggaatcaggatagttctaaaaaggataataagctaatgcagcagtggagatattgaaggtctggtgtgcatgtgtgctcagtcattaattgtgtccaactctttttttatgactgcatagattgcagcccatcagggtcttctgtccatggaatttttcagccaagaatattggagtggattgccattttcttctccaggggatctttccgacccagggatcaaactcaggtcttccacattgcaggcagactctttacccactgagccagaagggaatcccagcatcagggtctttaccaatgattggttcttcatatcaggtggccaaagtattgtagcttcagcttcagcaccagtccttccaatgaatattcagggttaatttcctttaggattgactggtttgatctcctctcagtccaagggactcttcaaggattcttggaagactagcacatgtttatggacaaatatttctatgggttctgtcctgtaggccctaagaagtctgacagctttacttaattttgtctgatctacatctctttcagtttaaactgatagggtttctgctggagtggatgattaggcctatgattctcacccagactaatcactttatcgaatggttgcttgtacacacacttaaaattctcttcagaaaaatgctttctcagttttgcaatatggataggctgagaatttttcagatctttaagttaagctttactttggttaacaattttgtcttcaagtctttttttctctcttctgaagttttctataagcaatcaagggaaaacaagctacttattcaacatttttcttaaaagtctcctctgctgcttcttctgctgctaagtcacttcagtcgtgtctgactctgtgtgaccccatagatggcagcccaccaggctccccagtcacttggattctccaagcaagaacactggagtaggttgcaatttccttctccaatgcatgaaagtaaaaagtgaaagtggagtcgctcagtcgtgtcagactcttagcgactctgtggactgcagcctaccaggctcctctgtcca

SEQ ID NO: 29879 - DNA, 2476 bp, Bovine  19866880664030
  misc_feature (1)..(1): n is a, c, g, or t
nacctgtaaaagagagtttaataaagctctactttagaattatgctatagatccaaaacttttaaataaaataaaatattagcacattgaacaaggatacttattcttagcccagtctcagcccgttatatcgatcttcataaaaactcttattcataaagttctttttttctttgtttttatttgaaggataattgcaatagtgttggtttctgccatagattgccatggatgagctgtaggtatacatgtgtttccttcctcttgagcttccctcccacctcccatcccagcccacctctctaggttgtcacagagccctgacttgagctccctgagacttatagcaaattcatataatagcatatatcgattttatatatgttagctttatgtagttttaaaatgtgattagatgaagttaaagaaattagaagtaaattacaatgtttgtgtgttacttttttcaagtctgaagccaatcaactaaaccaccttcataaatttttgtttatgaccaggatcatgcaggtgccttaattgtttagggccacacttcagagatctgagtgagtaggtgaaagtcaatagttctttaaacacctacccacctgtcctatcttattcaaatatatagtaaataaacagagaaatggaaatccaagcaattaagaaccacacaaacgaaagaaacttttgtggtcaacaaagcatctctgaaataaacattttattctaagccataaatgaaactttattttaaaaatttcagtgtaagtcttgttttagagaacatcttttgcttattaagtcaggaacatggtccttagtctgacttttttgggctgcaagaatattttataatccttcatatgagcaatagataaataaaaagccatgggaaattaaactgaaagttttaatctcacatatttggccatactgtaataaatgtagtcttaagcattggaaagaatagaatccaatatttcactaactggctccttaaaaagcttggtcacatttatttttagtaatagctccaggatgttttctagaggatgatcaaattagataccatttctgttagcctactcactataatgacaatggccttctccaccttgctctaaattccttctaaaaattttctgtgaaagtagactcatgtcttccaactcagtactgtcaaaaagatatatattcctaagcctttaactttttaagtgagaaaaatagcaaatttttggatgcaaacatttatagtagagaacacagactgtcttcagagtcattacatcacatctcttaatctctgcaggttgatatcttattcagatttttattttttgaatgttttcttagcctcaataaccaagttccaaatcaattcactctcagctcaactgcgaacacagactaatccgaagtttgaattctttcaaggactgccaagccttgacctgaactctcagaatattctagttccagaggcaagtggcattccacatgtgagtcaggtagaactgagctgtgataacccttccattttttatttgcaagtaccaggaagccctgtaagtttgaccttgactcacttctcaagcccacaaagaacactgtaccaccaaaataaatagaaccctatgtctgctttataaactttgcttaatttaggcctctttgatctcgcctccatccaggcaaattctctatgctcataaggaacacatctaacacttgtcttcaccagcacattttggaactcttttctcctagaagtttttaaaatcagcaatgacttcaagccatgtagtaaaatttcagtagatgtcaagtccttgttaattataaattaggactgtaatcatcaagcagctgcccaaatgacatgttgtttagtcactcagtcatgtccaactgttggtgacccgtggactgtagcccaccaggcttccctgtctttcagtacctcccagagcttactcaagactcaatcatgcccactgatatggtgattccatccaaccatctcattctctgttgcccccttcttctcctgctctcaatctattttgtctccaacaattagtaagagaaccctacgaaaatctcaggttagattgctcctggaggaaacttttttcctttaagacagaaaattttagttcatccttctctgttctaatttctctattctacacattttagactttgaatttgtatagaactataagtgcaggtatcaatatatcactttgtggaaaacttgtttaaattatcaaaatagctgtatgctaaggaaaatataatgccatcagccatgactggaattacttgttaaactccatctctgagtatttggcattaaataactgtacaatttaggctctgttctcatgacgcttacagcctatttgggagatgaaatatacactctaaaatttaaagaacactgcaaggcaagaaaaaaaga

SEQ ID NO: 29880 - DNA, 896 bp, Bovine  19866880722058
  misc_feature (1)..(1): n is a, c, g, or t
ncagcattttgctttcttacaatgatttattcagtttctttatcttacttctaactcctttgtttagagtcagaagaaaaaaaagagacatatgttgtacacatgtgatgtatatcttataaatatttgtggtctctatagcactgaggatgagatggttagatagcatcactgactcaatggcttaaatttgagcaaactctgggagacagtggaggacagaggagcttgacatctatagtcaaagggttcgcagagagtctgacacaacttggcaactgaacaacctgaaatagcactgagcatttgacagcttctccagagttttatgtgcggttgggttgctttgggagatgaggctcatgaactgctgcagagccagattgaaacaaaccatcatggatgcaccattcatgtcaagccctactttttatggcctctaccattttacttctctcagtccctaccttgggtttgcaaggtaatcagattcattgtaataccagagataaaaggttgatgatacagactacacagtcaatgtcttctgttctcactgaaggaactgaagtaaacataatttccaacatcattaatgtcagtggccttactacatccctaaagtgtgtgatgtcctctgctaggaacattcatgatgggactccacttggaaaccccctagggatgtttagcacttcagagcatcttttgctctcctcttaatgaaagtctattgtcaactacttataatccaggaagataaaaatgtctaatccagttaaaaatgttacagacttattttaaaaacttagtgtattttctctcccagtgggccaagaattcagttttcatgtgagaaacatatcttcatcctcaaattcccaaaatacgtctat

SEQ ID NO: 29881 - DNA, 1377 bp, Bovine  19866880980892
  misc_feature (1)..(1): n is a, c, g, or t
nattcagagagaaatgtccagagtttggtttgaacatgttaagtgttaggtacctatgagccatccaagtggaaatatcatgccgagtcctggatcccagtacatttagagaggatttcaggattagagataaaaaaggggagttaccagttcaggatgtatttaaagccacagtcccagatataagtagggataattagagtggtttgggctctggggaaaaaaaaatgccattctcacaaagaatgatggagttagttaggaatttctaacttttctaaatttctaacatttctctctgaatctgcttctccaactagcttgcccaccctagttatgccagttacattcttccagttgctcaagtcccatatcttgcagtcgtgctctacattagggcttagcaaaactcttctggaaagagccaggtagcatgtattttaaccggagatttgcatttgtatgcagcacacggagggacccaggccctttcagagttctcacagttctccctcttcatccttttagaggacttatggtgtttatgtgggtggtaaggagatcttggaacagaggaggtctgggttattctaacatcaagatgttgggatgataattaagaaccagtgaataaaagtagccaatagcagagaaccaagagggaagtgcatcccgaagcacaaggaagggtttaatcatttggtaaatttgtagaatagattgtcctgctgaagttctcatctgcttttccatccacaggctcttcagccaccacgaatggtggtactgttattggagagaacacaggagtgtttgtgggtgggctgccacagggttacaccattctcagaaaggattctggtgagtttggggaaagtatagaatttatatgttgtctccataattggggctcccctggtggctcagcggtaaagaatcctcctgcaatttaggagatgtgggttccatctgtgggtcaggaagatcctctagggaaggaaatggcaacctgttcagtagtcttgcctgagaaatcccatggacagaggagcctggcaggctacagtctatagggttgtaaaaagtcagacatgacttagtgaatgaacaccaccacaatttagtgtagaatcaaactatatcatgttaaagtatggataattatattattttctacctcatgctgtatttcctacatcactatgtcaaaaatttcctttagatctcttattttctagaggaaccatgtattacttatatttaaattcttagaaaccagttcttgatatatcaaagaaggtaattaaacttttgctgaaataaattatactaatttaagtcaaagttttataatttgggggtcaaaggtatgaaaaa

SEQ ID NO: 29882 - DNA, 660 bp, Bovine  19866881171178
  misc_feature (1)..(1): n is a, c, g, or t
ntaaatgagttggatagaaaatgaaaagtctataagaaaggttgcttagctataagaattacttaatgatgagatttgcagtacattagaacacatcacataatgttaagagctacctttttggaagtactgacagcttaaagtgataactcaatttgtctagtctctattggcccaagatgtttaagaaaatattttttaaactatatagtagtagaggaaaaaagagattcttattaatgatccttaattgctggtgatgttacttctctgttattacagctagagtcattttctcacccactgtatctgtcacatgatatcattagaaatgggatgttacatatgtcttagacacaggatctccttaggtttattaaattttgaggttaatgaatattttgacacttttacctatacatatcattagggcttattgtgatagggttaggatggcaatcataataaacatatatagtacaataaaaagcacttttaatctttggaagtgccttataaacaacagtgatccatgctatggatggattaacagcatcaaattgattgaattctatttcaagggcagtggtggtattaacattgacattcttgttccgaaggaatgcagcaggggcagggctagagtgcaggttctggagt

SEQ ID NO: 29883 - DNA, 1586 bp, Bovine  19866881327050
  misc_feature (1)..(1): n is a, c, g, or t
natcttccaaaataacttgtgtttatcacattgtttaatcttacttttattttctgtggtcaaattaagtttttttttttaaataagactaattttattaaacagcacaattaatgaaacaaggaagatctgataggactaacaagggctcgaagttagattctgctggacattttcccccagacctgttgaggtataatcggcagacataaaactgcacgttaatcatatttctcatcagacagaatagaaagatgtttcctaaccaatgcctaagagatgatgtaccagggtaaattctttatgctatggccccttacctctcccaaattcctatgtaaaccagtgtctgttactctctgtttacctaagtaaacaatagggaaggaaccagagtcatgagttagtacactttgagactatttcttacttctaatactcctgctctccttacagtttggatccccacctgcatctgcatggccacagcatctctgcactggacaagcatacccagaggaggtcaccttttccacagctggctacaataaaggattgtgcaggtagaagaggaggtctgagcgggcctgagcaatgataagcttacaacttaaaactggtaattaagctatcttgactaacttatttatttattcattcacccactgattattcattatgcacctaccatgtgtcaggtgtggtctaggcattaaagataaaaatgtgagtaagaaacagtccctgctgtgtaggctcttatcaccagcgattgtgacagatgagacaaacaatttcagcattatgcgattgaactcgaggatacagaagggccctatctcagccttgcttggtaaaagatgacttcttgatggactgacttccaggttgaaaccctaaaaatgagtaggactcagtcagatcaaggaggtaaaggaggttttctgagccacatttgataaagaaaaaaaaattagcatttctgctttgcccaaactttctcttcttgtttttcaactacactaggaagaaaacagctaaggatgctatggccacagatcttgcataattcagcattgaaagatagtagggattcaacatcaccataaaagacattaatgttaaaatcaagggaatggcaataatgaaaataatccaaatataatggaaaagtaaatagcatatagaatcttctctgcctataagttggttcgtttcgatatatcggttcatttattattcatttcggtatgaaacacagttcactggacaaaggcatggaagatttctttaataactctcagtactaatttaattctacttaaacacacatattctagtgaatgccacatgcttttcagcatgatttttatgtgtaaatcaggataatatgttttcagatcattaagtaaaaggaagcatgaactaaaacctatttaatcaatgaggtatcacctttaaactgccacaaggtcataaaaaagcataatttcaaagctataagtttcctaattgtaatcaacaacaatctaatgataaagagaagtatgtgctaatggctgtaataaacttgaggaaatcactgt

SEQ ID NO: 29884 - DNA, 1475 bp, Bovine  19866881329337
  misc_feature (1)..(1): n is a, c, g, or t
ntttgcttttttgcatttcttttcatggggatggtcttgatccctgtctcctgtacaatgtcacgaacctcattccatagttcatcaggcactctatctatcagatctaggcccttaaatctatttctcacttccactctataatcataagtgatttgatttaggtcatacctgaatggtctagtggttttccctactttcttcagtttcagtctgaatttggcaataaggagttcatgatctgagccacagtcagctcctggtcttgtttttgctgactgtatagagcttctccatctttggctgcttaggaaatgctaataaagatgaaaaatctgctctcaactttttaacaactaaaaataattccataatacatatcttcctgagcttatgatggggttatgacttacaatactgaaaataccattaagtcaaacctgcatttagtactaaacatcacaacttaccctagcctagagtaaatgtgctcagaacacttacattagccttcaggtgggcaaagccatctaacacaaaacctattttatgatgaagtgttgaacacctcatgtaacttactgaatactgaaagtgagaaagagaatggctgtgtgcatacagactgattccaagcatatcacttgtttacccttgtggtcatggggctgactgggaacttaccaggcctgctgctgctgcccagcatcacggaggaatatggtaccacacatccctagcccgggaaaagatcaaacttcaaagtactggttctactgaatgactgtcacacttttgtaccatcataaagtcaaaaaatatcatctgtataattttttgactttagagaacttaatcagaaaaacacactaagcttctgttttaaataagtttaaaagtgaaaatgaagaatttatatttacaactctttttttaggttcctactaccaataatacacttcttcagcactgccttcatagtacttgagaatgaccacctatgtcgttcccagaggagtagcttccgtggctttctgtctcctccagagacaggatcttgaacgatgctaaaggagtggaacccggctgagtagagatcattcctctgaatcgtgttactgtccatgtccggacatgattattatctgcacaaactaggagagaaagagaacacacaagagtttttaaatacagattgtaagagcaccaccaacatcacttttataaattcattttaacttttttcactatgatctacaataagtagatcacagcacattttgagtgacaaaacaacttatcttaaaatcatacttaaatttgtacctagccaacaaaaatgagataacagaatatggtttaccttgctgcaaatataaggtatataagttaatctacggatccttataaaagtagcctatagggtatagatttagaaaaggttaaaaaaaaagtgtatgtaaaaaaaatgttga

SEQ ID NO: 29885 - DNA, 1786 bp, Bovine  19866881449440
  misc_feature (1)..(1): n is a, c, g, or t
ncccctgtacccccagccaactgagaccagtacagggggccagggcagagagccagcctcgagggtctccagccctacaccacctacaagctgagggtggtggcccacaacgaggtgggcagcacagtcactgaatggatcagcttcgtcacccaaaaagaatgtgagtagaagtggctgccaccatgtgcccgagaggcggcagggcagccagaggggaggcttgtcctgaagggaggggaacagttcactaaagggattgagtgttcaattccagtgaacggtactgagacatccatgaagacaagtatcaggtgaaaatgcccattggattaaataacatggagatcaagagggaatttagggaggactttttagggaggaccaccatttaggtggtccaatggctaggactctgtgatcccaaagagggggcccaaatttgatccctgttcagggaactagatcccgcatgccataaccaaagatcctgagtgccacaactaagacccaatgcagccaaataattttaaaaaaagaatgaatttaggaagatttgtcatgtggcaatgggatgaaaaccaatttagagaaaattaatatatgggtaagatgaaaatagacagtgaagatgacttttttgtaattcttaaaacttttaatgaaccaatttggtaatttatttaattttgactgtaatgggcttcattgctgcgtgggcttttctctagtcgcagcgagcaggggtgctatgtggttgtggtgtgcaggctgctcactgcagtggtttctcccatttcagtgcacaggctctgggcatgcaggcatcagcagctgcagcatgagggctcagagcgcaggctcagtagctgtggtgcagggcttagttgctccacggcatgtgggatctccctggatcagaagtcaaacccgtgtctcctgccttggcaggtggattctttaccgcggagccacccgggaagccttatatatttactttgggataactttttggagaagtttgtcactcctctcccttacaaatgacgtaatcgctcacattgccagtaagcactgaaatctggcccttccaggaagaacacaagggctcctgagtgcagaaaagggcaattaactaattcattgtgtccttacatttctataaaataacaccttttctgagttgataaggtttatatgtctactttttaaaactggcaaatacaaaaagtatgaagaagtacttataatcagaaccagctatgtagtttgtggggtccactggaaaataaaaatacggggtcccttgttcagaaatcattaagaacttaaagacaatgacagcagagcatcagactaagtctataattctcctacatgagggaccctgggcagctacacaggttacacacccatgaagacagtcctgcttattatcccactccaccccgaggcaaccaccgttaatatgttggcataatttattcctttaatccctttttatgcagcttttattatgtggttgagatcatactctaatgaaaacttaatatctgatttttatacttgatattattttatttgcattttccatgacattaaaaactcttagccaccaaggttaatggctgtataatattccatcgtgtgaattagttgagccattccagttgtttctaatattttccttttataaatgtggtgagaaatgaacaaatctttgtgtgaatgtctgattatcttcttaaaggaatttatcttcagcaaatggaacttactacatcag

SEQ ID NO: 29886 - DNA, 737 bp, Bovine  19866881497747
  misc_feature (1)..(1): n is a, c, g, or t
naaactgatgctgtgagcagagtccctatggaataagaggaagggcctgtgtggtcacatcacattcgtgatggtacatggacatatcatagcatcacaaccatgccatgcttattggatgcttttatgccctggtcttccttaaacaatttttgaaacacattgaatacatggggagaaatgattttaaaaacattcaaagataccatccttactctcaaagggcttaccttctaagtgagaaggtaagatattcagatacaatggtgttacaagggtcaagaccccatttttcagtaatgggagtaaagaaggcaaccttgtcagactaaatcagtcaccgccatccctgaccttcattcttaaatgtttctcttgagctctatattttataatcttgagcattttcctataagcttttatcaaacccacaaggcttgaaaatggcctagatctttcatcatattcctcatctgtaaatcagataaatatcagaagtatgtaaatcctccatagcagccaagtagaagattataatcaaataagtatccacatcttatcattaaattgataaggaaacactaagtgttttgaagctgaatcccagagcagctcccgctacagaacattacggctttagcagagaagccagactactgctccaattctaagtgaactagttaattaattttttcccttcacttaacgagcacctacttcgtgcctgtcactattca

SEQ ID NO: 29887 - DNA, 1238 bp, Bovine  19866881675829
  misc_feature (1)..(1): n is a, c, g, or t
nccctcccttttggactcttccttcccttcggtcaccaaaaaaaacctacatttttgtaaaatctatttttagagtagtttaagattcacagcaaaattgagaagaaggtacagagatttctcatatactctctgtctccacaaaggcacagcctctctcgttatcaacatcccccaccacatactactgaacataacaaagaagaaacagactcacagatatagagaacagactagtgggttaccagtggggagggaagaggggggtgcaagattgggacaggagttaaaaggtacaaacgattatgtacaaaataaataagctacaaagctgtattgcacaatgcagggaatataggcagtatcttgtagtagctataggtggaatatagcatttaaaaattatgaatcactatgtcgtacacctgtaatttacataatattgtacatcaactgcacttcaattttaaaaaatgaaaaagacaatcccccatcagagtggtgcctttgttacagctgataaacctacacagacacatcattatttcccaaagtccacaggttacattggggttcactattggtggtttatatcctaagggttttgacagatggagaatgtcatatacccatcattatagtattttcactcctttaaaaatccaataggctctacttacttattcctccttccactcgagcccctggcaaccactgatctttttactgtctccatagttctgctgagtaaaagttttttaaaaaagactaacaaagagtatttttaaattcttgtttgattttcccttctgttaaaatcaaactgatcaaactcattcaccaattgcattttccactgacagcatttttccataaagttgtctccttatttatttttcagtgtcaaaaagcacttaaaatatcaatgaccctctccagaacaagttcatggatgaaagcccttgactggctactgatggatcaagtttatagtctacctcttaaaaaaaaaaaaaaattatctccaaatccaagaatttaaaaaagactactttttagagaatactttggaaagtctagagtgagagatgctattttggggagaggagtgggatgaggagaaaagaggtttaagataaactttcccattgatgggattagtctattatcttgaaattgaaacataagacaaattgccctcctttccacttctgctattaatgtcatcttttcaatga

SEQ ID NO: 29888 - DNA, 1344 bp, Bovine  19866881699193
  misc_feature (1)..(1): n is a, c, g, or t
nttccatgtctggttctaacttttccttcttgacctgcatacaggtttctcaggaggcaagtaaggtggtctgatattcccatctcttgaaaatttttccacagtttgctgtgatccaaacagtcaaaggctttagcgtagttaatgaagcggatgtttttctggaattttcttgctttttctatgatccaacagatgttggcaatttgatctctggttcctgtgccttttctaaatccaggttgtacatctggaagttcttggtcacatactgttgaagcaatataatttggtactttaagtgaaagtgtctatagtcagaagctggattaagaagtgactgaaatttgttggaaagatctatggaggaagttgaagcaatgagtttgaatgtggtcatttaagaatagacaaaggaacaaaaaccaaaaaccatagatgaccagccacgttgagggagctactaaatgaaaaaaggaaaaagcagtcaaacaatttgggagaaaaataaggaaagagccatttcactgatgccaaactagtcagaggaaacgcagttttcatatggtttacacttgagaagctcagcatctttgaacactgttgaaaaaccatccaaatacaacattcgttcagacccgtcagttgcacccgccatctagacagatggcagctgattggcccaataaaaaattatggtccaaagggtcctagaaccattctgaacatctccttcctaccagatgccaaaacaatccgtgaaaaagcgaaatcagacttaattctgtgaaaaaaacaaaggcagccattttttccacccaaatatattttgataatgttgagcaaatcactggttgatttatcctttttttcttctcacttggttctctttcagaacattggtgcagacactataaagtcatcctgggtatcatagaaggagtagcaaaaagactgcccatttacactgttcaaagtatattatatgcaagcaagttcagatgtgggttttgctccaaatttactggtgcttaaaatgtacaaaatcaggctgttaaaatgcaaagacaccgatgggccatatgttagagagttatcgagagttctctagtaagacagtctgccagccagattttacttgtttaaactgaggactgcactctgccatcaaaactgttgttgaaccgttgtgataaatggtagtcgaagacttacggaatacattcaaggtcagatttcattgtttgaataggatggtagagaaagaattttaaaaagagggactgcttctccaagcctagctaatgatatgccaagctaagacagcaacattttaaaacaaaa

SEQ ID NO: 29889 - DNA, 602 bp, Bovine  19866881745929
  misc_feature (1)..(1): n is a, c, g, or t
ncctcttaaatgaaattttataaaaagaacatctcccctcctacttgaaaggctagctgtggagagtcgcctattcattgtcatctgacatttagtacatacccgggacgtaaattgccacactcaccagtgggcccagagcacaacctctggccgtgcaggcttggaccctgaaggaatgcaagctccaaggagcgaatccagaagcatgacaactgagttctgaggagttgtgaattaatataccatcgagatacagcccgtaacttgtgataacacctgggaaggcaataataattgtcttttactatgattgttagacaatagcaaaggtcttaaaagaagcatgtacttcttgatgcaatttctaattgcatggaatcacagtctctcccttagtctaaatcctatctctttccaaaggataaaacaggctttaaactcttgaatctcaaattgttaagctaattagtatagaggcacaaatagaaaccgagtcccagaataggaagctttctattgcatcatgttaactgctgtcatttggtgttccatatcagaaatgaataaccgtaagtacatttacaatgtgcatttgtttt

SEQ ID NO: 29890 - DNA, 952 bp, Bovine  19866880344452
  misc_feature (1)..(1): n is a, c, g, or t
nggaatatgtatttgccaaatggaagtagttgaaatcaggatggaaggaaaattttatttttatggtcctaagagggctttataaacaatgagggttttaattaaaacaaaaagccattcagtggacgtgtatggggacatgggctgcgggttagatacgggtttaactaggtttgttttggagtccttgacagaccctgattaacaagaaaggaaataccctgcctcgcccagcccctccttcttccccgtctccattgtcaccggaggggcacgtggcgggtggtggcagggggagcctgggttgaaacaggcaggttctggaaaattactatttttattgccaaggacgccgcatataaaaataggctaaccttctctgggagggcatggccctgaagcatttgccttctggtactctagaaatttctgtttcctacttctctggtatccttcagccactaaggtttgaggatttaggcttccagaaaactcttagccttctgaacagattaaaacctggtggtgtcatctgccattgtgtgttgaccctgatcctatttttattacagtactctctgaaaaactggggtaaagatactttggccaggcagaattactttattggcaattttatgcatatccaagtgaatatacccccatgtctccaggcccatgtaattacaagcttcgatgcacagtgttattgtgaggaccctaaagagtttaagcaaagtttgaacttgaaatcagaacagaaaggagctctagaggctcagcctctgccctttgttaaccctcgggacgctgggtcgggggaaacagggatgccaagaaggggagacgcgagacctccccagctggctgtgctgcagcttgtcctgggacggcggggagctcagccgtaggaaaccggctgatgatgagctctcacagcaagcaagcctcatgt

SEQ ID NO: 29891 - DNA, 1812 bp, Bovine  19866880406500
  misc_feature (1)..(1): n is a, c, g, or t
naactacttcagaacccagatgcataaaagtgcttccagtggagatgatttctaagaggcaggtgatggggtgggggtggggggtctgaagcccagcggtgtctcctttgggaacacaggatgggtgctgtggtccagaggagcacccagaggcagtgtgtgtgtggcaggaggctgccagggcatccctcccagggcttctcagccagatggcggttgctctccccacctctgagtgctcctggttggtggagggacagaggatcagagtactcctgacctgggggtgaagggggaaccagtggcaggtgctttgggcaaggtaggcctgacctccacttgcaggctgtcagaccttggccgagttgtggaaccctccatttgaatcttaggagaggaaggacatggatcctcgtatgtggctggggcaaggaaggcacacgtccagagtgaagccgctggagcgggtgtttccagcgcactcctcttcatcatcactgtctggggcaggggactaggcaactggcccggcacaagtgggcccttgataaatgcttgtggaacaaatgcgtatgtttccgctctgtctgcaggaaatgcagtggagtcctgacttctgggagcaagtgaagctgtttcaggggctggcccttcccagctgggctccggggacagacagctgaggctccagtgtagcgccaggccctggagagagtactgagccaggcggtcaggagctgggggtcaagggtagggttgctggttccagttgccatgtacggggctgtgtgacctagaggtttgtttctccttctccaggatttgctcatctccttttggcagagtggccagggtgaggtctttccaactgtaatttgcaactcatttggtacatttaacagagcaatttagtggttcacaatcagttttaaaaaccaaaatgaaacaaaacaaatagaacagaaaatatcagagtgcaatcacaggtcataagggtaagtattgttttgtgaaactattgttttgcttatatatggatgaaggtgccgacaggtctgaggtaaaattgatttgctattgtggggtcctggtgaaaagactggaaaatactgaactcagcagtcctggaggcgtcctcctctcccacattctaggggtctttgtgaaaaagccacaggtccaggggctcctcactctctccccctgggtcagcagctgtctcttggctcctcgtagttcatccctccggggtctttctctccaccttcaatcctcagccccctcctccctatcgcccagggataagcctcccccttcccaggaagtcagggtgggggtgtcggaagggagtaaacgtgatcgaatgggtggcactgggcactctatcccagaagctaagataaaaggactaggaagcaaacaccgcagcgcccggggacagaacagaaagctggcgagctggggacgggcgtttgaggggaggacttcatgaacaaaattttgctcagcggctacaccatagcgggtcactcccggggcgggggtggcgggggggctggccctggtctggtcctcgttggcgctcgggtgcgcaattaaccagcgaaggtagttttcactcctgccctcctccttccccccttaaaagaaaagaaagacagaagaagccaggagttttggagccaactcctggagagggagcggctgaactgattcggaagttggatctctttgtacacaggaatgcggcgagaaaaaaacaaaacccaccccattgcttcatttcccctccaagccctagcactttctttt

SEQ ID NO: 29892 - DNA, 656 bp, Bovine  19866880476618
  misc_feature (1)..(1): n is a, c, g, or t
ngggtctttatctctcctttctctttgcccttcctccctctgagagggggctcaggttctggcctgagctagtgcacattattatgatgaccatcattattattgttgttgtgattaaatatttatctgcaaggggagaggagagaacaccagctcttcctcattctcattgctaatctgggctaatttccccagggcttccttcccagggcccagccttccctcagtgccagcaacttccctcccctcgacttgggaggccccagggagaaaggctgaaagaagagtcagggcggggttggggtggggggacgacttcaaggcccccttccctgtgcatctgtcaaatgaagaccaggagccgctcgcccgatctgtgcctcggtctccccagtcgtgtgaaagagcctgtgtttgggttgggaggcttcgctggagacctggtccctccatgaagaccaagtgggggtctcagagccaccatccccccaccagaggcttccagggctctggaaggggcagggaagcatggggacccgccccccaggatccagccttggctcctgggcttctccggtgagcgtcttttggacactcacctcatacctcgcccctcatccaaatgctgccccctccattagctcctcagaggccaa

SEQ ID NO: 29893 - DNA, 739 bp, Bovine  19866880568598
  misc_feature (1)..(1): n is a, c, g, or t
ntggcagagggctgcggaaagcctgctcggcgctccgccccgacctcgtggagcagccgcgtcccaggtcggcccgaggggcagggcagagtgcccggcgggccggctggggccttggcttgagtcggcccaaggctggcggcaggttctgggggcggccacacggcaggacccagcagggacaccgcagggtcaccgcgtgactccccagagccttagtgcccatccatggaccgccacgaccccacctgagctttcctgtcaacaacagagctgagagcaggggctggcagggccgacagcaccccttgttgggaagtggaagtgggttgtcagcctcctctgtacctggactcctcactgtgttttgcataaaataaatacatagaataatggcagaaaccagttacactgcagtgcactctgtcccgcaagcgctgagacaggacggctctcagcatctcccaagagtgcacgctgaggccaggccagcaggcagggctcagacccctctgccagcagcgtgttcccaccagctccagcccccaaggagccagcatccttttctaatggactagatttatttaaggcaattaacatattagttctcgggccaaaggatttgtaaaacattacacctaaaggagaaaacaggcagtgaaaaccagcccctcctgacacgccccagcccagtcccttggggcgtgtgcccgtcccctccccccttgcggtctcctgt

SEQ ID NO: 29894 - DNA, 651 bp, Bovine  19866880589766
  misc_feature (1)..(1): n is a, c, g, or t
ntatggtgagaggaagtagatgttggaccggagaaccaacagctgtgggaccagctcagggaggcccagcaacaggccttggacctggaggcagagtgcaggacactggagttgaccaggtacaggcccaggctgagcaggccaatgggagttggggaacctgagtgctcgggtcctggagctggaaaagtggataggcacgaaggaggacttagtgcaagggctccagaaagaacagctgagatgttcggaggagtggaggggactggctgcctggctggaagagcaggagaggagcctgcagacctcagaagcttctctgtcggacagccaagcagaggtggcttctctgtgccagaaggctgcagtctgggagggctcactggctgagtgggaagaacatctccatgggcttgagatggagtgccggcggttacataaccaactgcaggaactcaaaggcaacatctgtgtgttctgccaggtctgccccatccttccaggggagtccaacccatcccctggctttctccagtttccctctggcccctgtgggccctctgaccctccaacccacctcagcctctcctggtctgacgagcagtgtgggaccctgagtggggcgccagctgcccctacccaccatgactt

SEQ ID NO: 29895 - DNA, 2413 bp, Bovine  19866880619755
  misc_feature (1)..(1): n is a, c, g, or t
nacatacaaaataaaggtgttgaaaaagtacctactggtgagaaagtaatttatagactgaagggtttccagaaaatcataacaaaaaaaaagtacataagatgacctttactcgtaaaatttcagcaatgatgagagaaaagtaaagcttagagcttagtctctggattactagaactctgaatcaaacacatctctagatggagaccagctcccttaacttctcatagagactgaattaaacatttatcataatttttcttgctctaactcctctctcatcaaataccttctaattggaaatttaatccagtttcctgtacgaaaacatctattacaggcaactgatcagtatatctacagcctgtaaaccagttcccgtaggacagttagcaaaaacttgcaaatatgtcaggttgaggcccacacccaagaagagatccgtaatatatctatccttgtggaataattaacaagatatgggacgttgctgctagtcctgtggttaggactctgcactgtccactgctggggtgcaggttcaatccctggtggcatgctacgaggtatagccaagaaaaacccacccaacaccaacatcaagatacaggatcagggtactgtggtagtgaggggtaataagtatccagcagcagcagtggctcccttgtcctgaaagttagcatatggcctcagcaatcacttgtaagtccaatgagcagtggcccagccctgacccttgcagaggtccctatggcgaaggaaacaagcatggactctgaaccggcgaccacagtgaggacaggcatgtagggctccagcatgcgtcttcatatgctctgtcagatggtgcttcagcttgaaacgcttgttgcagatgccacagccaaagggtcgaaggctgaaggtcagcatgatgtgtcggtcgcgctttggcttcactgcaaagcgcttcccacacaaacaaccaaagcgttttccatctgcagggggtgcgccacctagcttcacaggcccatgcacagcctgccctgctcctccaggtcccccaccccctgataggatttcattaccatgaagatccactggtttccaggatggaccacctcctccagatgttgtccctgctcctgagggcagtaggaaccctagttctccattctcttcagtgttccctgctggaaacactttggtctcctcctttgctcctacagactgacttccgcctcctgctatctcctccttggactcaaagggttcctgcttgatgtagaagactttggggggcaatgcagtatgaggagcgggaggctcaagtggggcactctcaccctctggaagcctgcaaggagtagtggatgtgggcagggggtgggatacaggagggcgaggaaaactccctgattctctctgaggctgaggagtctgagagggtgctgctgacccttggtcctcctcatcttcctcctcttcctcttcaacctgaagctgtaacacatctcccagttcactcccctcccctccaatcgggctctgggtagaaggagaagactgtgccggggtctggaaaggggaagagcggatgcaccagcctcctgtggtggaaagaagtgtgtggaaaggggtcgctcctcgggatgaaatcccaccaccggtgttttccagttctctaaggatctctgagcactgatctaccacttgccacatctgcaggccactggccacaagaaggtgcgcagggagagcatccaggggcagacggaggtgccccgaataaatgagctggagcagcccctcgaaggcatcggcttcgataacgttgggtagggtgagacgcggtgcatcccccagaagtagtttgtcgtggaagtaaggagaagcggcggccaacactgctttgtgggccctcagttcgcggccctgcaccaggagagagacgtcacagaactttccctccagcctgtggcggttcagggcctccagcagcaaagagctgtgctgagggaactcgatctggatcgtccgtggggctgggttgcaggctggggagggggctacgggaggcaaaggcgtcgaggtatccatggcctcctgaggaagaaaaagaccccagagggtcgggtacaagaggtgaggggagggggagagcccctgcgcgacgagggctgtggaggaaagagggggtcacagaagctctggataaggaaaatcgtatctccccaagcaacgtccgcctccgctgcaccccaacgtgtgggaacttttcggtcgccggtggttcgggcagaacagtcccacacactcccccgccgagaaaactaaaacaaaccacaacaaaacaccaaccggggcttgaacttgcagggcctgtggcgaggaggaggtccttcagccgtagccggatcccgccggc

SEQ ID NO: 29896 - DNA, 1865 bp, Bovine  19866880628650
  misc_feature (1)..(1): n is a, c, g, or t
ntggaagtcctgcccactacaggctagctgtcacctcactggttgggacaacaaagatcaccccctcccatttctaaaacacaccgcccccaactcctactgggaactataatgtggtgaccaggggaccaggagccctgaaaactcccatttagcctggagaagcaggaggactcgtggaggggtaaccccccagcttcttgaaggttgggcagaaccctgtgaagacgtactctgggcaaagaactgagtgtttccgaagtgatgccctctcatgctggtggtaccagggtgggcgagctagggcagccctcggtggctccgtctgcttatgcagttgtcttttcccctgcgttcaaggaagttctgtgttctctcaactttgcctcacttggttccccttcctgatgaccaggggcctctgcctgctgtgggctaggcagaaaccccagttttgtttttagtttccaggggctgtaggactagctttgaccagagtggggacatggccttcccttagaggctagagggacgggcctgacggggggtgcatcccgtctctgtgatctgcctccccgagggccctgtctgggttcccagcacgaccgtcttcctcctgtattgctgccaaccagggaggcacagcactgcagcctgagaggggtcttagaggccatgagctcagtcctgtgctttcctgggattccctcctgtgacggagagctcactgcctcacagcacggcccgtggtattatcagacaggccctgtccccgtgccagcgtttcaccgcaccccaaatccttctgtctcttcccaccacactttagggttttccaactcatgcctgctttccataggtagaaaaatctgaacactctttctggagtttgggcttatggaaatcgttgacgttgtatctatttccaaaataaaaaccagctaataaagaacctatttctggaattttaattggctctgtcttaggtcgaatttgctagaatcagatcctaaaagggagaattatgaagaaggggtcccaggcggagtatcagggagtcttgctcctacagggcagggacgagccgagcaaggacgtggtttcaggggaagagaggcctcaggttgatcccatagggaccaacagacagtctcctcctcctgccgtgggatggaggccacctctctggggtggggggatgtattgataacttcctagggaactgtgggcaagatagtggtgggccagagagggctgctgctgtgaactgtcggctgccagagtacaaaacctggacccagaccgggcacaggaggggtcctaagggcttctgataaacttcccgcggggaagagggcacgcgtccacccccaggtgagggcctgttctcagacctgcttcccggcccctccatcctactcagcacgatccaggatgctttaagctctccgggggtcttccaacactgcctcttcaccccggtggggccaggggcagtgatggagggcagagcagaggcggggtttgcgggcagggctgtaggctggggtcttcccggaacctcgtgtgagccgatctccctccttctgctccctcaccccccagactgcctcttcaagggtgtgtcccatgaaccgctactcggcccagaagcagtactggaaggccaagcagaccaagcaggacaaggagaagatcgccgacgtagtgctgctgcagaagttacaggtctgggcatgtggggtgtccacttggcccgtgtgtctcatgaacccgggcacacgcccagggctgccgctcatcagagccgacagggccttagtggcccgagtccttgaggtttgacccgttcggccagggactgg

SEQ ID NO: 29897 - DNA, 1214 bp, Bovine  19866880641951
  misc_feature (1)..(1): n is a, c, g, or t
nagaggagagagaatggggaatgggtttgggggaggagagaccagggcagggggagggccaaattaggtatgtgtttattggtggggaggggggcaatacaagtaaaactgagtgctggtagtaggggcagattaagacccggccccagactcaggccctcattaaggcccttgagcattgaaacgtaatccctgggggcttatccacttccttcacttcaccactttcaacccctcccccacctccagtccttatttccattccccctccctctggtgtccaccacctatatctttccccacatatggtgtccgttccttatatgagtcccccttctgtccttcccctgtatcagtccctgctctggtgccccttctctctctccctctcttccgcctggtagtcctttatatctctaccacctctccaccccctccttcttggccccctcgtcttaatgtccctattatgtccccctcacttcctttgggcccttctggtgtattcccttgtccctaaagatttaccatcatctctgactcttactcccttagatccattcctgttatttcttctccaccccatcccttcttccccaccccattccctatcttatcacaagtctgtgcctacttactttcccctaagaccccatctcttatcacccattcctcttctctcgtctcctctccttcctgggctgttggagatttggggagcaaagacaccagttttgacagttggaacaggacctacaagagatccccatctgagccccatggaagtgttcatcctagcaaaccttccccctttcttaactgcgtccttctgtctcttgcatctgcctcccagaatcatcctgcgtccaggcagcgtttgtgtatgtgtgtattccagagttgctcctaagtgaagttccccgtgtccttccccactcccaggaggagggtgtcccctgaagtctaactgtcctccctgtggctgctgtctgacccagtccctcctataatgatgatgtgaatcaacagatgtcccctctgggagtcctcggggtctgactgcagtgggcatgtttcctgcagtatctgcagtctcagagtctcagagttttggtgatctctttatctaaagggtatgtctctgaggtggcactgacagagtttcaagaggattggggtttttatatacctgtgttcagggagttcacctctgt

SEQ ID NO: 29898 - DNA, 1941 bp, Bovine  19866880656464
  misc_feature (1)..(1): n is a, c, g, or t
natgaggatcaaagaaagccaaaaaatgtggaaaccaaaccccaccccattattatgatacctgggaaagaaagctagaatcactggctatcagggaggaggtgtgctttcagaaatagaaacaaaacaccatttcaaggtaaagacaagtgatttttatagaaaaattatggaatttagaaagatggtaacgataaccctatatgcgagacagcaaaagagacacagatgtatagaacagtcttttggactctgtgggagagggagagggagagggtgggatgatttggaagaatggcattgaaacatgtataatatcatataagaaaggaatcgccagtccaggttcgatgctggatacaggatgctcggggctgatgcactgggatgacccagagggatggtacggggagggaggttggaggggggttcaggttggggaacacgtgtacacccatggtggattcatgttgatgtatggcaaaaccaatacaatattgtaaattaattagcctccaattgaaataaataaatttaaattaaaaaaaataaaaagtaaactatttaaataacttcaaagctaaatatagtgctacttcaattttaatcagtatcatagaaaacaaatttgaaaagaatgcttcagatacataacagttattatctctgagttccattatggatgattatttaatttattttttttgatacagttctctacttttaaatctgttttgcaataaacatatgttccctttatcttggaaaaggtatttaatcatctaaaaatatgaaatcatagagataaaactcctgagtgttcagatgagaaaactaacgctcaaagagttgagaccattgtcttacatcttcttaagccaggcctaaaatccaggcagcctgaatcaaagccattgctctctgttcccatccttgcaattattcatgagaatgcaaagaaaagttgactgagttcatttacttcatcttcagaatcatcccaccctgagattgggtcttgggtagttaagtgcttctgaaaattcttctcttccacagtttccagggctgataaaagaaagaactaatcatgagacaagtgatgaaccttatttttgagggaaaaattggagggaaaaaagctcagcatataagatagaggaagaatgctttagtggaaaagctctgacttgggaggtaaatgatccaatttttacagtcattattttaatgattgccactaattatctatatgactgtggacaactcccttaatctcttttcttaggttcttttttaaataaataacaaaaggaaaatctgtgccagatggtacccatgtttctttcaagtaataacacttggtttataaacacagacggggcaggcagctcaggagcacggagtgtgcgtacccttgtgtcgcgagcgcttgagcgaacgtgggtcccgggagccccggctctgtgtcctcctcattgcacttgcccagtgtgagtagcaccaagctggacatggagccacagcagaggtccccattggtggaagtgaaggggagcgtagagctgaagagacccctggccaaggccccttcccggctgtctctcttgggaggcaggctgaagaggaggcctgaccagatggaggaggccttgaagcctgagaagaaaataacaggaggcctgggcaccagagtggccacgacccaccccagagcagcagccctcacctccgtgccacagacacaaggccagactgcagtgcccaaagctcccaagaagccaggaccctgatgttccacagctgttgccacagcgctgaagactcagaagccaggtcctgctcttcttgcccagaagcctagaacaacagctgcccctcccatggtggaagggaagaaacccaaatgtccagtctgggacttaaggggcagttatgtga

SEQ ID NO: 29899 - DNA, 599 bp, Bovine  19866880667999
  misc_feature (1)..(1): n is a, c, g, or t
nggtgttagaaacggtttcctggtctttatctttctctgtcgacacctcaaattcctggcaactgacccagcaacttggcgggggcggaggggggggcgctttctgtgaccacctgttagttggccagggaagcgtcggcattggctgctacaggtgacattaaagttggaccaccttctgcctgccctagagtagtctggatgagccagaggaaagtaactcagattccacgcatgcacgagtgctggtcaagcccacttccagaaaagagaggctgtcctcctgggaccttttaactcacgtagctgtcaagcggtgaaaaactcttcagattcctctcaatgcagaagaaaagggtacaagacctctacatctcttttctagtgtcaccatcctgcatttctaccattgtcagatgctgggctggcagtggggtgaggtgggcgcggatcctgactttgcatttgactttgtggaactagccccagttctactctgggttagtggccctaggcaagtccctccctcttgctgggggccagttccctcatctgtaagtcaaggggacaaaacacaaactttcctagttctttccagt

SEQ ID NO: 29900 - DNA, 1510 bp, Bovine  19866880672261
  misc_feature (1)..(1): n is a, c, g, or t
ncattttattagcacccggcaggggctccccgaagaaggcagctgtgtgaatttcgcaggaagaggggagggctgtgatgtcttttgtcttccagcaccttaaacatttcagtccttctggctgcaagatgatacaagctctttccaagctatttccctattatggcgcctgcaggaaaaagagatccgttgtgactgtggtgccgtgctgcaggggtgggaggggtaggggcctggtgaggggccctgacctggccagtggggtcctggtgacagtggagggacctacacatgctgacttgtctggggtctcagggagcggggagtcaggggccatgaacccactctttggtagccacgggtggggttggtgatcctaattaaaagcttggatccaaaaggcttgatgagggaatttctaattaaataaatttcatctcatctgggaaacagaggtttgcatatgataagcatgaaattaataattacgtttagaaattagctgttgcaccaagccaagccatttacacaaccctcaggggctggccccgaccccggcccgatcctttgtaatggagacggatggtctgccggtcaggagcagaggcagtggctgagcagaggggaagcggggctggccctccccctctgtggccgccggccgtgcgggagtccgcctggaggctgccagtgtctctgtcagatcctgtgtgtgagcacacgtgtgtgtaggctcgcttgtgaggcggggaggctgagctttcaccggagagtaaaatgggctctggaactcatccctctggctttaaatcacggctgtgtgtcctgggcaagctcctggacctttccgtacccaggtgtaggggaaacgagcacctccttcatacggttgtcgtaaggttaaaggtgttagtcctataagaccactgggcacagttcttggcacacagtaaacactcaatcaatgctcatcctcaggaagatgatgattacgtgtgtgcgtgtgtgtgtgtgaatttaattcagctcagcccaagccaacctgtgacgggtgtgagcctgacatatccaggcttttgaggtggagaaaaatagagctccccccttgctctcggggagctagagctcgcgcccccgtgtccatcggcatcaggaggaggcgctgcaagagcacacggctcccgcttctctgtggctgtaaacccgtaaactgaatgtacttgccgtgttgtgtgtccacatggcttggctgggtgctcatcccacctcctcagggaccaggctggcccggaaccagtcacggcagcagggtgatgagacgccctgaccctgagttgatgcacttcctgctcgcagctcaggggccagaacacgtcaggtggggcatgaggggcgcgtcgtcagatttgccagtatctgacggggaatgagggagggacgtgtctctaaggactggcacccacgttggccatgtgtgggctcactgagcattgtctctcccactggagtg

SEQ ID NO: 29901 - DNA, 732 bp, Bovine  19866880680918
  misc_feature (1)..(1): n is a, c, g, or t
ntgtggaacccacaaaacagagctgaacagggcttttcaatggactgattgtatcttgcatcccctgaaagaatgagggcttctcagaagggatcgggtctttgtcctttcttctcataactacttggccccaggtgttgcccttggaagggactagaagcctgccctgtgggtaatgacagggctcagggtggggagggccccccgtaccctgtccagtcggctctcgtccatagacttggaatactccttgagtttgtactcttcccgctcgatgtgggcactctcaatgtcagccgacaggtgaggcatgttggagacccaggccaccgtccgctcggaggccggcatcgtggggttcagcgtggacggcgtctgggaatgctggggcaggggagagggaaggcggaaggaggtgggcgctttgaaaggcagggagcacggcccaaggaaatgggagtcccccgactgatcccctcatgaatgctgttctcatcacatctgccctgggagccccaagagggcagggaggcctgtctgttaactgacaagcacacagtgcccagaacatcacatggagcaaagcaggccctctgtgcactttgcttaatgaacgaaaggaggtgagaaaactgtgacttcagaccacagaatgttgtgctcccctcgacccatctcctcctcctcccctcccgctcactgccctgccagccctcccgcccgtcctacctg

SEQ ID NO: 29902 - DNA, 703 bp, Bovine  19866880742964
  misc_feature (1)..(1): n is a, c, g, or t
ntcgccggaatgctggggagaagataagtaccgcctggtggctgtgccccacggcaacgacatcgcttccctcttcgagctggaccccaccacgctgcagaagaccgactccttcgtgccccggtgggtgggcactgtgggcctggggttggcgggggttgcctgggctagtatccggacccccagtaccccctgctcctctgtccttccttgcatgacccatccctctggagatccagatccgaggcagctgtagggagctcaccgccgctgaacttggcatgtgctgggccacgggccctgcaccctgggtgccgccttctctccagtgttctttacagccagttggcctggggctcaggacacattgggtgcgggggacggactccttaacctttaaggtcttccaacctggagattttaggatggaacatcaggaagcttcctgggtgtcaatcaggctttaacgttgacctcaggcagctgacttggtcacttggcccagacatcctcacctgtgtagtgggattatcgagttacccatcaaagggctgatgggaggattacccaatcccttatctgcatcttgaggccagatgtactttggaggttcagattgtttttcatttctgaaaggtagttgtgtttcaccatcaaagacatgactatttctgacgtgagacgcaggcatgttgacactgaa

SEQ ID NO: 29903 - DNA, 1242 bp, Bovine  19866880769892
  misc_feature (1)..(1): n is a, c, g, or t
nccatccctttggaccccccgtccccatctcctccctgctggaaagcaaaaatggcttagccgtgaactgggggggcagaggctgccccagcctggcctcgatctgggaagagcccgtgtccctgtgaaaggagaaagctcagagggcagatgagtggggcgctgcttctggggctcaaaggtacacagaatgtggagggcagagcaggtgggtagaggcagcagggagattacctgtgggtgctgctgctggcctggcagcccgggacggcagagagaaaaggacagaagaggaggttaggacagtcttggaatcacagcggagttggcggtggcctctgaggacacaggcagggtgttcagctctgagcactgattccatctcctgctcctgccgtcaccctcagcctcgaatctaccccgcgactgacttccttaatccgcatggtgacaacggctaacacctctaagtgtgcacgcaatcctaagcgtattccccctagtttacggaccaggagactgaaaactaggatgtgtcatgaagccggtaaatggcgaagctaggattcgcccaggctgctggtctcttgaggccagatctcagcatcaggaagtcattttcaggacccggtgggctgaagccaggtccagcaaccatttttgtgtgaaatgtggctcccaatcagaacaacagctgtgtcccagcagtgctggggagctctgggaacacccccactgcgagccccaccccacacacacagtcctgatctaccagctcatgttggtatcagggcttatgaaggctgtgcccttgtgtacaaagatgaggagtctgggcttagaaagagaaagacgggggcccaaagccatgcgtgagttaacagcagaggcagggacagaaaacatgtctcctgacaccagcagagaagctgtctcccgtttcacgggcagggcctggcgcggtggggacagcgccgtggaggggcggtggccggggctacctggacgcgatcttggtgaagtactcataggcgttgtctgctgttggctgcaggtgctgcagcatggcctggaactccgcatcgtagcgccggttgatgtcgtccccgatgacggcgagctggcggcccacctgccccatggtgctggaggagcgggaggcggccagtgagttggggcccgggctggcagcaaaccgctcctgcctgagatgcccggcctcgggcgcccctcctggaagtc

SEQ ID NO: 29904 - DNA, 1534 bp, Bovine  19866880772500
  misc_feature (1)..(1): n is a, c, g, or t
nccagccggtgggtcacagagcacagagctgggtcctgcttggatcgggctccaaagggaggtcagatcctcgagggagcctggagatgggccatccaggggtgtcagggggaggctggtaattggggctcaaaggggagggtcaccagcgctcggagttgggggcaatgaggaggtctctactcaccctgtcgcctttcacacccatgtcccctttgaagccgggaaagccatcctcgccctgagaaatatggggcgagaggacatcacggatgacggaaggaggggtagacagaggtgggcaggagaaggggcggagggtggtgagggcgagaggacaccacggatgatggaaggaggggtagacagaggtgggcgggagaaggggcggagggtggtgagggcgagaggacatcacggatgatggaaggaggggtagacagaggtgggcggcagaaggggtggagggtggtgagggcgagaggacatcacggatgatggaaggaggggtagacagaggtgggcaggagaaggggcggagggtggtgagggcagctggggctgagggccattgctcaccttttcacccttgtgacccttcagaccccgaattccatccacgccctggaattggaaggggagagacggagtggtcaggaggggtggcgaggctggcaggaccaagctccggggcccagctggccgccctgacctcagccttcctctcccagctggctggtctcttaccttgatgccccgaggtcctgggtaccccagaggaccctgaggtccagaaggaccctgcaagaggacagagagttgtcaataaagggtctcagggggtcactgaggacgcccaggggtgggagaaagggaagtgaccaattggagtccggagagggttgcagggggtggactgttggagccacgtgaagatacgaggagatcccaaggacttgggtgcccaggtctgggtggcgaccctgccaggggatgtgaggggccatggaagagcttacctggtttcctttggttccgggagggccttccttgcccgggtgaccctgggggtaggggaaggagagcgtgaccactggtccctgtcacttcctgcatccctctctacacttcttggacccaaatgcccccaggtcctaatgaagctgactgaccattggcggcatcaccagtgacttcccaggacaagggacactctgtaaggatactcactgaggtgcctgcaagtcactccctggggtggaaggtcaagggggatttgcatgacgaggtgggggcactcaccgggggtccatctgagccgggcatgccaggtagccctggtttccctcgaggaccctgcagggagatgaggacactcagtcacagccagacatttgggggctccctgcaacccgcctcagcacacccaccatcccccagatcccttagtcacttaccttctctccatgagggccaatggcaccctggggcccggggagaccctagacaccggagagagacattacaggggccc

SEQ ID NO: 29905 - DNA, 950 bp, Bovine  19866880845375
  misc_feature (1)..(1): n is a, c, g, or t
naagctcacatcctaataaactctccctaaaaaaaaatggacttatgagagcagcctgcaaagtcaatgccttgaattcttcatagagacaacagggctggtctgtagtgaaagaaacagggttgaagggctagggttcagcgggtggggggggtctccagccggcttcagaggcccgctgaccaccttcctgcgggaaagtggcctctgtgtcccaggaagccttccttaatgctgcgcgaccagggttcctgttgctggaaaacgtcgtgtcacagtacaagcatccctgcatcttagacctgaagatggggacccggcagcatggggacgatgcctcggaggagaagaaggcccgccacatgaggaagtgtgcgcagagcacctcggcccatctgggcatgcgcatctgtggcatgcaggtaggtgggggtggggcaaccgcagggactgggcatcccgggaggtccgctggaggcaagggtgtcccccaaccagacaccgttgccttcactttgtgggagcaacagaggcagtggccaagcacccctttccccaaggaaacacatatcctgatccaggacatgctgggtttttttttaagagcacctttcaggacagtggtgtcaaaatctcaccatttggggaggaatgtaaattggagtaaccacgatggaaaatggtacagaggttcctcaaaaactaaaaatagagctgccatatgatccagcaatcccactcctggggatgcacccagacaaaactgtaattcgaaaagatgtatgcatcgctgtgttcatagcagcactatttacaacagccagaatatgaaagccacctaaatgtccactgacagataaatggataaagaagatgtggaacatacatacaacgcaacactgctgctgctgctgctaagtcacttcagtcgtgtccgactctgtgcgacc

SEQ ID NO: 29906 - DNA, 686 bp, Bovine  19866880895304
  misc_feature (1)..(1): n is a, c, g, or t
ntgaacgcagagagaagagctgcaggcgtaaagtctccgccaggaaagaagaggggagggcagagtccagggacttacaaaggtgcagactagccggtcgtgagagactgacagggcggatcgtttcactttacagctgggggaagctgaggcccgaggtcactgagacccaaagggctggggggggggggggtgttccggagaggcaacaagagttggaagcgagtccgggatgactcaccgtgaattttgaggtagcgctctggcgcgaggtccggtcgaagaggtgggctctccgcgccctggcgcagcagcagggcagcgggtttcttggccaacttgcccccgcccgcatcctccacgaaccagcactcaatcaccgcgggtctggccgagacagcggtcgccaagcctggggagaggcgcgcgggtgaaggcacggccccaacttcaggtgacccgacctcccccatccccggacgtggcggggctcacctcccaccgttccctgtgccaggagtcacgggggtcgctcacccaaagccacagcgaggagcagggacaggcgcttcatggcgttcggatttctcagctccgaagcagcctcttcctcctttcactttcactttcctccaaaggccagcaggtggggcggaggaaatcccctctcaggctaagggaaagtt

SEQ ID NO: 29907 - DNA, 1886 bp, Bovine  19866880896999
  misc_feature (1)..(1): n is a, c, g, or t
nctgggggtgaggagcaggcttcagttcattctcaggatttttgtgatattatcttcagccactctttccccagcacacagacacatacagactggccatccagagcccaggctgtgccaggctgagggcagtcaggccggtgagaagttaaggcccagcctcacacagtccctgctcccatggggtctcctggtaaagcagctgctggcaagtgagccacagcggggtatcgggagctaagggctgtggcggggccccaaagccagctgatctggctaaacgaggtccccatggctggggccttttcagaggggctggtccgtgggccgggcctagaagcctgggctggacgaagggcgaggctcccggctaccctaagtgggagccggctgtacagggtgctcagcagagggctttggggcaccatgccgaggtcccagcacacagacaccccttcttccttggccatcactccccagggcccctcaaaacctggcattctaggtcaccagcctgtgaccagtcagaaaccctgcagtgcagcggcctccctgcctttctttttcccaggctgcgtttatttatagtcccatcccagtaccttccagagctgtctgtctgatccttttagggatcaattgcaaacagaccttggtattgggcagctttttagtcatttaatgcaaattgctgcactgctttgcaggtcaggttttaatgatctggcctcggtccaagctaagtggcttttgatcttgctacacagtgaagatgccccacagcggtcagggccggcgggccgcacgctccccgtcagagctgatggcttgattcttgctgccgtgttcagtcggttgccaggtaaatttttttacctctttgtgtttgaatgtgtgttttttcccctcctaggtaattttgaatgtggaaatccagagaagctaaagagcaaatgcattcctgtcatggaagcccaggaatatatagcagtaagtaggctgccgtgtgcgtccattccctggaggtcctggtgttctgtattgatctttcaagccctgtgttttgttttgttttttttcccttgttttgtgtttgctttttggcttgtttgctttccctttaaaaaaaaaagttttttttttttttaacacagttgagtgctcggctccctgaagttaaggcagcagtggggtgactgggcccagggtgagctgagagccagggcccagcctgcaggcagctcgcccctgacccattgccccccagccagctgaccggaccactgccctgccccttcccagagcagtcctgtgacttgctcctcttctggctcattttccccttctcagcagcttatttaagatatttcacctgctatttcacttcccccttaggattaccatccaggttgctccgggtccttttgattttcgatgtggcctcaggtggacagaattacaggttttagagccagcagagagagacccaaggggtcacctcatccagttttcgtttcaccgatgaggcacctggggcccggagaggggagggtctttgcacaaggccacacggccggctctggccgcagggagggcccctgcccccacgtcgtcttccacgtccatccagatgagccgccagctctctggcctggcaatgcggcccttgaggaaactgcattcctccagctgccgcagacctgccccgttttcccacgtgcgcttccgcatcacctcctccagttacagcctcttctccgggatcatctgccccagatcgccattccaccagtttgctatgcgtttagtggagcggggcttgggggcacacggaggacaaagggggcttccacaacccagctgctctgcccagacggagcactaat

SEQ ID NO: 29908 - DNA, 2433 bp, Bovine  19866880919140
  misc_feature (1)..(1): n is a, c, g, or t
ngtagaagccgccgtaagtacagagggctctggtggccttgcatctgctgtctttggatcaggcgggacaacaaaggctcagagaggctgaggtgtttgctcaagggcgcacagccagctagcgacagaactgtgatcccaacatttgacctcattcactgctctttccactggagccacagtttcccagaacactcccatccccctggatccctgggtccccctgcagcatcacaggtctggtgcccagagattgtcctgcccccttgttcctgcaggatggtagttggccctggtcactgctgtgctcgctggcttttaggggatggtcatgcccagagccacaaggtgaatttcctccttgagatttttgtccccatctaccatgaagccatctttggattctccaccctgcctgctccaacccacctcactcacccattttctcatctctaaaaccctcccttcagccccaaaccaactggctattccttctcctggagtgagctcccaggacaaagggcctactattctctaagcgtgaaagtgaaagtgttagtcatttagtcgtgtccgactgtgtgaccctctggactgtagcccaccaggctcctctgtccatgggattctccaggcaagaatactggagtgggttgccgtgccctcttccagggggtcttcccaacccagggattgaacccaggtctcctacattgcagatactttaccttctgagccacaggggaagtcccaaagccattctctaagcatgacccttccaaagagctgatgcttggaatatggctcccaagtgtggccaggctccctttgcccagagcctggagctcgtgggggctctcgcttactttccagaacttcgtgacacactcagtagggcatgccagcttctgtgttcctttgctcgcagcagttgtgtcttcagaggcatgtaacagaatgcactcattcaaagcaagaggcaaagaaacactcagccctgggcacacattgcaggttctctgattgaacctttgttcattgttctctgctgaacctgactgcctgtaccacgcggaggccctgggggctgagccacagggcagtgtgtctcccctttgtgtgcgcacaccagtcacctgtggggtttggttaaaactcagattctgggacttccctggtccagtggttaagatttcactttccaacgcagcagatgagggtgcagtccctgatcagggagctaaaatccttcatgcctcatggctaaaaaaaccaggacatgaaacaacagaacaattgtaacaaattcaataaagactttacaaatggtccacattaaaaaaaaaaattaaaagaaaaaaaacaaaaactcggattctgagtcagtaggcctggggtggccaaacatttacatttctaacccgctcctgggtgacgctgatgcggccggtcggggaccaccgtgagagcgaggcctcacagggctgggagtccgggctgcgggctctccgagctctgtcctgtgactctcggttgtcactgctggtctctgtatgacccttgggggttttgtattggagcaggatcccctgctggtcatctaggtctaaatcgtgcccgagagcttatttaaatgcagctgttggattcggtcgatcctggcagggccagctgagcagctggattttggccatctgactgagcaattcagacacgaggttccaggatgccagctcagggggcggtccagggcactgggcagcgtgtcctgaggccggctcccctgcgctgtcgttgacagatagagcggatgctctggccggggagtggccagcagctgccccgctccgtctgcagcctgccctgccagccgggcgagcggaagaagacggtgaagggcatgccctgctgctggcactgcgagccctgcacggggtaccagtaccaggtggacggctacacctgcaaggcctgcccctacgacatgcggcccacggagaaccgcacgggctgccggcccatccccatcatcaagctggagtggggctcgccctgggccgtgctgcccctcttcctggccgtggcgggcatcgccgccacgctgttcgtggtggtcaccttcgtgcgctacaacgacacgcccatcgtcaaggcctcgggccgcgagctgagctacgtgctgctggcgggcatcttcctgtgctacgccaccaccttcctcatgatcgccgagcccgacctgggcacctgctctctgcgccggatcttcctggggctcggcatgagcatcagctatgcggccctgctcaccaagaccaaccgcatctaccgcatcttcgagcagggcaagcggtcggtcagcgccccgcgcttcatcagccccgcctcgcagctggccatcaccttcagcctcatctccctgcagctgctggg

SEQ ID NO: 29909 - DNA, 1517 bp, Bovine  19866880932879
  misc_feature (1)..(1): n is a, c, g, or t
nccacctcggtgacagagaatctttaccagtggctccttcatggctgggctccataaagacacagtccctgtgcaccagagaagagcagaagttactaatagggtgctgaggcgattaaacctgcaaaagagggggattcggggccaagaggtaagaaaagaggggaacagaggggcaacctgaagggactcgttaagtacaaatatagacgaaaagctggggcattccctgatgatccagcgggtgggactcagctttcactgctgtgggccaaggttcaatccccggtcagggaaccaagatcatacaagccacatgacatggccaaaaagaaaagcaagacaggatggtgagggttaaagttctgccaggcaccaaccattactgtgtccgagatggatgacggcattgtaagggttctgagtcatgacgctggagccgtccagcccgagcattcagagctgccacgatctttcccactgacacgtccaggtaggtcagaaaccctgtctctgactgtgagagagagagggaaggagaccggattgccctctgtcctccccctactggggccccaggggagggacggtcttctcagggctgccatctggtccctgcactccagtcactcacagctgtggccaggaggaagtggaaaggcaggaactcaagtcgggtgacccggtcacagcggcggacgcaatggagctctatgccctggttgtcgtaaatgtgaagccagcggttctgggcaacagccagcagtgcctcagaatgcagaaacctgagaggggcggaggagcggagcaatgtgaaagggagtcaccagctgtcgactgatcagtgacgggctgtctcatccccaccggccgctgaccaaggccactgaccggatgtcccgcactgcctccatgacgttgatctcacacataagcttctttgttacccagtcgagggcagccacatgaccccggcgtcctccaaaagccaggtgtctgttgaaggtggaggacaggcagggtgtcagttcaaggcgtgtgtgtagggcaggcgcccggactcaacggtctgtcccacgccagctcctcctctccaggtgagaggagagatgttaccacacacgcttatcacacatgcaagcaaataacaagaccctccccacgtcaacaacccagatgtacactgctatggctgagatggactaggctaaagtcaatggaattcaaccttacctcccagttctagagtaatttagcctgtagggtccaaactgcctcaagttcaagtcaaaatgctggagaagggaatagtgaaaaaaagaaaaaagagagttggttcctttcaggaattttctagtccccactcccgtcttattctgcaccatcagtcgacccgctggcccctttgccattctcaggctcactttggctgcacttgcaatgtccacagcctccacgatgtcagcctggcgaatcttcgccgtgtcctccccatcctctccttccagaaaccgcaa

SEQ ID NO: 29910 - DNA, 940 bp, Bovine  19866880951571
  misc_feature (1)..(1): n is a, c, g, or t
ncaggcgggacaggggaatgggaagaatacagagaaggggaaggagccgcaggctggggccgggggtgggacagaatgcattattcgggtgtagacttgggttgtgagggaattgccgcgaggtcacccctaccctgctcccttacccttctgcagctgttgatatttctccacttctccctgcagcttcttctggattagctcagccatggcggggacgaaagcctgcgggtagcaggagaggggcgctgggtctcgctctggaaggtacccgggctcccctttctggcctgcggaggtgacagccctcttgagaggcagcccctcggggcacccactgcagtctctcctcgtccgggatatcgactcacccccggcctcagggagtggcagaaccccgaactcctcaaccgaaccgctccccgactcacgctctcacttcagtattgatgaacccggaagtaaatagagaatgctggggaaagacggcaccggaagctgtcatctgacgcacgccgggaaatgtagttctaacatggtcaatgtgtggtgttctgctaaaaagaccagacgcggaaggatttaaggcaagatggagaaaccgagatgggaaaagaaactgcacggttgcttgggtcttgacctcggagtgcccgtctttcatcacttgggcataagttgcctcactggggtccttggtcccgcccctcagtggggagcgcgccctcattaaagatggcgcctgggaggcttcgacctggaacggcgctgattggatgagtctcggaggacttccgggagttttccatccgactgtggaactgtggagaggagtttgcacgtggatcgtggttctagtgggctagatggagacagtccccgagccgggcagtaatgtcccacccaagaaggacagactgcagaccaagaagaaggtagg

SEQ ID NO: 29911 - DNA, 656 bp, Bovine  19866880994065
  misc_feature (1)..(1): n is a, c, g, or t
nctctgcacccccagccctggcacacgggcagctcccacaagtaccaagtttaacctgaaccacagggtctgcaaaccagagtgactcaagcctctaccacccccaacagtctgtcccagggaagagggaggcaggttggtgtgagttaagactccacccggaacccaagaagagaaacaggggagcctggcgggataagcactctgcctgtgcaggcctctcatccccacccccaacccaggagaggcgccgcagacctctggagtggttgccgggcagccggtccacctcaaggatgaagtcgtccttgaggaagaggaagccgacgatggagaagaggtagaccaggatgagggccagcagggcggtcagcaggatggagcggccgttgcgggtcacgctcttgatgacgttgaacagcgtctcttcgcggtagatgaggtcaaagagctgcgtggcagaaaagacatggctggacccacaggctgcctgcttcccactgggtcccacgtcccccccaaagaggtctgcgcttaggcgggtggaaccaggcccacgggcccattgtgggcgacatttccgaggaacccagagtcctaaagcccaagaaggaggggtcccggggaaagcatgagggcggaatagcaccaagtgt

SEQ ID NO: 29912 - DNA, 1132 bp, Bovine  19866881038118
  misc_feature (1)..(1): n is a, c, g, or t
ntcactgatgcccctgacgcctccctcacctgctggtgagggccccgccgccaccccaaggtagggagccaatcatgttttgctcctgaattgtggcttgaggctggtggccccccgcatggggtgggcagatgatattaaccaaggacccccctgacccacccccgcctctcccaggcatgccactcatctactggttctcccgccgcatgactctctggggcagcatctccttcaacctggcagtctttatcaacatcatcattgccttcttctacccctacgtggagggcgcgtccacaggtgagggcacctcagggcaggcggagggccctgagccttccatgccccctcctctgatgtgagcagggccctggggccggccaggccccgaggggactgggtgcagcgtggggagcagtgccctctgggttatgcaccttatcaccggggcagacagggcctgtgccctttggagacagtgcatacacatgcataaggcagagaccagtttggtagcagcagctggaggtggtagcaacacctcctccagatgcaggggtgatggcagagccctgtagccaggtgaccaacttacagggaaggctcccgggaagggggagggcttcttggggtctgtggggtgggtgggtgtgagtgagccaccctgtctctgctcccgggcccccaggcgtgctgggctccccgctcatctcactgctcttctggatcctcatctgcttctccatcgcggccctgttcaccaagcgctacagcatccgccccctcatcgtggcgctcatcctgcgttccatctactacctgggcattgggcccacgctcaacatccttggtgccctcaacgtgagtgccaaaggaccccagcccccacccctcagggttcatcatgtagtcggacctgaagcgggcccgttgcctccgactggccactgctctccccatccctcggtctctgagccggaatcattacagacccgaggttgggaccactctgtcttctccatcctcctggacaactcagggcagcagacagttggagtcagccagccaggagccactttggggcaccggcttcagggctgccgggtacccggagttagttgtgcactgc

SEQ ID NO: 29913 - DNA, 1707 bp, Bovine  19866881258117
  misc_feature (1)..(1): n is a, c, g, or t
nagctccctgtgctgtatagcaccttcccactagctatcttacacatgatagtgtatgtatgtcagtgagtcttgtccgaagctcaggtagacggggagaggtaggaaggagagcatttggctggaagaaggaaaatccaagtctgtggcggtgggaggcatagaaaaggcaccacagcagccatagtactggagggtagtgtcaacaccatcccaactctgcaacacaggaaccacaaaagctaggaagtctcactcctgcaggacaggcagcttcaccagacgaccccccagagatgaacggtaggacttgaggatagagtgtgtgagaaagatttgaacctgggcagcatgcacccctctgccatcacgtttgtctctgaaaagaatctctgcttactacttccttgctgtcacaacctccactgtactctctttccatttccctgattacaaccaattcacccctcaaactgctgggcaggagaatttttgtgttcctatctggttgattttgtatttgcttctacttgtttgcattttaaatattggctttaattgtatctatcattttgaccttcttgcaaaaactaattttgctttgtgttgtgtttatggttagatggcatcaccgtctcaatggacatgattttgggtaaactccgggagctgctgatggacaggggggcctggcgtgctgcagtccatgggcttgcaaagagttggacacgactgagagactgaactgaactgaactgtgtttatgaaaacaggcttgtttttgaaaagcaccacttgcatacattgtgtgcatttaagggaaaggtactgtgtttttaaaaaattctcttctttatttgatagacccaggtatcagtgctctcgcccaataaaacacccataccccccaccccatgtgtctcacacatacacacacacacacacacaatatctagatccatcttcatttcttgttgacctggacagtaccaataacacactggttcaccttggaggcaaagtgtagggagttgagggacttggagacattctcttctaggggagaaatgttcacaaacatgagtatcttagcactgccgcccagagagttctgccccaggtaagtgagcttgctgttacagtaaggcccatggggctccttgttgctcaaggccatggtgaccagccccagcgtggacaggctgctgttaatggcctgtgtttccacagaaggtgttcctgctccccagggccgagggatacgccagggtctagctgctcgctcccagccaagtccacaaggctgaggggggctacgcactgcaggcctcggccagcatgctccccagagatctgcagctggaacacactgtgactacatgacgagcgctcattctgggctctacgaatgacagcccagttctggtaggctagtctctttctcacaggagactggaacatagcgcatattggtgacattaagctcctcgttgcctgtccctgcctggcgaatcacacattcacctccctggcccttccgggtcccagtggccagtaggtctcagacagtcttgttgtagatctctaagtaacttgccacaaaactgtaggtccagccctggccacttagttcctgggccacaggaaagaggtgcccgcagggcccaagggatcagccccttcatctgggggtctcccctaggccca

SEQ ID NO: 29914 - DNA, 1417 bp, Bovine  19866881318994
  misc_feature (1)..(1): n is a, c, g, or t
naccccaggtcccggaatgccgcatgccctagggcaactgagcccagggaccaccacttcggtgcctacacggtgcctacacactaccgtgccgcggagcctgtgctctgcaatgagcagccatgctcacaactaaagagaagccgagcgcagcgaggacacaaagaccaagacaaggtctgggcagctgagtggggacatcaatcgagtgtgaaaaatgaccaacagggcccggtgtgaaagcatattccctatcagagtttccagaaaaacgcaaagaaccacaagacggaagccgttaactgtataaactatttattaacacaaagcccacacattatttcttcttggacacacccacagtgcgaccacggcggcctgtggtcttggtgtgctggcctcggacacggagtctgcagggagaaaagacaaaggttactcaccatatcaagcaaatctgggaaaagacggggcatgagagtcccctgggagtctaaggacagacaaatgggcccccactcacccccagaagtggcgcagccccctgtgggcccgaatcttcttcaggcgctccaggtcttcacggagtttgttgtctagaccgttggccaggacctgcacagacgggggacagtgagggatggctgttctccgccctggtctcctaggtccagtcccaactggacagcctgcttttctttctgctctcccctctccacacacacctggctgtatttcccgtccttcacgtccttctgtctgtttaagaaccagtctgggatcttgtattggcgtggattctgcataatggtgatcacacgttccacctggcaggcaggacaagggtcaggtccagacagcccccatctccaggcaggcccaggcccagccccagccccgatccctgtcctcacctcatcctcggtgagctccccggccctcttggtgaggtcgatgtctgctttcctcaacaccacatgagcatatcttcgccccacaccctgaggagaggttttagagttgtgtgagtctgaccttttgggttgctcatgattcaaaaagcacacaaaagtagggtccaaaataacatactcttccagatacaaagcctaatcattaaagggaaaaaaaggttttgatatcccctgaaagctgtagcacccgagtggcaccttctgatttctacacagtggagacgaaattgatgcttctcagtcaatggagcaccagagcaacaagatcaaggttctctgaattaacggttgagttgaattaactgaattaactgaattaacatggtcagttgctcgtgatgtcaaagggccataggccatgatcctttgggcaggtcactaaatccctgtgatcaaaataaacactgagaccagtggcattcctgtcaccaccaacactggtg

SEQ ID NO: 29915 - DNA, 963 bp, Bovine  19866881321046
  misc_feature (1)..(1): n is a, c, g, or t
natcttccccggccacgcggtgggactccgtctggattcgggattcgttggaggccaggaactccaccgcccggtcccacactcgcttcatgcgcctcctgcagagagggggaggggaagctcatgaggccagagggcccatggctgccaagggaggtgggctgtggatgccctctgtaccaaagcagggagctcacccagaatttatctatctgcgggaagagtggtcaggtgctaacagggctcttgcagaggagagaaatttcgtgagcccagagaaaggcttcctcaacctcctctgctccaaaagctttcagttaaagggagctgaaaggagctgcagctccccgccccccaccccaggtgtccaagtgggaagactcttgctaggacttgatactgcagcaggcccgccgcccccctccagtgagggatgcattttaatgtctcgtgtgggccaattagacagtgaccactgggctgttgagtccagactccacagcacttcaggggatggggctgaactaagcctccagcgggggaggcctggacgctggagctgcctgtggaaacagagccactaggtcgggcagtctttgcagtgatcagagtccctgctctttggggtccccggggccctgcaccccctcagacagcctcctagtttctctttgctcctctagaccagacaggaagatcccagggcggtgggggagggctgctctgatgtctaccctttggtgagacccagcctcatgtctgactgcagaccactccccagcaccccaagcatgcaatgaatgttggggggtgtgtggagcagggggttcagcggggagcgcggatggagggaagctccggaggtggctcctgactcaggaggcagagtggggtctcggggctttcttcccggggaggtcaggtccaaaccccaggctgttcagcagtcctcacttggctggt

SEQ ID NO: 29916 - DNA, 719 bp, Bovine  19866881348693
  misc_feature (1)..(1): n is a, c, g, or t
ntttatgttggtcacctgcctcattttagagaagatgagcttgaagcctggctttcccaaggtcatgcaacaaaagagtgacaggtctgggatcagaatccatgtccctgaagacccaggcccagtgcgccttctcctgccacttggttgagtcggaagaacaccagatttgcagttaggaacacttaggtttacatgtatgatgtgccatgtattgtgtgaacttggacaaactgttttaatgaactgcctcaaaatcaatatctttaaaaacgggggtcaagagctcacagggtggttataaatactggaatgaatgttaaagcacgcttggcatgttttttagtatgtagaaggccttctgtttaaatgttagttttctgctaatttctctgtccacctcttttacttcttggagtagtcatctgttctttcataactcctgtgtctagactgccacaaatatgccgtggtttcaagtgacttcccaaatttctataaatatcttctgagttaggccaggagaccccgatatggccctaaggacactttggaatctcctcacggctggctactgactctccatttttctctcctccttccccctcccccttagctgtacaggaggagcgtcagcgggggaaagacaaagacggggatggggaggggtgctgggggagcccccgaggagatgcctgtggacaggatcctggaggcag

SEQ ID NO: 29917 - DNA, 1447 bp, Bovine  19866881363019
  misc_feature (1)..(1): n is a, c, g, or t
nctatgagacacttggggatcttagcttgccagccagggatggaacctgcccccccctgcattggaaggcaaagtcttaaccactggaccagggaaccctctgggcctgcacttcctgccagacaattggcatggccccatccacatccttgaattccatagatttactactcctccctcctgggacctgagggttcttgagctagcagtgatctcaatagggggaaaacgaaaatggaaattaaggataggtggttataatctgacaattttaaggaaaaaaatgtaaatgcaattaaaaaaagaacgtgcataaatgtataatggaacggtgtacagcagaaaccaatgcaacattgtaaaacaaatgtacttcagtttgaaaaaatacaattttgaaaatgtgcatgcatatagtcgtcaccattactaagcacagactctgaaaagtaagttttatgaagcctatttaaaatgaaatcaaattgaggttcacagtaattaagccacttgccagggccaaaagatagcctgatggtatgtgttcagtcacttcagttgtgtccaactctttgcaaccctctggactgtaacctgccatgctcctctgttcatgggattctccaggcaggaatattggagtgggtaaccatgccctcctccagggaatcttcccaacccagggatcaaacctgtgtctcctgtgtttcctgccttgcaggcagattctttacccactgagccatcacaccagttgctaaatattgaaatgcttcttatctggttggtaagagctgccgccccaagctggccccccacctcatccccaccccgacagcttccccaggcctccccgacagcttccccaggcctccccgacagcttccccaggcctccccgacagcttctccaggcctccccgacatccatgctccttgttcacatcggtgctgtggttcacaagccaagctcctgaggctagcactgaccgtcaggcagctctgggtggcagagcttcaggtcctggcaggtgcgagcagggctgtcctgggtccccatgggccgcctcatttgctcgatctcctcccgcagggagtccagggagccaaagatctcctccaggcccccaggactacccggggcacccccagttggcacagcttcatcttcctgcatcaggcggcttccgtccactgagcgccgcgtcttcttgggcatctggatgggcaggggctggatcacctctcccgggggtccctgggtgagagatgaggtcaaggtgagggagacgcggagaaatacccagacagagaggggccaacagaaacgcgggccctgcctcgtgactcaccgggtgtcccggagggccctggacgcccttctctcccttaggtccggccgggccctgccaaaggaggcaatgaggtcaggaggggtcaagaggtca

SEQ ID NO: 29918 - DNA, 991 bp, Bovine  19866881449604
  misc_feature (1)..(1): n is a, c, g, or t
ntaaaataagatgctcattgtgatttttttaagttattacacatatcatgacattttgcccctaaattcttgagtatttatcttataaaaatagatatttcctacttaaccacaacttccttatcactaataaaataataattctttgcaccatctaatactaaatctatattcatatttctccaactgtctaaaaagatcagtaaggatttaggtaaacctgaacaggagtcgactgtatcctggggggtttgttcaagtcagctttattctcagatgatagttcacctgggtgtaatggtgtaagttgccggatattccctccaggacctaggaaggcagcagtgccctgtgttcttgtttctatagttgctgttgagaaatttgctatttgtcctggattcattgcttgtggaacacacgttttctttcttgtttcttttaaaatatccccccatccccccgtctttgagttctttagtttctttctgatgtatctgggtgaggatttagtgtatcttgagacttatttcctgagactgagagagaattcttgtgcaaaaccagttctggatgatgatcaatcatgatctgttctcatcatctcattatctgttttaagagcctaaaatagtgctggcacgtattaggtgcttataaatagttgttgaatgcatttgtaaataagtgagcatttttctccactccccctcattctctctattctctcctgctcaaaattttttcagatatttgttagaacatttcattctatctaccatgcctcttcctctcctttacacatttttcatctctttatctttcttgtctacattttagatacttttgtcagatttatcttctagtgcccaattctaacctcagctacttctaacctgtttaacccatccattgagtttatatttatatattgaattatattagttatttgtaatcattgatacctagttaatctttttataatattctg

SEQ ID NO: 29919 - DNA, 1158 bp, Bovine  19866881451711
  misc_feature (1)..(1): n is a, c, g, or t
naaaaatgaggttcagcacgatgatgatgacgatgaagaagaacaggaggtcgtagaccactcgggcgggaaagagagactcctgcaggagggaggcagggaagctgggcccagcagctcccagaagggcgtggaggccccgaagacagtggagaggacccgcctcactagagtcagaatcaccgccagagcacgtgcagggacggggactcagcggctgggaagaggccctcgaggaggagtctggcatggggggccaggcctcggctgtgcccacccctgaccgctggggaggggacgagtggctctgaactcctctgctgccctcaggacacgtgatctcactcattctaggggacccctggccaaggagcagcttcttacccttgtgccactggggacagactgatcccgggaacgcgtggctgcctgcacacgctgcgccaagccccgaggcctcttccccacccggccaccctggctgcaggccggggcccggggcccagggcccgcccgctgtctgactcacggctttcccagcctgagaaagctgggtgccaaggtcttccctcagagcacccaccacgagctagagggcacccactgtgagctagagggctcgtctgggctgacggggcccggaaggtagcacagctaccccgtaaccgcctgggatcagagggcacaccgcggggtggggacgtgaagtggggggactcgctcccctgaacatgggggagactgagctgccctgctggccgggacctgggggcggggccgaggcactcacgtctttggagggcttgcggaggatgtcccccacgccaccgccgttgcgcagcccgtggttcatgacggtgacgatgcacatgagcagggtgtcacaggcccgctccgtgctgtctggctcctcgtcctctacaagtggagcacgtgctcagacccggccaggagtctgctcccaccctcactgcagcccactcctgagacacactgccctcacctgccaggacctcaggcacagagactcctgagacacagtccacgttgtccccactgcacgtgttcacaaatgtggcagctccatgtggcatccccagggggttggctggaggggacagggtcaaggacaggaggtccaaggactggcttcatcat

SEQ ID NO: 29920 - DNA, 659 bp, Bovine  19866881624874
  misc_feature (1)..(1): n is a, c, g, or t
ntggcctggtggtcggcaggggcccacgacgggccagggtacattcaccatctgtgtttacagatgaggcagagggagctggagcgacttgtctaaggtcacccaaccggatgacggatgacggtgctctagatcaggagccccacccccctacccctgcagctctggggcagctcaggcctggccctccctcgggatgtgccctcctcttttccagcaactcctcgaaggcaggagcctctgccctgcgtcccttgggtctggcacagggatgcctgtggcctttcttctaacagtggccctggggtttctggagggctggcggttctgagatgcagaccctgaggctggcaatgagcgccccgaggcccgggaccaggccaaagccgctgccgctggggagtagctcgcattgcgggctgggtctggatctcccctcctaggccttgcaggaggccccccactgtgggcgggtacaggcagaggcccccgggctccacagcgctcagtgagcccatggagccagcaggggaggccgcccacatcccaggaggctggcagcttgagaaatcaccctcaacaaccccaggaggccccttccctcacctccctggggagtaaggcatgcagctgggaggctgccagcaagggtggtctgg

SEQ ID NO: 29921 - DNA, 1170 bp, Bovine  19866881747940
  misc_feature (1)..(1): n is a, c, g, or t
naattctactttcctatattttacagtttttctctaagacttttattataagaaaaatatattttattttatcataaaactaaatgaggagttgggactgacttaggactgatttctcctctggactctcagggtcctacatcatgttctaagtgtaggtataggatttcaagtgggaccatatgctttttaaaaatttgattggtggatgtttaaaattttttttggggggggtcagaaaacgccaggtatttttacattttattagctacagtatagacgctagagctgcctcatttcttcccctcccccacccccaggacagtgccaggccttcccaggagccctgcctctgctgcctgggcagtctgaaactcctgttgcagctgagcaaaggtctccctctgttgttctgactgacgctctagatcccggagctgggattcatatcacttaatctcagctgtgatgtagtccagccttttacccactgtggcccgagattcccccagctcctgtttgaccagtatgggccccagaagtttaaacaccacattggacccatccagtagagccagttcctccttcatgatattattttctgttagttgtacctctagtttctgcctccctgacacggatttactcaagtccttctgcagctgttgatatttctccacttctccctgtagcttcttctggattagctcagccatggcggggatgaaagtgttctcccttcagtactggtaaaccctatttttttaattttaaggaaatatagatgatttacaatgtcttgttagttttagatatacatcaaagtaattcagttgtttacacatataagtacctattcttttttagattcttttcccttataggttattacaaaatattgaatttagttccctattcaagaccatatgcttttgatgaatattaatgattatttcaagtcagaagaaataccattagtcattatagtcaagctttatgaacagtaaaaaagctttttcagtttggtctcagaagttagttcattttatccttcttcctttcttttcctccctttcctcccacctttccagtctttgaggaatttaatgggtctagttctaggaggtagacttgatatttaaatagccgtcttactttaagccattaggt

SEQ ID NO: 29922 - DNA, 1253 bp, Bovine  19866881843230
  misc_feature (1)..(1): n is a, c, g, or t
nggcaggaccctggtcattagattttccatgacacgtccctgggaagtaatttggccatgggtgtggcagcaggcttcccccacatgactgcttttctagaggccttcctgggctgggcccgagcgcgttcaccccacgggggatgtttttcagaacaagaacctggactggttcccccggatgcgggccatgtccctggtgagcagcgagggggaaggggagcagaacgagatccgcatcctccaggacaagctcagcgccaccatgaagctggtgtcccacctcaccgcccagctcagcgagctcaaggagcaggtgcgccccccacgtcctggcccccgctggcagccccggctgtggctgaggttccagcctgcctgcctgggggcggggagggtggtggggcctttctgcttcctctgcccccttcctgctggtcctcctcttgggtctggggtggaagacgggtcccttggagagctggatggaggagagacgaggcggcccctacccccatgccccggaagggcagacgggcagggctgagtgcgacctcgtgcacgtgtggggcctccctcgcgcgccccctcacctccaccctgcagctgctagactctggcccaggcgctgacgggttagggtgatggggaagttagggcctccttccgcttctcaacacgcgctgttgcccagagtgtcctctgcgccatctggcagtgactaaatacggtcagcagcccctcttttaggtggggcgctctcccagctgcaacaaatcagtggtttgcgacacgctaattgaggaccagggtttggggctgacggccctgctgcaccctgggggtccttggccagctgccagggccgaacggcagtgggggcagcagggagggtgggctctgggcggcctgacccaaccgctggcatctgtttaaacccagatgacggagcagaggaaacgcaggcagcgcctgggctttgtggatgtgcagaactgcatgagccgctgagccgccgtggcaggcccactggccacagggacgctggagtgctgaggctggggagactggccaccccttcaggctgggcgcccgcccaaccgccagaacccactcggccagaccccccaggccaggctggaggagaagctacagagcggacagccctgcccagaccaagcccctagaagactcagacgcttgacgggactcgctcaccctagtgccttaaaggaagtccatcctctcacagg

SEQ ID NO: 29923 - DNA, 747 bp, Bovine  19866881899741
  misc_feature (1)..(1): n is a, c, g, or t
nggtgatgaaggagaagaaagagatgcgccgcctcccccccgacttccctcactgccactcacaggtggggctcttctctgcagaggaccagctcagatgccccaaggctggacccgaatggggtgccacggggtgcctgggtgatgtgggctgtgcccaaaggagcaggaatgtgaggatgaaataaatgcacgcagctgccctgtttcaagcgtgaaggggcagggagaggccacgaagcaggggctgtgcaagcgtcagcccacggccatttctggcaggctccatgggctctggctcgttccagagtaggatctgtgtcaggccagtccccagagcgctttctagagagaggagctggggaagggggcaggttgaccactgccattaaactgtggttcgaaaggacatcgcaccatgtccacccctccccctctgcaggcaccatcaccgtgcacctccagaaggacagctgcggccgtctcagcctggttgccaaccccctgactgagaaccgggggcccttcacggtctccacggagtcggcagcggtggccatatggcagaccctccagcagaccactggcggtagcgccctccccctcgcccagtggcagcacccccagcgggcacactcgctcaaggagaggtgagaccacgtggcaggatgccggaagccaggctgcgcgtccctagcggggaccagcaccgttcacgcccgtgccaaggccaacggctcccctttg

SEQ ID NO: 29924 - DNA, 755 bp, Bovine  19866881959457
  misc_feature (1)..(1): n is a, c, g, or t
ntacacgctgcagaggagagcctccccctccggtcctgtctttccagcaatcggcaaaaccaagggggagatccacaacgatcagctgactgggtcaaatgcctgcccctggctgccagtttaatgaaccacctttctttctcaaggtctttataaatgattcgggggtgtcagtgggagtgactcaatgctgttctcaattccagcaagggactgctccttctaaaaattaccgcaaagatttattaagcctgggagcattctcaggcgacagaaggatgagggaccacgacagtggtcctgagtaatgtgcctgctgccaccatgatgcaccggttcactctaccagggacgcattcatcagcagctcgggaaccatcaactgagccatgagtccatctgcagccatgactccaactctgtgtgggccttctactcttcagaaccgtctccctaagtgatgacaagggatgacaactccaaaagagaaagctcaatcctccttttctggctcttcttaaacagtcaagtaggtgaatctcaccttcccagggtccaacctctggcagcttctctgctggctggtttcaccactcgaatttcatcagagttaattcaggtgcctgcccaactgtaacctccctggtggtaaggaccaggttctgtccctcttctgccattcctgcagttccccacagagtgagctctcaaattaattctcacctctcaggacacagaaatactcccatctcact

SEQ ID NO: 29925 - DNA, 730 bp, Bovine  19866882062387
  misc_feature (1)..(1): n is a, c, g, or t
ngagagcccctccttgtgacccgtgactcatcccacatttccggcgcacccataggtggggaacatgggacagacaaactatgcagcatccaaggctggagtgattgggctgacccagtctgcagcccgggaacttggacggttggtcagacgcctgggggcatgtgaaaagtcagaggaaggggtcagtgttcagtcctttctggagtcagcagacactctcctttccacagacacgggatccgctgtaacagtgtcctcccaggattcattagaacacccatgacccagaaagtgccacagaaagtgctggacaaggtaggagactgtgggtggagggcagaaccattcggagaccagcctctctgggcttcagagagaggatgctgggcccagtgcaaggcaaacagcagatagtcaacaactgcacagggaatgaagaccgccccccgcccccccccaaaatcacaccttttcctacagaaaacccacaaaagaaactttcactcacacatgagtgtttccttacaggttactggaatgatcccaatggcacatatggggaaccctgagggtgagcactgaatgaagataccaaagtctgtggtatctgagggggggggtctcaccaagattggtagtggggggttagggaggattctggtgggaggtgacagctactttgggtctggagtgaggattctgcccactcccctccactcccatagat

SEQ ID NO: 29926 - DNA, 2016 bp, Bovine  19866880391949
  misc_feature (1)..(1): n is a, c, g, or t
nagctcacatgagcatgtgtgtgatttgtcttgcttgtaggaaaccatagttatctgtgctctccaaataacgctggacctttagattcctcacatgggaaataaatctgtggttggcccaaaagggaatgcaaaaagctgaaacagaaatgaaagagtatgtatttttggctgggcaagaaattagaccccgtgctgaaagtttcaagtagcttctgccaacagggtactagtggaagtaaaactagcatttggtagtagcagatgggttacatctcacgtgccaattattcttcatggctgcctggtacactgtataagatagcttgtgagaacttctggggaaagaataactgcagtggcatgggagatatgagtgatggcacaagtgctgtgcatttacctctctgatctaggtctgaaagacaaacagagtgagtttcaggaatgggaagtgaagttgacaactggatagtaaatacatttaaggctgagagagaaatattactagatttaagtgaaatattccatcaagcctgttagcaaaccagtattatgtgcatatgtctatcttagcattaccgcattatagcaactcctttatttatgagtttgtctctctaactggaatagaagtttccagaaggaagacccactattaccctttgtgcattataaagtgttatgtatgttcagttcagttcagttcagtcgctcagtcgtgtccgactctttgtgaccccatgacttgcagcatgccaggcctccctgtccatcaccgtctcccggagttcactcaaactcatgtccatcgagtcggtgatgccatccagccatctcatcctctgtcatccccttttcctcttgcccccaatccctcccagcatcagagtcttttctaatgagtcaactcttcgcatgaggcggccaaagtactggactttcagctttggcatcagtcattccaaagaaaacccagggttgatctcctttagaatggactggttggatctccttgtggtccaagggactctcaagagtcttctccaacaccacagttcaaaagcatcaattcttcggcgctcagctttcttcacagttcaactctcacatccaaacatgaccactggaaaaaccatagccttgactagatgggccttttttggcaaagtaatgtctctgcttttcaatatgctatctagattagtcataacttttcttccaaggagtaagcatcttttaatctcatggctgaagtcaccatctgcagtgattttggagcccccaaaaataaatattttggaaagttatatatttattttaagtttagattatgattatatttaaataaagcattttgactatttttctgatattatcataaggcagaatgactgcaacaacatcttttgattccatctatttacaatgaagactttagcactcatttctttaacctcttatcttgactccaattatttgttaagaggagaatttagtattagatctgtgtttttaaatgactagtttttatattatataaattttcttttgtgcatattgtttcttcacatttgcattcattttttggaaacaatacttccatatttggcttcttaacacaacatcagccagaagaattctagtgtggtgatgggctgggtgcaccaggagagccagttagtacccccttgggatattttaagagaaaagcctgtaacaaggtactggaagacatatctctgtaggcagtctcctagatttccccctaataatgtgtgtgcctaactgaagagaagttactataacagatccttttatttcagtatttcagcatccctaattgtggtgtcagaaagaatcttagaagcacagagataaatgggagactaatgtgaagggaagctgattaaaaacattcagtgaattgagtttggaacgttttttatttgctacaaaagcacaaagtggcagactgacttccaggagcaaatccttgctcaaatataaactcaa

SEQ ID NO: 29927 - DNA, 1446 bp, Bovine  19866880478084
  misc_feature (1)..(1): n is a, c, g, or t
nttgatgaactccttttcctatttggaaccggtctgttgttccatgtccagttctaactgttgcttcctgacctgcatacaaatttctcaagaggcagatcaagtggtctggtattcccatctctttcagaattttccacaatttattgtgatccacacagtagatattaatgaatttaatgtcagaaaaatcttaaaactataagattcaaagaaagcaataattatacatcacagtgtatgtagaaaagacacctgaaaatattcaaaattcattctttaaggaaatattcagcaaagtaattttagaagggaacatcgttagcttctttaatttcttttttttttttttttttttacaggttttccatgacctaaagagaatattcaagtcaaaagagagaaatttaataaagaagtaacagaaaatccaaaaacccagttaggtgaaagtgttcaattttactaattgtttaagaacaataaattatttttataatggacatcactttacatgctgattcaataattggcaaatgtcgaaaagtctgacaatataattttggaaactatgtcatgagcaaggagcactcatgattttttgagagatatttaacaaaatataatacaatctaagatgatcaaactctgtaattcaggaattccctttattacttcttagaaaattacacttatgtgcacagagaaagttgcaatttgcagaattatgcctgtagacatgaaattagattccagatatataaataatagcttatctgcaaaacgataatacaccatttatgattaactatttagcaaaatacacaccaaaatcataaactttgaatttatggtagaagttaactttcagataagaaagaaggaaatgagattaggcagaaaattatggggacctcaattatctctgccacattttaattcttagaagacctgcaataaatatcacataacaacaagtgttggtagagccaagaatgtaaaggagtagttgttatgttattcattaatctttactacatcatttgaaatatttcacaataaagaatttttattttaataaaaatgtttatttgtatgaatgttatatatactcagggggtggagtaaggtatcttccagaaaatggtgcttgtaaacatttgcactgacagattgctattttggagaaatcctagtggatagctacttcaatgccaaaaatagcactagcagatgtatctacagctggaccaaaaaagctacacatgtggtacagtcacatttggcaatgagaaagaacttttggagtctgcattggctccctttttctgtttgtttattttaattcttttttttttttttctggttgggtaacaaggcagagaaaccctagagtcctctcccaatatggagcatgtacagagaagacagcaatgagagtgagga

SEQ ID NO: 29928 - DNA, 3190 bp, Bovine  19866880552479
  misc_feature (1)..(1): n is a, c, g, or t
ncagagacatactttgctgacaaggtccatatagtaaaagctacggtttttccagtagtcatgtatggatgtgagaggtggaccatgaagaaggctgagtgttcaattgatgcttttgaactgtggtgttggagaagactcttgagagtcccttgaactgcaaggagatccaaccagtcaatcctaaaggaaatcaaccctgaatattcattggaaggactgacacagaagctgaagctccaatactttggccacctgatatgaagagccaactcattggaaataagaccctgattctgggaaagactgaaggtaaaaggagaatggggtgacagaggatgagatggttagatagcatcactgactcaatggacatgagtttgtacaaacttcaggagatggtgaaggacagggaagtctgtcgtgctgcagcctaatggggttgtaaagaatcagacatgattgagcgactgaacaacaacaacaaattagaatgaagaaaaaacccgttgttaaattcaaatggcaaaaatcattctttgaaagagaagatagtataaacattcgtaacttggatcccaaacctaaagttatattcaccaagactgaaagcatgtgggagacattgttgaaggaatagtaaaggtatgttaaatttgataattgattattcacttcactttgataattagaaaatgtaaatctgaagaaaaatttagtaactagataattactagtgaaactaaaaacagggtagacaccttctgaatctgggagaatttaaattttatgaaccctatcagtgtagcacaaaaaggagaaaaacaaggaaacgttttaaatgctttgattaagataaaagaagttaggactaaatatatcagtaacgacaaaataccataaatgtgctcatgttccctattaaaaaaacaaaactcccacattgggttaaaatgcatcaatacacttcttgtaaagagatacatctaaagcaaaaaaacataaaattttatcttatcctttatcaagcatagagaaattaaaagtaagatatgataacttggggcaaactaaccttccaacatgccaaaagcataaagtggaataaagaaggtcattttttatttagtaaaaagtacactcaattttgaaatctaatggtcataaaaatttatttgtctgataatagaatcaaaatttatactgtgaaaaacggtatagtgttagtagtagtagcagtgttagtcactcagtcatgcccgactctttgcgaccccatggactacagcccaccagacccctctgtccatgggattctccaggcaaggatacaggagtgggtttccatttccttctccaggaaatctatccaacacaggaatcaaacctgggtctccctgcactgcaggcagattctttaccaactgagccatcagtgaacagccggtgaaaaactgtatagatgtagtatattctgagaataaatatatataagaaacttacagaaagacagttattgagaggctttaaaatatttggagcttccctggtggctcagagggtaaagcatctgcctgcaatgcaggagacccgggtttgatccctgggttgggaagatcccctggagaaggaaatggcagcccactccagtattcttgcctggagaatcgcatggatggaggagcctggtgggctacagtccatggggtcgagaagagtctaacatgactgagcaacttcgctttcacttttcactttcatgcattggagaaggaaatggcaacccactccagtgttcttgcctgaagaatcccagggacgggggagcctggtgggctgccatctatggggtcgcacagagtcggacatgactgaagcgacttagcaacagcagcagcagcagggggaataaagtcagagaccttctattctgccatcttgctgacatcaccctaattgcagttttcaacttttaatagtgttttcttccaccagtgtaattgcttgatgctggtttgtgtgatgtttgaatatataattttaccataagtttgaatatatttcctcaacaatttaacattttaatcactgacatgagttataaatgtatagtacaataaaatagaataagatgaatcttgacaactaaaaaaattatcactgtaacattataatcaaagagaccataaagtttcttagagaaatggtatactcattaaaagctcttaattaactagcttccttcaggtgacattcttgcacactaatttagaacagtatacaaatgacaaagatgccactggaacactgggaaggttatctgatgaatgcccaaccaaataaagtactgtatgaatcatttaattggatatgttgcacaaacaactaagttttttgtttttttttccccactttttgttgtcaggtacagaggtgacttttcttgctgttctgttattattttaatagtgtatggaaggatcgatttaaaattgaacagtcacctctaaaatgctaattccccttagtcctcaaagcaattttgaatgtgagaaattacattatttttctctgtttgtcatttattttattcattgcttttcacctcatttttaaaaataatgtatctagtcattacatcttgcttctgaaatataattgtttacaaatctgattaatttcaaaaatattattaaaaaagaggatgaaaaaatatggtgataattggcagaaatttctttttaagtggcaatagctgatttgaaatgatagtacagtgtgcagagacaagatttatttgttctgaatatgatttccatcaagttaatatataactaagtaagtaacatctacttcatcagtcccagcaaggataaaagttgtgtctaagaggtttttttttcctacagaaaaatcttattttctatcaaattacattaaaaatcagtcctttcactccaagtaactgtctctgatagactgaattaaatattatgatattaaaaatcagtatcatattatattagatttggaaatgttaaataaaatacatagtttccctttatttaaaagataaacatgctatagtaagtatccctgatgattttgagacaggagatagagggaccccaggttaagcagctggagttcattcccaagaacagaaacttcaaaatatcaatatcaggat

SEQ ID NO: 29929 - DNA, 2660 bp, Bovine  19866880628714
  misc_feature (1)..(1): n is a, c, g, or t
ncctttgactgtgtagatcacaacaaactgtgaaaagttcttaaagagacgggaataccagaccacctgacctgcctcctgagaaatctgtatgcaggtcaagaagcaacagttagaagaggagatggaacatccgactggttccaaattgggaaaggagtatgtcaaggctgtatattgtcactctgcttatttaacttatatgcagagtacatcattcaaaatgctgggctgggtgaagcacaagttggaatcaagattgcggggatggacaaggagacaacccggggcctcaggctgctgagcagggtacagacacagctgtgccttcggattcaggcaagaagcttcctgaagtggacattgattgattccaacaattgtttatattaaaacagactattataaagctaaaaaaaaaaagattgcagggagaaatatcaacaacctcagatacacaggtgacaccacccttatggcagaaagtgaagaagaactaaagagcctcttgacgaaagtgaaagaggagactgaaaaagttggcttagagctcaacattcagaaaactaagatcatggcatctgatcccatcacttcatggcaagtagatggagaaacagtggaaacagtgaatgactttatttttttggactccaaaatcactgcagatggtgattgcagccatgaaattagaagacacttactccttggaaggaaagtcatgactagcctagacagcatgttgaaaagcagagacgaacaaaggtctgtctagtcagggctatggtttttccagtggtcatcatggatgtgagagttggactataaagaaagctgaacgccgaagaattgatgcttttgaactctggtgttgggagaagactcttggagagtcccttggcctgcaaggagatcctacccagtccttgctaaaggagatcagtcctgaatattcatgggaaggactggtgctgaagctaaaactccaaatattttggccacctgatgggaagaactgacttcattggaaaggaccctgatgctgggaaagactgaaggcaggaggagaagtggacgacagttgatgagatgattggatggcatcaccaatttggacatgagtttgagcaagttttgggagctcatgatggacagagaagcctgatgggctacagttcatggggccataaagagttagacatgattgagagactgaactgaactgacaacaattcttctcaacgttgcctggatttcctacatcagggaaagacattcctctcgatctttctggttatataaaaaatctgcttttcgtccttccttctttccatccttccctctcccttaagcacaacaaaaccttcatctagtcaaacaccatatcctgttggttctctcttcttaacatctgctaaggctcttgcaaattgggctgctctcatttcttatttgtattatttttgtagtataattattaatatcatgtctttccaacccaagcttccacattacaatctccacaatccagccaaactgagatttatgaaacaaaaatctaactgcttcatattcatgtcaccatagcttatgaacaaatcccaatgtgctttttgacataccacattaaacaagtcatgatgaatacactttatcaccctagcttcatctctcagcctcttccccttcagttctgctgaactttctggaatccttcagatgcatattctgcatctttgcaaataatttttctttttgaataaatccatcataattccttcttcatcagaataatccaattcattcttatgatctcagtagatgtcatttcctcctagaagagtttttgaaacttttcaaactagtttaagtgcccattctgtgcaagttattgtttattctttcatcttctcttcaagaccacactttccttgtggggtgggactgtgtcttcagaactatgtgtgtatccttatttctctaggaagagtgcgatttaaaaaaaaaaagctgttgagtgaatgaaaaatgattacattaattaattcttgctggatagtgagtaagcaataaaccaatccaaatatgggggagaaaacattttaaagtaatatttggcataaggggagtgcgaaatgaaaacaaggatgtgatcataaatcttatactaactgaatcaaaccattagcgttctcacttgccaccagccaaaatacacagcaacagccacagctgccttttctttgaaatacaaaaataagaacagttttcactgcactggtttactgtactaacaattatcaataattgggaatatcaggttataaacaagcaagctaggtgattatattaaaacacataaacaaatcttaaagcaagataacagttgaattaaaaacattccttagtatagtgagtctggacagccaggaactgagtagggtccttggctaaggtgtttagatctgagtagtttatgcctaaaaggatactgtataaggaaacactataagacctaagttcctttcaggataatagggatcttatcagggctctgaaactctctgctcacatgatgttaactaagtcattctcattttttaggttagtaataacatcccttcttccaattacctaaggatgttgggaagtttcaagtg

SEQ ID NO: 29930 - DNA, 1381 bp, Bovine  19866880858250
  misc_feature (1)..(1): n is a, c, g, or t
nttgagaaattaaggggaaaactaccatatgatgatctctatcgatacagaaaatatttttgatgtttaaatacctgttcactgtaataatgattaactcttagcaaactagaaatagaaaaattttagcctgataggaattatctattaaagaccttcaataaacataaaagtttgataaaattatagacatgtttttttttaattgaaacaagacaaagatacctgctattaccacttcttcccagcattgtactggagatcctttctatgcagttaaaaaaaacaaaaacaaaaaacggtatggattagggactaatatagtggtccagtggctaaaacttagagcttccaatgcagggggcctgggttcaatacctggtcaggggactagatcacacatgctgaaacttagagtttggaaactgcaactaagagttcacatgctgcaacatgtgtgccacaattcagacccagtatagccaaattttaaaatatatatatatatttttttaaacacgataaaaaaatatggattagaaagaagtaaataaagctcattctttttaagtgatgttattgtaaatacatggataaggcaatgacaccccactccagtacttttgcctgggaaatcccatggaccgaggagcctggtgggctgcagtctatggggtcacgaagagtcagacacaagggagcgacttcactttcacttttcactttcatgcattggaaaaagaaatggcaattcactccagtgttcttgcctggagaatcccagggacagcgaaagcctggtgggctgccgtctatggggtagcacagagttggacacgactgaagcgacttagcaacagcagaagcagcagcagggaaattgctccatcaattacacattctttttacagacttttcaatcatttgcctctcacttgacttcttcctttttgctttcaaaatgtgttttttctaaagttgaaaacaattcaaaccagtcaactaaacaagcaataaacaagcaacaagaagaagtaactctttatttcatcctgtgattctctttattttctttcatggccaaattgtagaatgtgttgaattttgagctttgtcgtctgtataattttgttcatggctaatttaatagtcagcatccagaatccgcctgcagtgcaggagaccccagttctattcctaggccggtaagatcccctggagaagggataggctacccattccaatattcttggacttccctggtggttcagctggtaaagaatctgcctacagtgcaggagatctaggtttgatccctggattgggaagataccctggagaagggaacagctactcactgagcaactttcactttctagaa

SEQ ID NO: 29931 - DNA, 1307 bp, Bovine  19866880885133
  misc_feature (1)..(1): n is a, c, g, or t
ncaatgtaaaggtagtattagatacatttaataagtttagtaataaaaatacagaacttaagaatcaaaagtctctgattaaaattggtcctcagttcttcctgaataaacgtaaacatctagaagagcttttagataattgtaagacttggccattggcctcccttctctcctccagaaattgggatttaaatagttgagcctttttcagtgttctccacaggcctttatactatgcacccaagtttgagaacaactgccttcagacattgctccacaactctgaattgtgttatttctcctcaatattttaacctctgtcaaattcgatctgagcatctatgccaggttggagataattttcatagaatttttcacactttgctatagcactatgcttcttatatgaatctgtctctaggattcttgtaagcatatggtacataagacagatgaacagaaatactccttgatttctatggaaatttagagattctgaaaatatatcatttatgacatataatatattaagaattccctcaacttataaatactagtgatttgtgatcctgttggacttcatttattttgcaaatgtttagctattcctttccatgattcagatgtgacttcaaactctgcttgaagggaagaaaatgcatagctgcagtgttttattgcagtaacaaagccattcaacagagtgattgcctttctgtattacttattattatatactactatatatacatatatatatatgaattttctgctattgaataagaaaacatctttcttttgttgtgtgttcccacatatcatgtatcctgataataataaatctgtttctctcaatattcttctgtgaattgatttagttttatgtagcaggacatttaaacagcctttttaattcagatagcatgtatcattaaaattgtaattgaaataacaagtccgtgagaccccttaagatttcaacaccatgtttacagggtacagagctatcaaattaagactgaaaatttttctttttccttggggatgctgtttgcaaatgtaaattttcatgtcagtatttaaacatattggtgttaataaaaatgaaaaagctgattttttctattaactattatgcctattcataaagctgtaaacaattatttatgtgacacacccatgtgaattgtcaagtgcaataacccttccaaaactggggtttgaaactgccaggagttccttgaaatggcaaagtgtttttaagcaaacagagccactaaaagagaagacatattttaataaactat

SEQ ID NO: 29932 - DNA, 1547 bp, Bovine  19866880902765
  misc_feature (1)..(1): n is a, c, g, or t
nattccaactgtaggtcatcatactatattcttggacatgctcattttaagtagtaggcagataacgactttccaacataaccaaatacacaagactgcagaaaatgcaagagtcccatgtgcccatatcagtcatgaacaatcatggagtaaggaagaaaatacagtaaaattaatcttgcttagatttccataatttcccttaaaaagacaagcagattatgcagtattttatagtagttttaaattttgacaatgcattctcatttcctcaaaatgtgctgagcaggattattccttttaatagttaataaagaatgagacccttaaatttgtgaacttccttcatagaaaacattcattatagtgagaatgaaactgctttttgttctgcttcacacctccctaattatggaataaaactctgaaatagtctggacccctgtggtaaataacaaagttttagaagtgaagtgaaaacgatgaaaacatttcactccccaaattctgtcagggaacactgggaggatattcacaactaacaaaatgtgtgcatgtttgccaaggttgacattattctgctggtgttttcatagactcataaaatcacatttttaacttgttgacactgattgtccggtctcctacagacatttaataaaaacaaaacatttaaaagcatcggtgtgttcaggtaattctatacattacattcatctttgttaagggtttttcatagagcaatttcaaacttaaggttcatcaaaccaaccatgtgtattttaaatattttacaggtagatggcctcctgtatttataatagttgttggcagacttgcagttcacaacagatgtgggtgataagtgttatgctgacacatgcaatcaatctgcgaaacagtggtgcaaggacaaagggacatgcagtaagtacttggcaatcatggaaaaactattttatcttttagattttgtcacttccttctgctgggaggtaaattggagaataatgatgtgtatggaatggccactaaccttcactgaaatccagttaccaagaattaggataggagtccaggaagttatgctaaggtgtgcaattacatgtgcatatattattatgctcattaatattgactcctcccttttctctgccttattgccaagcctctccacattcttctcctctgtgctaatattttcttttttagtatgcttggcatcctttctggtttgggacatcacagttgcatttagatttccaactacctctcataaaaatgcaaactatcttcttaagaaagtccttaatataatgtacatgtatatacacattcatgtgtgatacaatgtgaataacacttaaagatttgcattcatattttggttgtttaaaatatatatctacagattctttgatgctctcctttttaagcactcttcataattcccctccccttaaatgtagactatgtttaatgattctctcttaacaagtagaatgcagaagaagagagaatgtgtgatgttcaagtttaagacacaa

SEQ ID NO: 29933 - DNA, 1609 bp, Bovine  19866880945674
  misc_feature (1)..(1): n is a, c, g, or t
ntttcttatctattcatctgctgatggacatcccagggtgcttcccatgtcctggctattataaacagtgctgcgatgaacattgggggtacatgtgtctctttcaattctggtttccttggtgtgtatgcccagcagtgggattgctgggtcgtatggcagttctatttccagttttttaaggaatctccacactgttctctagaggatacttgtaagagtggcaagtgggcatgcaaaggagctgtgccccaaggatttagtgggttacaattttatagtaaaaggaaagttcaggagaggaaaagttacccttctttgagtagatgtcaggcttacatcacttttctttcacctatatctagtgcttttattcatggctttatagttaagcatgtttactttgttccatgatattctgatagctttcttgagtgatcattaacttatacagtggcctcccaattttcttaggtttctctatctacggtcttctacttcccagggaattcagtggtaaagaatccaccagctaagcaggagacacaggtttgatcccctgggttgagaagatcccctggagaaggaaatagcaacccactccagtattcttgccaggaaaatcccatggccagagaagcctggtgggctacaatgcatggggttgcaaagaattggacatgacttagcgactaaaacaacagcaactgtgacttctacagttacccgtttgactatcctgtgtgctagtgtgctaagtcgcttcagtctcttatgtctcctgaactggcaggctggtactttaccactatcacaacttttctatccctttcacaagggagcccaaaatcaaatagcaaacaaacaaaaacaccaaaaaacacactgtgacagggcaagagagagactgttgcccttgaacaaagaactctgcattcccctttgcactgggatctcactgctaaagtcaattcagtcgtgtccgattctttgcaaccttatgaaccatagtccaccaggcttctctgtccatgggattctctaggctagaatactggagtgggttgccatgctctcctccaagggatcttcccaacccaggaattgaacctgagtctcctgcaatagtaggtgggttctttaccactaatgccacctgggaagccctcatattgtgtagccaggacaattatatttatagagattatgtgaaaatgaaaagagttaataaaaataaagtactgagaatagtgtttggcatttaaccttcaataaatattaattattgctattgatattgtcatcattaaagcaaaagtttgattggaattttcacagaccccacttgttggcattatataggctgcctttttccccttgggttgctttaaataaaggaactcattataaatctgagagaagggatttagattgcaaaaggaattttactttttcttcaatatccaactgtcaggccagctgttttagttgaggctaccaatgggaagctacttaatgaggttgcttatggtttaatgatttgtgtggcataaattatttgtcttaatgttattcctggggcagtttccaatgtttcagaggatacacg

SEQ ID NO: 29934 - DNA, 1280 bp, Bovine  19866881119834
  misc_feature (1)..(1): n is a, c, g, or t
ncataaatgaataaacatggtatgttctgataaacccatccacaaaaaaccaaagtggtagagatacttggctggaagctgtagtttgctggcccctggtctagagcatacctatctaggttatctggctctcattctatgggagctattttacaactctttaaattgtagataacttgtagcaatgaaaaataattcttatatgtatatctgaaaaaaatcctgtccagtaaagagatgaataacatttctccaccctcaacagctctaccaccctcctccaaaggaataaaaaaagtttttcctctatttgaatattaatttccataattttgatcaatgaatgtgtctgtttttggattttccttcgaactggttctaataccttacagatttcttcaccgatgagataaaatctgtatacctgttcatttttatatctacacaaaagtcatgattttatttttaaaatcaacacacctgcaatgtgctgttgtattgtaactaagatctatctaaactactcatcccactgttcttgatatgtagcctattgctgctgctactgctaagtcgcttcagtcgtgtccaactctgtgcgaccccatagacagcagcccaccaggctcccccgtccctgggattctccaggcaagaacactggagtgggttgccatttcctgctccaatgcatgaaagtgaaaagtgaaagtgaagtcactcagtcatgtccgactctcagtgaccccatggactgcagcccaccaggctcctccgtccatgggattttccaggcaagagtactggagtggggtgccattgccttctccagatatgtagcctagagtaatataatttcaaatagtttccttgttgccattttataaattctcttgtaaatcgtaaactcacagcttaacttttctaagaaacacctgtatttttttaatcgtgccatgtgtccaatcccaaacccttaatctttgtttaggtattcaagcatcatccttttagttaaaacatcttacaccttttccctaaacattccattcaagccaagctaaaatgctactattctgagaaaacacactctcttcttttttcattccaaatacatttgttcaaaaggtattcactgatagcttcttgtctatcaggcacagagggaggacctggaagtaataaacaagaagccactgactgccttcacaaagtggatagtttttccgggagaaaatcaaggaaaacaatacaatgtgtagaatactactggctctatt

SEQ ID NO: 29935 - DNA, 1208 bp, Bovine  19866881289608
  misc_feature (1)..(1): n is a, c, g, or t
ngacacttcccaaggcatctgtctcaacccctcaaagaattggaaagtgacgggcctttgtctccagagcagttcaaggccacaggggaccagatcaaatcaacctcatttttgagaccatttcaggcgctttagaagtgctttggacttcttctcttgtctcctctaacgttgcttttgaatattccagctcttaaaaaaaaaaataaagaagagcaattaaatgtttgggaagtctctggagatccagtggttaggactcagggctctcactgctaggacccgtttcttccctttcagggaactaagatcccacaagctgctcggtggggccaaaaaaataaaaagcaatggaatgttccagcgcctcataaatatctgttttgcctttatttccatccccttataaactaaccttcaccctgtctttagaatttctcccaaatttcttgcaggttctaacagctacataaaggcttgggtgtcagcagacagtgaaaggcaaagaaagggctgctcaagggctgaggctggtacggggagggggtctctactggacgcacctgtaaaattgtacatcgttgacgctttcacctctgggactaaccagtgaccaggatcgccttgcttcccttggtggctcagtgcataaagaatccgcctgccaaccaggagacatagatttgatccctgggttgggaagatcccctggaagaggaaatggcaacccactgcagtattctttcctgggaaatcccatgaacagaggagccttgtgagctacagtccatgtggtcgcaaagagtcagacacgactgagtaactaaaccaccaccaccaagaagattgccttaacattctccttagcttacttcttgctgacttcaggctcctgacctcctttttctcatagcatttcctggagaacattgcagttgttcattctgtcttgcccctttgggatgtaaatcttctacaacccagcaatgtctttcacaaggacctgggagccatcccttggaatacaattattaagaaagctagtgccccatctactggtctctgtgggcgggtatgagcctaagtgccatcagcaacaatcggccagcacagatgcttcatcacatgagccaaactccttaataatgtccttcagtatttttccaccagcttactcctgtgcttaaaacatcccttgtgtttcagtg

SEQ ID NO: 29936 - DNA, 990 bp, Bovine  19866881499802
  misc_feature (1)..(1): n is a, c, g, or t
naactggaggaacacagcccagctacaaaattgccacttactaaactcctccatcaattcacttctgtgtctttgaaaagagtaatttcatagcctttttctctacagctttaatgccctttgtaagataaataccctcctaaatggtcacatctgctttcttttggcccacaaaatgcttagtcaaagaaataagccaccatagctactttcctcactgacattaaatcaaattttgtggcaaaggaacattgaagatcaaactgtgtgtgctattcatacaacttgcattacttcaaaactcattttatttccccaaggtccttaagagcagttactttctcatatatttatttattcattcatttatttttaattcattcaacaaatatatattagatgcttactatatgccagggatcatgttaaatgttgtagatacaaagattaataagtcacaatagatgctcttaaagagtttgcagtatattatgatggcaaatataaagaatgacgaacacattgcaattacagggatgagggtagaaggtggtagcaggaaggaaaaaaaagtgtaattaatgctagtaggatgtgaggatacaagacatgatttatagatatcctctcaagtatggtttgaatgatgaatttttaaggcagactaggatgggaggaaatgttactattaacagatgaatattacacatagggaaagaactagaagaagacatatcacttacaagtgttgataaataaggttggagagatgaaccggtgaaaaacttcataataagtaaatttaaggaatttggacattgtcttagaggacatggaaaactattagggaggttttattaactgtggaaagggagatgaataaaataatctaatttgcatttttaaaagattgttctcattgcaatatgaacattgtgaccaattctagatttagcaagaacacagaccaacgtcttacatacagtggga

SEQ ID NO: 29937 - DNA, 1143 bp, Bovine  19866881535174
  misc_feature (1)..(1): n is a, c, g, or t
ngtagacacagaccaatttgcaaatcttatttaggtcattaacatgcaccagtgagagaaaacaaacatcagccttcccctggacatctctttttttgtttgcccatgctaatttgcataaatacataaaaatcccatgtgttcctcagtgtattcagtactcaattctcattaacttcagtaaatattcccacactgtggacagattgactccccacctttgaccaggactaacccaggggcacatcatcccttagacatctatttctggatacattaaattagagaatacatcagacacatgaaggactttatgaaccttcatttacagattgggaaattgggacagatgagttaagtaaattgccccaagtcacagtcctagaatctgcgcatccagaataaccaagtaagaatgtgctcctatgacaatggcactaaggacaagcattataatacatattgtcttagagctgacatgctccacctgcctccatttttctttgctgcactgtggctagacctgcagtcaactcaaggcctaagtgggagggtatctacttccaagctgactcttgtggctgtgggcaggactgttgcagacctaagatttttgtcagatctttgcctgtgggcttcaacatgtggttgatctcaatatgtcagctggtttcccccagaacaaaggatttaagagagagcaagggagggcctaaacttggtcactgaagtgccattctatcacctctactgtatactagtatgctattgaatccagcttgttcttaaagggatggggatcatacttgggtgttaacaccaggagctaggcatctgagggggcatcttggagacaatctaccataatggcccttgccctctgagcagccccctcatcccatcatgctctccctgacccatgctgtatccacttgctttcaggcaaatagtggcacagtatttgacacagtagacacagcagggtctttgaatcatagatccataactgagcatgaataagaactagctgcagcctgcctcagagctgcaggtattatccaatgcaattatgtaaatctcagcacttttcatactgaccacatcccagaaattgccatctggggctgggtgactttgcacaga

SEQ ID NO: 29938 - DNA, 1154 bp, Bovine  19866880395269
  misc_feature (1)..(1): n is a, c, g, or t
ntgttgtcatcttaaaccacctaaactttagcagtgcaggcagaattccttttcttcaggacttattctggatctgccttgcaaatagtttcatggggagaagtcattgatgctaagatggtaaaaggtgccagcaagtctaattgtgatagatgaagcatggtttcaggtaaagatttatcctcatttcagaacttcatattctagctgacattattccttgagcatacaaacctgggtcacaggtctcctaaactatctctaaaacattattgtcataagaaaaatgtacccaccaaggtgttgtcagttaagggacagcttgagtggaggtgtctgtcaaaggaaatatgaggcacaaagaaagaatgagtcatcattttgtgcccacttgaaatgcctttcttgatagttaaagtccatgtaggaggtagtccttgaaaggaatcacactgaaacagaagtcctcttatagcctaattcttgcctggggagatgcaaggaggaaaccattcatcagtattaactgtttctaacaccagagctggcacgaaagtaagcacaggaggagaaaaatcatcctgaattacggatattatgtgctagtttcatggcaccaggtgggaacgttaacacttaatcagtctctctggcattatttcccatccgtactgccaactttatcaccatgaaagatgctttgatcctcgtccgtggtgtcaagaacaacaggccacagcatcagtgacattccaatcagtggggtatcatttcacattagttgttatcagatatgatatttcactaatgcattttgacaacatgtggcacaataccaggtgcctctctagtagatatagagagagagacgtagtcctagatacaaatctcctaacatggagattaaccacaaagcacttttttctcactgttctagactttggaaacagaagacagtattctcttaaaatgtggggaagctctttcctcgatagggcttaatgctcttttacggaaaatgaaattcctcagttttgcacacaatagttacctcatgttaaaacaatactaacaatgaaatcctaagaattagaaaatgttaatatttcacacaagtactggtgtgaacaacaccttatataataataaaagct

SEQ ID NO: 29939 - DNA, 1408 bp, Bovine  19866880625920
  misc_feature (1)..(1): n is a, c, g, or t
ntatactgataccaaatagccaaagaaatttatttattttgaccaaaaattattaatgtcttcttgaactgtaaatgttcaaggctttcccactgtgctggttatttctcgtgggcaagccctgacaactaaagagccatttgctcattgtggagacaaagtgctgaatctgaagtgctgactcagctgggcaggaggtggtaagattaatggacaccaacctagagggaaaagcggtctgtgagtgtaaagggccttggtgggagaaacatttccccagtgaaagagagaacacacacttcgtccttccattcactccatggccagacatcctgtggaacatgtctgagtcccatgcagtggtcctattgcaaatttatatctctattcagtagtgattgaatcaaggccaactcatcacacattctatcgtaaactttaactgctgtgatacatccttttcaaagagggtcaattgtattttcatcaataacacatgcattctacttgaaataacaagcataattgtaacagcatctatcaagctacataagaaaacaagatatgcccaaggctatttttaaagcacaacttatatactaaaggagatagtaaaatagtgaatagctatgcaatagaatgatataacaacagattaaaaggaataaatggcgtatcacctagttacttttggctctttaacatttagttaacttttgtttagtgtgagagaatgggcaggcaagtgtcttcctatgtcagacaaaatatgctccatgtttaacacaagtatttaattgtactgcagccagaagaaatctgacatttttcactttcgtatttactgttagtccaggatgtttgacactctaatgtatcccatgaatagatttccatagagtgacagttataaaacaacagtaaattgattcaaaccatgtttagctaacagacaatttgtcaatatgggtggttcagtttcaaggcttgacttaattcgtttggtaggttaaaaacattagttttggagaaacaaaatatgatttatttattttgtaaatatttactggtatctgctctgcatcaggtgctctttccagctactggggatctagtatcaatgactaatcaagtgtagaacagtggtaatgccgagagggggaaaatggagggttggacaattcaaggtgaagttagatgtaatagaaagttaccattctctattcttccagaaaacaaacaagtcacgattacaatttttgtttcttctacctgactgcacttttgtgttttgcccttttcctttgtaaattcagtgttccacggataatgtaatggagaccaaagaggaatgaaccggaagagctagaaatttggtttcatctctcatactaattaaccttgtgac

SEQ ID NO: 29940 - DNA, 1070 bp, Bovine  19866880629608
  misc_feature (1)..(1): n is a, c, g, or t
ntataatacattgatatttctactacattttatttattatcttgatcagttctacaaaatgaacaatacatttggttcttgctctcatgggtacacatgtgttttacaaggacactggtgatatattttgctatacaaatcacaagaagtagtttacacacagagctcatgtttttatacatttctccccaaagggtattcatatttgataaatcactgattgaaatctgaggcaattaagttgtgatgaccttggcatactagtgaatgtaatttccattaagacagtgtcagtcctttattatggtctgcctgagtttaaaaaaaaaagccaagttcggttcacggcacatttaatttcttatccttcaaatacacacagtattttaattcacactgatcaaaatctacctggcagccccttattaggccaagttgaatgccttgcttagaatttccattttttaattgatataaaagctgttaatctcccaaaagggaaaacaagtatctaacattgcattgatatttatttcttttagtctcatgttagaatcatgaatagaaatttctgctatattctacattgctgtaatacaatattttaaaatattttggttataaaacactttaacaatatccaagtttatggccattcacttccatgttttattcctactctcttttctcctcagaggtagcatttttcattagctcttatgtttttatacaaccctttccactcatttctatacacaacttacagaatattgaatggaactttttctgttatcttttatctagggtaatcttagacacagaacatagtatttactcttgataatctgggcttcctggaaatcctgtgacccatctaatgacccttattaaattattttcctgcttataaattcagaatatattctgttattggtaagaacccagaatggcataggattttcttgactcttcctctgaagatgatctggatactaagtccctgaatttctgattattattaaattagcccaatgctaactgagcatacgcttttatgttgctgttctttc

SEQ ID NO: 29941 - DNA, 1922 bp, Bovine  19866880654401
  misc_feature (1)..(1): n is a, c, g, or t
nattgacttccttaactccttaatagttctgttacttttttactttatactcactagtgagttgcaggagattgtctaggtacacaaaggagatgaatatcagtagcagtatcagtttaaaagggcacatcacgtttttactctgtggtttagcaacttctgatccagttcatctatctcttccttctttcttcctcatgctaagagaaacagattttcctatttcttttcatgactaatatctctcactgattacattccttcttaccattactagaatcctcaaaaccctgctgaccttgccattacgttgctaatccatattcttctgaccttcaatggcaagctttcgcaaaggggaaagtcatgattaagaaggtaggcacggctggggccttcctggcggctcagtggtaaagaatccacctgccaatgcaggttacacaggtttgatccctggtgctggaagatcccacacaccatggagcaactaaatctgtgcaccacagctaatgagcctgtgttgtaaaggagccacagctcctgaagcttgtgtgcccaagagcctgtgctctgcaacaagagaaaccaccagtactaagaaaccttcatactacaactacagagtagcccctgcttgctgcaactagagaaaagcccgcacagcagcaaagacccagcatagccaaaaattaataaataattaatcaagttaaaagaggaatgtaggcactgctgtcagattactcaagttcaaattgtgattttgcaacatctgcgtggacttatgttacttaacatgcttttctcagtctctcactgaaaaactaggaaaataagagtttctactttataggattttttcttaatgaagattgaattaaataatgtacagaagacaattagcacagtgcctgccatctgccatagtgtgcactttaacatttgcaatccaatctctgtccccaaatttcactctaagctgtctcaagtagtagcttacctttccaactactaaaactagtagcttctatattgtgatcgacatctgtgaaacctctagtagtttaatcctctgctcatcccttgctttttcttatatctttttacacttaaaaagtatctaaaagtaccaatttggataatgaccaatctagctgttatgaaggagaaaaatgtgggccatgcctggatcacaccctcaaggaacttagagtatagtagggaagattaaatgcatataaaatatcattctaatgtaaattagaatagagaggcaccagaagagatgccaataactgataatgtagtgctatgggagttcagatgaaagcacaattactgctagctgggaagaattaaagaaaattaatggaggtgctggcatttaatctggaccttgcaggatggaagacatttagatatataaatattgaataagcatattttaggtgaaggtcaccaaatttgcaaaacttcctggagaaaggaaaccatggaatttatttttgattatgattagaaatttgtataaaggctacaggtgtttaaggtcttaatttccaggctaaaagtctgatttttcctgtattatggggagccattaaagcttttagaacaagtaagcaacatgatcaaaactgtatttaataggattaattccactatgatttcattacagttcagcagacatggataagaccaagtacctgcttttgacgagttacagcatggggtaagagcagtgacagagctataaacagatcccttgggggtccaagggggctggcttactccacttgaaaaataaaaaagttgctgcaaaaggtgacacatgaactaatttttgatagataagaaatgaataggcgaagaaggaacacataatttcccataagtgaaaataactaacatgtttgaaa

SEQ ID NO: 29942 - DNA, 728 bp, Bovine  19866880728974
  misc_feature (1)..(1): n is a, c, g, or t
ncttaaagaaacccataaagtcaggaaggtccagggatctctggggagacccagggactcttggaggcaaagtcaaaatctattccttacaatgagaactgagcaagatgtgttcttttaaattatcttttattgatattattaaaagggtacattatcaggtgtgaaaaaggaaaataagacaaaaagaaacaccacatcttgaacaaattctttctttattgtcatgttaagagctgagagaagttattccaagtaactgttgaccagcaaatcaaaaggatattctttcaagttactttgagagtatttgttttataataatataagatgttaaaatgatataatttcaactggtggaatcaaggtttagcaatccagaaacaaaatattcaaaggcaagatgttggaagcaaggagagtgtggattgtgttcccatgtggtttcatttgacaggtacgatgtgttctccttgctcaacattgatttcccaattgacatgtctttcagttgaggaaaaaagtgttctaggtatgaaaagtggagttgtgggaggcataaaaatgtagagacaaatggtgtgaatggctaagagttcagggttgaaacaggtgttgaatccattctttagattattacacatatatttcttttaccttttgcttaagatcagccatgcaaagaagaaaatcagaattaaatttccaaaaagaaaacagatacacaa

SEQ ID NO: 29943 - DNA, 2140 bp, Bovine  19866880760426
  misc_feature (1)..(1): n is a, c, g, or t
nactctcctctttactttataaaaggctctttagttcttctttgctttctgccataagtgtcgtgtcatctgcatatctgaggttgctctgtcaggtccaactctttgccatgccagggcctgtagcttgtcagactcctttgtccatgaggattttccagacaagaatattagagtggaattccatttccttctccaggggatcttgccaaactagggatcaaacctaggtctcctgcattgcaggcggattctttactatctaagccaccagggaagcccacttaatgatcaaaggcaaatgtcttttttttttttttccagttaaaaattactatccatcatataaagggattgaactggaaatccactcataaattttctgttttatttactttttgtgattctaggactatagtttagaactttgttactggtacaatttaaatcagccaatacatttcttaacctttaagtacacatatcagcttacttcctctaaaggtctttaaagcttactagcttatatgtttgttacctgctatttcacagaacaaggtaacagcatctatgaataggagaaagagtttaatatatcttgaataaataatgcacatttcaaaaataagcactttggctacatttagaagctagtcaaatttttatttgttgataaagcagatattttaaaatcttctttattctggagtttatttcctctgtccacgttgttgttcctttgggatttagaagaagcatttatagatatgacagaggaatatctcgtgtcaaagacagtcaagcaggctttagaaatgctgaagaagcaaacatttcaaaataaaagtggaaaaagtttacagcttggatctgctattaaagtatggacacatattgatatagcctctatagaaatgtatgtggccatgtagttatgtatcctggaagtagacatcagatcatctacatgtcttctgtctgagcgtgaagaaaggtgttttatagcatcagtatagtaaattagaaagtcaaaatataccgaaaatcagctacaaaatagagaaaataagattccagtaatgaactctgatgaatcctcctcttgttatttcacgtgtgtgattaataaaccctaagaattgcagccttaccttttatttctcacaacaaacaagtgaggtctgaatcgagctcagagataacaagtgaatatatacattgtaatttccattgtgcgttttgcttgtgtggtaacttagcttctctttctgatttgaaatcaaggcagagacctgtgcatctgggaatatcattctgccgtgatgtgtcctagtgtgcctgaagccttccacatcatttaacacattaatgatgcctttcagccatcacaccctggtacggaggcatattacgtatctgcagcgtgaacaaaagcacagccatatattgtcctgacagttattcagaacctttttgtgagcttaaagtcacaactgtatgtaaaacgagcaaatggagacagtttgggggcttccagatctatgttgaaatctcattccattttcatttctgattacagtgaatgaagtacacttgtgtttagagaattatggttactcttttcctgctgacttctaaaaggtgctcataagaacagaaataacaacaaccggctagagaaaacatggtattatctaaagcacttagcgttaacaaagtatgatacgagaactatacacaatatcttgaaataacttataatagaaaaagaatgtgaaaagaatgcatatacacacagacagatatatatatatactccctgtccgtcaccaactcacagagtttgctcaaattcacgtcctttgactcggtgatgccatccaaccatctcatcctctatcatccccttctcctcctgccttcagtctttcccagaatttgggtattttccaatgagtcagttcttcacatcaggtggccaaagttttagagtttcagcttcagcatcagtccttccaatgaatattcaggactgatttcctttaggatggactggttggatttccttgcagtccaagggactcaggagtcttctccaacaccacagttcaaaagcatcagttcgtcggctctcagcttt

SEQ ID NO: 29944 - DNA, 1584 bp, Bovine  19866880763432
  misc_feature (1)..(1): n is a, c, g, or t
nttgcacagagtcggacacgactgaagtacttagcagcagcagcaggggcctcattggctgacctgcctaacattcttgttccctcagcctaagaaaggtattagccgtcaaggttctagagtcttctaacatggcagatagtggagatctccaaccttcaggcttgtcccggcatcgaacatacttccactgcctggtgacagttgactagagggagaatgaccttacagagatcaagtcttgaatgtcaccaacttggtagtctgatcaagaacacaggataacggatagagaaaatagtatggcttaagaatggacttgaccatttgctcaaatgctggttctgccagtgtctgtatcactttgcataaattatttacattatgcattatttttgttattaaatatataatagtgcatattccacatgatttattgtaaggattaagtgagttcccatatataaatcactcaggacatttgccggcatgttttaagccctatggaagtgttttctagtgttacttaatacatgtccaacgtatctttttcacttcttcctcttttctgttgcaggacacatctttcaaacttactgtttcacagtaattaaagctatccatgtatagatttataacagattttttaaaagttaaggaatgattttctttacctctcaaagtattctttcattaaggaatcatagtctgctgtgaagtatgttaaccaagatggcacttcctattaggcacaaataactttttcaggtgatagtgaagctgagagaaaaggatatgcagattgtctcaatattgtacattttaaatttagtcagttaccaaatgtcgctttcctctcttttccctagaccctggaatctgtactgactgagcccatctgggaaagtacaccagccagatggccattgtgaattgctagggaggccctgcggcagtgagagtggatttcagaaaagaacgctctttgggacacaatgaatacagccctaatttatattttagggtttttgaaggagattaaggccaacagtggcatgattttaaactgcagttgggaaggttttttgtctgtatgccagcaaagctgaattataagtttggggagctttgggagtgcgaaaagatgccataaaaagaaagggaggctcaataattgtatagctgtgcagatacaaacagtatgtaaaagaattgaggttaaagagcctcatcaaagccaagccctcttcagtcggttattgttacagggattatgacttcaggagagctataaccagcaggggataaaggaatgacattctccatcctttttatgccaaagcacttaaacaattgataacaagggattagaaaaacaaaaatatattgtggttttgttatgttcagactagtgtcaaggttgaagagacatggttcatgaactttagaagcattagtgcacttgttatgtggcatacgcagaccttgtgtgtctagattcctagcaaataccgtgatgacaaaaattagttctggtctaagttaatcagtaaatcagatacagatactaatctggcatttcag

SEQ ID NO: 29945 - DNA, 1401 bp, Bovine  19866880773646
  misc_feature (1)..(1): n is a, c, g, or t
ntttctgtagagaataaatccaataattactgtcatacacttaggaggtagttgattgccaataacataggtataaagtagataaaggatgtcattagacagaacacttaacttggttaataaggagtcagccttcctctaaaattatttggcaaacctaatattttaaagtgataatgagaaaaactagatattatatcatatgataataatactcattaatagtattcaatgcttataatattctggaggttttgatatgatatatcatttaatgctatatataaggttaggcagcaggtttatgacaggcctaaaatgaagaaaatgaaatagaaaaagattaatcatcttgttcaaggttgcatggttaagtggtagagtacatgcatgccattttggtgagtaaaagaaatattttgtataattgatttttaaaaacttacatactacataaaagcatacatcaggcagttagaagctttttgaggaatttagaattttattttacatctaggaagtcctaactccaaaaacaatattgtagagattagttccctacacttacatttttaagagatcttttattattttaaataaagaattatttgagtctcttcaataacacgtaggagaaggcaatggcaacccactccggtactctcgcctggaaaatcccatggatggaggagcctggtaggctgcagtccatggggtcgctaagagtcggacacggctgagctttcactttcactttttgactttcacttttcctttcatgcattggagaaggaaatggcaacccactcaagtgttcttgcctggagaattccagggacgagggagcatggtgggctgccatctatggggtcgcacagactcagacacgactgaagcgacttagcagcagcagcagcaataacacatacttctgcagatactgtaagaattctgtaggaatttaggaagaggaacaaaaagagaaggaaggaaagaaaagggttaaggagacctagtaaaaaaataattcaagttgtttcataacagacatgttttcttcaatgtcatacctatttaagaaattaaaccaacacaaacgtctgtaatacagtataaaatacaacaattgggacaagaagagtctaaataaagtgaaaagccaaaggcaataaaagtgcatgtagatatcagtccagaaagaaaggccttacatgtagctagttgagacacggacatgataaagtacgtactccatttacttcattgaacattctttagatcatctgacataaacattaaaacagagagaggaagtaaaatgtaagattttcaaagaggtgtttggggtctctgtgtgcatgtatactaagtcacttcagttgtgtccagccctttgtaacc

SEQ ID NO: 29946 - DNA, 1984 bp, Bovine  19866880820355
  misc_feature (1)..(1): n is a, c, g, or t
nttggaaatgcaaggaggcctatatatttcccatttcttgactgttctggcaattttccccaaaagggaggaaaaaccctataaaatttcttttggccccccaaagcagaaacatctgctggagtcatgagtagcttgttggcgcggcttcgaagtcccagcctggagttgattatctccccgcttcaccagtgtccgtgcactcagcaaggagcgcactgaaaggtttctgggaagactcattataaataatgagaacatggaagagaagaaagagggaaacggttcaagctactttggcccatgcattttacgagtttcacaaactaaaatcattagaccaccaaactgctcaattagaaatcaagattttaaaaattaggccattgctttctgtaaatacagctgcttggcaaatgcaaatgaaaaacgtgacagattgctggttgattttttttcctatcaggaaaaaaataagtcagttattttaagtgacactctggggaaaggattggttgctgatctgtctttaagttgccaattgcatcttacctcacactgaagctggcagtaagtagaattttctggcttgagtgcataggcattttttattctttgaaacagtttaacaggtgcaagtgaagtcttgctaggaatgcttatgtatgacaatatactctttcctaaattaattcactccactcagtgtacaatataacttgttgcaaaacttttggtgtgctgtcaattcaatcagttacttaacagatgaaaataaccctagttctttgcatccttcaacaactctgacaattttattatttttctaccatcagtttttctaatgttaacaactgacagggtcaaaatgttctttgtcattctgataggatttgcagggaaaaaatatgaacagaatggattttaaaaggcttgatgaaagtattcagattaaaatttcagtgtatacctaacaggtatataaggaaaggttaaaaactagtgagctatgagtgtctacagaatgaagttcatttgtgtaaatggaagtgacatattccaagacagaattctcaaacttgatggcatcatagacacttagagagcttgttaaacacatactgctgagccacagcacaaactttctgctacagtaagtctggggtggtacatttaagttcccaggtacaggttatggagctggccaggtgaccacacttttccaatcactactctaagagatagagagaggaaccaagtcaaaatcccagagtgtctatctctagaggctcctcagatttcaaggctaatggaatactaaccagttttcagtgagctcacaagttcattttcttttaactctgggtaccaagcgcatcttcacctatagtccaccaaccaaacgccatactttcatgctcgggtagtctaaggtgactatttgacctagatgttctccttttcacatccatatgtctatattgccattttattcaaatgtcaatttcttttgaccattgattgctctgatgacttacttttaattcttttcatattaaagttaaatctgccccagtacctcccccaacccacactcagagacataaacaccacaagcaggacttccctggtggtacagtggataggaatctgtctgccaatgcaggggacacaggtttgatccctgatctgggaagatttcacatgccatgggcaactaaagcccacaggccacagtgactgagcctgtactctaaaacccgtgagcagcagcactgaggctgtgtgctgcacctaccaaagcccacatgcctgcagcctgtgctccacagcaagaggagccaccacaatgagaagcccgtacactgcactgaagagcagcccctgctctctgcaactagagaaagcccgcacacagcaaccaagacccagcacaaccaaaaaataaacaagtaaataagttattaaaaaaaaaaaacccaca

SEQ ID NO: 29947 - DNA, 784 bp, Bovine  19866880868919
  misc_feature (1)..(1): n is a, c, g, or t
nactgagattgaaaccaagagtgcattgatggatagtatgcatttttctttttaatggaaggatttgaagtctgatatcacttaaaacatgtttaatcttccattagaaaatatggtgaccctgtgatatctgatccagacagatgttttttattcatatttatatttttgataatgcgtaggaaaaacataacaaagagtcaccacccaataagagcctcaaaatatatctagagaattgtgacacgaagagcacccgcttcctcagtacttcttattaaatatacttttttaagaaatggaaatgtaaaagtagagattcttgtttcctggtatatatatttttattcatgagagcttttttgtcagaagtcaagatctattttactatgtcctaaatcctatctattttacaatacactaaatattattattacctatggataccatgggaccccttgtgcataatggattccagtcctcttacagagttgcatatgaaaatgttatcaatgagctgaagactctggcattcataactttgcaacattataacaaataggtagtcctaatattttttttcttttttaatatatcaaatatatttcattgcttacattatagtagcagattgaaaacatctgctcacttgccactagtccaccagcagctgaaaatctcagctcatttccacaggcctctatgtaccagggctataatccagctgctgaggcttgatatggggccagattaatcctcaagagcctttgaaatggaaatagtg

SEQ ID NO: 29948 - DNA, 2226 bp, Bovine  19866880893608
  misc_feature (1)..(1): n is a, c, g, or t
ngtatagtgaggtattgttcacataagagttttgtaatttgtttcagagaagaaggatgagagggtgaggagtcagagtgaccttcctgcttctgccaccttttaagaattccttcagtttatggtatttcatatgccaagatgccacacttgggggtagcatgttctgaatcccactgttacgctcaggaatccattactgattaatttgtccattctccccagcagggatggcagtatgacacccagagaatcctagcagtctcaccctattagctcatctctctcctcaggtcccacattctcccttcagaagccagctaggcttcctgaaccacaaactcgaccataaagttcttcatgcctttctatgccaactccttggcaagcatagcatcttcagctctttactgctttttatctcatacttgactctactgtggacattttcaaatctcttctatattcagtaggaaaatttaaatagtgagggggacttatctctggactttttctatttacccatacactgctaacatttcttttctccactgcaatgattccatgctagaacattccacaatgatgaattttcctgaggtcccagacagggtctagggtaaatatcacatctgtccacagattctcacatctagtagtttccatccttcctattgggtaactgctgggtggtggtgggcaaggctgataggaacagagttccacgctggtggttaaattctatttcctccctcactcatccctaatacaccattagctcagaaatagttatccctttttatgtagaaataaaattaactttctgtgtatgatgtgtacatctttttcattcatttttcttcattcttttgtttatgatataaatatttgctctgagtttgtcaaatgttgctgtctgtactcaaaaccaaattgagggaattttaaaaataaaaaaagtcaatatggatactttcttctcatcagtttcaggctattgaaatcaaaaaccatacacaagttcaaataactacctttttagaaacaaatcacctttcattgtaatggagactactgatttagataatagtggtaaagaattattactaataaaatattaattatcttcatatactcttcttgcatgcatgctatgtccttttactcatgtctgactcttggtgaccctactgactggaacccgccaggcttctttgtccagggaattctccaggcaagaatactagagtgaattgccaggcccttgtccaggggatcctcccgaccagggatcgaacatgcatctcttatgtctcctgcagcggcaggcaggctctttaccaggttctagcatcacctgggaagcccagtttcctcctatgttcttacaataaccctctaagttatgtcaagagtagaactgacatgttgaaaactaataaaccctgtgatttattatttatctcattgattctcaccgcaacactatgcatacagagaactgtcccattttccacataagaagcctgaggttccacaatgacttaagtgattatttaagtttacctgaccttaaatgctagagctaaaatctaatctagagcttcctagtcttttctactaccatcataacttttacatgtaatatccgaaatatatattatatatatacatgtataatcatttgaataacttttaaaactattggtaaaagaaaaaataatactatggaatgatacaactatatacgtttctaattttaaaccactagacgaacacagagtgtatactgaaatgaaatactgatatttcttctaatactgtatcatcacaggacacaatttatggctttctgccatttgataatgaaagttaaattttctgtgctgttactggaatagggtataataattcattctccaaaactaatttatatacaaaacatattctatacaaagatgtttgagttcctgtatttctcttcttgtcacttggcggcaatttgtgtgtgactcaagaaagacagagtaagaaccaatggtaatttcttcaagacacagaaaagaccaagggtactgaaagtgtgtttcagttaaactcattcatttgaaattaaactcatgttctacagtgacagaaatcccaaataaggtatttatatttaaggattaacagtgtcttattgaaagattcttctcggtcaaaaaaataaagttcatttttttt

SEQ ID NO: 29949 - DNA, 852 bp, Bovine  19866880918067
  misc_feature (1)..(1): n is a, c, g, or t
ncacctgctccccttccccgtctgcttgtgcaaatcgaccttgtgctaattcctcagcagaatgtgctgcttgtccttcagacagacagctccttgttgtctgctccttaatttgtgatcatacttccttgttactttctccttcttcccagatcccatcttagttcctgtcttatgtaaactccatgggtaagcgttggtgagttgttaatttgggaaacaaggcctgcaatctgtggagcaacaagaacagctggtgctgctgctgttcagtttttcttggcagatggatgtagagggaattacgaatggggaaatttgcctcagccttggctgctatttcgtacagcaatataacattgccagctctctctctctcctatgccaccactcctgcaccacagcctgatactttaatgtgttcccctaacttcatgatccaggtcttcctgggtagcctttgttatatgcttcatgcccaatatacctttttgaccacaacaagaggcattttcagttttacttaagcagttttaagtgtacattaaggaaatgttattccacatccccagtaatttgaggtcaagacctaacttgtttgtccacttatttattaattttaaagtaaacttcaatgaatgtcttagttttctaggactgctataacagaatatcatagactgagtggcttaagcaacatttatttcttacagttttagagactgagaagtctacaatcaaggtgctagccttttcagttcctggtgaacgagtcttctttctggcttgcatatggccacatccttggtttatcctcacctggcaaagatagagcaagccccagtgtctgtt

SEQ ID NO: 29950 - DNA, 1710 bp, Bovine  19866880920588
  misc_feature (1)..(1): n is a, c, g, or t
ngttctttctgtatgtgtttgagtgatggattcacggatataatctttatgtagagaccacgctttttatctcactgacatactttgtgaaagtattaagagctgggaactaacatctgaatttacaacataatcctctacaatttagaaggtgccttatcgtgtggtcatcacgtggcatttacaatgtaatcaagagaaaaatcaacaaattcaatctcacaaactaaattaaaagggacacattcatgtttcccctttatagccatgtcagagatagagaggataggaggaatttaaacaccagacatcatagctgtcatagccatatctttctagagttagggagctcatttctcaaggctacaagtccattaaccttcacaagagcaaaaataaagcaaaacaatgaaacactctggagaactggcattgcttctaatcttgcttatatatctcactgtagggatttaaagatggaacaaagacttcttcttccccaggcacaaaaatgacacagactccctgaaataaatatacaaaatgcctcatggtacatattgtagacatatttgtgatttttctgaaaaatgagagtggggttaggaaaagtaactgatatcattcctgttgaatctttgtcttacccagtgatttgtaactgggagggccaaagtatcaaccccatttattttttaaagtcttggtcttcccttggttgccactttacctagattcattcactgtatatatctggaactattcgtttcctgataaacgcattgtcaggaagccagaggtcaatgataagataggaagcaaggagagcttgcttgtttttatacatttctgtttgacttgggagataattataacgcagattgatgctcctattttaaacaaggtagtaaatcagagtaaaatatgggattcaggaaagccatttgccacataattataatttcttaaaattcctgcattcattgaatatgagaagctgtaatcatgtgatacatagcaacaacattactcatcttttttttttctctcatagaagacagttaaataaacttaagttacagtctttaaatattattagttacaaagtttaaatatcattaactgaagcaaaacaagagcataagttgcttgatctgagatctatgttctagtgggagagattacagattcagtaaggaagattaaaataatgattaagtgtacttcactaaaaagtcatatcttttccacaaataaactttatttatcaccacgagacaaatagtattataagaattccatcaatataggagaacagaaaaaatgtaggaacaaaagaggggtttagaatcagaaagagacacatttaagcatggactctgccaagggttatattcagaacacctataaactggcatggcagggacatggagccttcaagttggaagaattccagcacggggatctaaagacccctgtgatgcaaggatttatcattttggttgctgcattaagggagagaaagaagggggcctgaggtactgatttagaagtgcctctaatgccaagatttatcccttcattgctagattatgggggaagaaaagggggaccttatatattgggtttaggggccttctcagggtacttgaggaattaacaaggtacagtacatttctatgctcacctaccagaagtaacctggacttg

SEQ ID NO: 29951 - DNA, 1216 bp, Bovine  19866880970503
  misc_feature (1)..(1): n is a, c, g, or t
ntttcctctagattgtccaagaaagaaagaagttaccatctactgccctaaaaagtcctgactaaaatctttggggaaagggtatgaataaatggttaatcatggctaaccaggtccataagaactcatgacttcatgttgttcatatgctaaagttgtaccacatatgttattataaggcatcttgtggccggtatacaggattgcaattcatactaacagatgtttgggaaggaaattatttgtttaatttgtttatgagtcagaggatttttgtctgaatgtaattataggaggagaccacaatttatgaatggattgtattccaaaagtgcatttgtgagtcgcttgtttgggactaagaacatacttttatgtataaactaggttaaatgttagtgtttcccaagcaagcccacaaatagctgctttaacccattatttggctgatagtatctgcctattatttctatggccctggagaaaggatgtgaggaaaaaacctcttcccttttctggcatttgtttggatcccacagcctttccctctttccagcctgcttttccagtgctttctccagagacctcataagcccaaaccaccctgaagggctgtgactctggtctgacccatccttggcaaaattcatgctattccagagttatctgcctcttcttccccaccatcagtgtgttcgaccttttgatgttgctgctctcaagttataataagaaagcaatgtaattttctcattctttttatacaaatgggattaatgattatcttaggaatatttataatttaaaaatagatgtgtattcatacaaattcgtgtattcagtggaatttctgactaaaaaaggggaaaaagtccagacatattagagtgttgttgaatccaagttcatgtagccatcacacagtgaggccaaacagactgaaaagttggagtttggagcagagaaaggtttatcgccaggtcaagcgaggagaacagagcagttcatgctcaaaaggcccaaactccctgatgattttagggaagagtttctataggcagaatttggtgggggaggtctgctgttgtgtgaccttcctctgattggttggtggtgagttaacaggatggtggtccaggaatctcaatcatcagtcccctggctccaaccaatctggggtccacatgcttgtgctcagcctcccctggggtggaga

SEQ ID NO: 29952 - DNA, 1421 bp, Bovine  19866881038989
  misc_feature (1)..(1): n is a, c, g, or t
ntaatggagccaaagtgatttctttttagccacataggatctcagtaaataatctgtaagcccctccagaataccagaaaccatatttaaaaattgtatgggtaaagactaaagaaaatgagtctatcatgtaaattcaaggactcaccagagtattacaattgggaaaagttaggtttactattattagttaatacagtctataaattggtaaagatttctatatcatattacttacatattttaaaccagtgaagacatttagagcttgcttagattacattgctgtctagcaatggtttgattgtatagaatgaactattaggcttactcagattgaagatttaagtcctaaataaaccttcaagatatattttgtttggtagttcagtattgctgtagttgctttaaagaagtataacttgattaagctagcattgattttccagtttatggacggccctgtcgttacttattctcgtactcatagcttcttcacacgtttaaattagttgcctaacccttgagggcatttgagtttgcaatatggctttattgtcagacttcaaatgttataatccttcccttaatgttgcacactctttgaaagcagtacagtatttccttgatttcctaacagtaattagcacagtgtcttaagtaaatgcgtatttctttcatatattcatctaactcacaagtctttactatgtacctattttgttttagctaacacactagtcaataaggataaggatgtgagagacagttccagaactcactcttaaaagtcttaatagttaagtgaggtaggatttgcttatttattgataaaatgtcttatcttaaattctcttctatcataacttaagaaaatgaaaggattaccattctcttcccagaagaaaatatattaaaataagtaaatgttatagactgaattgtatcttctcacaattcatatctaattcacaattaaagttctagctcttagtacatcaaaatgtcactgtatccaatatggctgatgactttgccatacaaattttcctcatgtctttgtatggcaaataaagagaatcccagaagaaaccagccctgctgacactttcatcttggacttctagcctccagaaatgcaaggaaataagttttgttgtttagccacctagtctatgttactagcaagttaatacagggtggtattttgttgttattttggtttgtttttgtatatctaatttgatttaaattcatgtataaaaattcaaaacaacaaaacaaaaatgaaataaaataaaacacctagaagaaaacgaagaacatttagatgacgttggatatgacaatgactttttatcacaatattctttagataccataatctagagagaaagaatttaaaaatttttaaatttcaa

SEQ ID NO: 29953 - DNA, 1736 bp, Bovine  19866881058730
  misc_feature (1)..(1): n is a, c, g, or t
nttcctagaacatgttgcaagttcaacaaatagttgttgaatgagtgacaaaagtgtactgaaaaattgagattttttttttcctttttctcatgtaaaccttctaaagtggtgtcagatatctccattttgaagattaaggatacaaaggtttaaagagattaaatagtttgacccaggccacaggggtggtaagtggtggagcagggttcaaatctttgtctaactgcagtttatgttccttcttctaagtgaagccacttatcacatggagaacaataggaaagaaagacccctgactgtacaaaattatcctttataacttccctgttcctcaaatttgggttgatgggcctgccactaaaccatagaagcttgcagtgaaaaagttctctgctattttctgaaaagtaagcaaacaaactgaagcccagaaatattgagaagcaaaataataactatagcatgaacagtgtgatggctccaaaaagaaaacaaaagaaatcaagaatggtagcataatgaatgaatgatttactatctgtatcaaaaagtaaccatgagagcccataagcctcagcaaataaacattgttttacatataatttcctgggatttggggtgtaattctactgaacagcaaccacttagtcactttttaattaccctagcagaatttttccaaggtttaacttccttttacttgcatttaagtttttcatcctttgttttctgttttatgactactaaaacacaaacccagttaaatgtcactagtatcctgtttcatgaatgtgtgcatgatgatggggagaagggagttagagctccataaagtttatctaggtaatctgtcatttcccaagtcccaaacctcacccatattttccagcagtccatgtgacagctgtatctaaatccagattcaatcagtgcttcatgtcaactaacacaatcccttaagcacagcttatgtgagtttatattattccactagcaacagacaaaagcatactttctgccaacagtgaaacactttgagacaaagataaaagatgagccacagataaaagatgctttcctgttcaatggctatgttttcatgatagcatttatctcacaaacaaaattacagattggattaatcacttattctggaaaaggcagtaaaatttagggcatcctagtaaaacagggtatctacaagatgaatgttttgcaatatgtgcttttaaaagttgtcttgaataatttatttgcattccggtgcttatgaatcacaccaggggcaaattgttttctgtgtggtttaaaaatcattggtatgcaaataggctatgagctgaatttagccaagcaaaatgaggctatgcttgttaatcaaagtagattgtgaaaatttggcaaagagcttgaagctggagttattcttggtactgtaaggactttcagtgccatactttgtttttatcctttcccttaattacagggaaggcaaacaattatacctttatatccttttggcccatttatactcaaagacccaatttcctactactctcaccctccttttttcccctgctttagttgtcttgtcccttattttttgcaaaggactgtgcacacgctcaccccagagcctttgcactgctgttctctgacagtgtttcttcccaaacactcacaaagtcagctctctttcagtctctgcccaaatgtccacatgtcagccaaga

SEQ ID NO: 29954 - DNA, 1372 bp, Bovine  19866881144983
  misc_feature (1)..(1): n is a, c, g, or t
ngacagaattgaagttgcattttgttcacagtctgcaggtgagcatgctgggactacaagaatcatcacacagtcttcactgcgctcagctttctccaaatgaaagatgtgagaactgaaagaagaacaaatttgtttggcttttatgactacttgtcacagaaaatattcttaccttagttttttttttttttaaatttcactgcagagcagattttcaggtatgtttggtgaagaatgaatggatgacataaagtggtgctatcaccgagaggcctgagatggggagacgagcagaaacagctgcagacgctaatgccaatcagaaatgaagctaacgtctggggcacccagggaagaaagacacaaacatcgtgctgtgtgccaagaccagccaccgggcccatcctcgttgtgtttaggacaccagcagtgaaatgtaaatatgggtcagccgagttattttacttaggccaagttgtatacacagtgtgtatccaggctttcagtcagaaaaagaacacatggagcttgctggcctgttttgaaggctgtggaacctgccataaatcttgttctttccatctcagaaggatcaacaggggcagcagaagccctgcctttttcccaccactactggctctagcatatgctcaaaatcatcacccctgccttgcactctcagaactggactgcagccaccagcggggcttctttcggacttcgtgtccagttacagcacttctgtcagcctaaagggctggaggcttgcaatgagtgactcttagcgaaggtccaagtgtctctagactgatccatctcacagactggctgaagaacttggttttggatgcaggcttttattcttaggcaaaacacagtatccttatgacacagtcagtgttaatgccacatcccctgtgctacatcatggtgtctctcagtaataaaactggagagaaacatagaaaagatatggcaagaaatcataaagcaaccaaccggacttcttggtggtccagtggttcagaacctgctaatgcaaggggacgtgcgttcgatccctggtctgggaagatctgacatgccacagagaaactaagcccgttcaccacaactgctgaagattgcaccccacaacacgagagtagccgccactaactgcacaaggcaaggaagacccaacccagccacaaataataaataaataaataaaattattaaaaaaaaaaagcaaccaaccatgttttggaattggattgaaggatattagaaagagaaactattctttatacatttataaatcagccatcagatcagatcagatcagttgctcagtcgtgtccgactctgcgaccccatgaacacagca

SEQ ID NO: 29955 - DNA, 1410 bp, Bovine  19866881147568
  misc_feature (1)..(1): n is a, c, g, or t
nacagaagttagcttcttctattgggtcttgtggagtttccctcctgggctcctgagtcccaaacagcccaaatccctggggaaatgaacctctatgctggctggcagtgggacattccacaacgcatcttctttcttctgctgcagaggtcttcctgccactgtgggacaggagccaaaagtatcatgttggctcttttgttttaaatgacccatatctgattcacaagaagtggtggtatattctatgagaactctgaaagtttaagcaaagccaaggcagtgttcttccgactcttctcaccaaatctagtggtatcacatcaagtggttctctcaaagatcaccaaaggcttgggctcagaaattagcatgctccaaaatttaattttgagtgctcaaagcaaagcacaaactttctccaacaagatctccttaccagtctctttccaaggtctctgatatcttttttatgtccttgatttggcagaggggagcaagagtcatgtttttttgggttctgtttcctttaaaaaatcaggatataaggacagggacataagctgtccacactatctgttatccgatacttttccttatggtacctcagtggaaacctgaagcaggcacggtcccatactaacttattacactcactagataacttttgcagtaacaatttaatcttctggatctgtattttctccttcataaaatgagaaaggtgaagttcaatctctagagtcttttccagctctcaagacttggggtttttgaagttaaggttcgatagacagtgtaacatgatggaaaagacattgagatggctatcaagaaatataatccctgctgtaatccaagcaactatttgaatgacattttaaaagtcttctaatttttctgggacttagttttctaacatacaatgggggagtgggtactggatgacttgtaagaatctcactcagggattatttactgtttctgaagagtccctctattataagtccttactttgtcactaacaaaataagattttaaaacaagaaaaatatcacaactaaccacaaaatttatctgagaaacttcctggccagaaaaatcttaacaaaggatgaagtatttaagatcattaatattttggaaggctacacagtgggcatctttggaatctgaaaacttggtttctggttctacttttgcctcttccgcaggtgcataagcaaagatgtatcaccaaatctctttaaatttcattactattattagtagtagttcagttgtcagtcatgtccaactcttttcgaccccatggactgcagcatgccaggcatctttttccatcaccaactcccagagtttactcaaactcatgtccatccagtcagtgatgccatccaaccatctcat

SEQ ID NO: 29956 - DNA, 1795 bp, Bovine  19866881269101
  misc_feature (1)..(1): n is a, c, g, or t
natttgaaaagagtttttacttaattactgctcagatagtgtgttgacatgcttggattgaaagtttctagtaatatcacatgataattcatgtaagcatatttggcatttacttcataaaatttatgctgtttcctctactgctttcttttctctttgtgtgattctcaagtgaacataaatatctaaaataaatcaaatagatatagttattttctatataaagtaaattggtttgacaaatattttgactcacttgattacttatttttgactcagataatttcttcaaggcaagaacattatttattattatatcttcaccaactatctaagatagtcttgtatacaataaatattagggtataaaacagtttgcaaaaattttaggtttaatgtttttgaaatttagcaatttcattttactattgtaattgcttgtttcctaaactgtattttcttaaatcagtcaaaatctataagtccctctggttatacaatataaaaatgtccacatgtaaattcaaagacacttttgaaaaatcagtggaaaaaacctgtgctaaagaaaattggagactgagtcaaatactggatgggaaaaattaaaggtcatgagtgtttagaagaagaaaaatgaaagctaatgatattataaaagaataagggaatatcacctatgactgaacagactagaggtttaatggaactaaaaatgaagtcacctcagaaaacttctaattaaaagaaggtaggcagccaattagagaatgatgagtactaagcactgaagaattgatgcttttgacctgtgatgttgtagaagactcttgagagtcccttggactgcaaggagatcaagccagtcaatcctaaaggaaatcaatcctgaatattcattggaaggactgatgctaaagctgaagctccaatactctgggcacctgatgcaaagagccaactcattggaaaagaccctgatgctgggaaagatagaaggcaagaagagaaggggacgacagaggatgaggtggttggatggcatcatctattcagtggacatgattttgagcaagctctgggagatggtgaaggacagggaaccctgacattatgcagtccatggggtcgcaaagagttggacatgactgagtgactgaacaacaaatataaattcatcggacagtttctctccctcaaggtatctctaagttctaatgtttaaggttagatagagactattgaatgggtgagtctgtcatttctaagtgaaatgaataattattcatctagttcctatctaattgaaaacatcttcaattataatctgctaggttgaaggcacaatgtcctttaaatagatatgatatagtgcctcccctcaagacacttccagtctgaaaacaactgtaaagaaatacttctgaattccttaaaacgtatgaacatctcgtacttctggaagatgcacacagactaaggaggtgctgggaaacctctgaggttttcgattttctctagcacctctgtcaaagcgagcattctgttactgaaagcgtgactgtttctttaagagactttttgaacagacagagaaatgagtaaagagtaagagctggtaggttaaataaacaaaattatggaaaatcattgagaattcaaatcttcaaacttcatatcaaacacacttttctacccagctgctaatgtacaagaacaaggaatgaagttagcattccacaatgaacctacacagataaaacacagagcaacagattcttcagtgacattaata

SEQ ID NO: 29957 - DNA, 1123 bp, Bovine  19866881410421
  misc_feature (1)..(1): n is a, c, g, or t
ncttttagatttgaactacggggaattcaaacagatgcttcccctgagagtcttcttggattgcccttcaccttgttgtctgctgttgtctgcagtgaatgaagtttacttcctgataatagatagatcctaaattcttcagtcaaatgatttatctctgtagttccaattctaacctgagaagccagtatttgcctccaggttaaacactcaattactccgagtttactaagataaactctgcgaagtcctttgtcactctaggtatgacctgatagagctcataggcaagcatatgaaatatggatcagccaagcatttcctaaaccagtaaggagagatttgtgtgtgtaattagagaaaaattggggctgacataagattctaggcttccgtgtccaaagatttcagcaattacattccttttctttagaaataaagacttgaagccccctagcccacagtgaatgagctaacttcagttaagcatctgaaaaattcagggcttttagccaaatgtctcatttaaactgtctaaattcattaaacttagagaaccaaattgcagatcttcaaagaacaggtttactgcacgaatcctattctaactgctgtttctggacaaaatgaacaaggttttggactactttaattctatattagagttcagcaattatataatgcctctccccagatcatccttcgtatctttacctgtatcattttattcttcttttacttttctgtaaacactcaatgaaagcaaatccagatattacagccaataggtatgaaatttagtccaaaattaagatcatctttaagagtccaaattaattaattttaaaaatgtcaccatccttagatggaaatttgaaagttgaaaagcaagagtctataagttagcatagctcctagagatagaactttaaatatagaggcaagtttcatgttttccatgaacctttgtttaggaataatgagatatctgcaaggagaggctaagacacttggcaaaaattagataatatggttaaagctaagcctagaaatgacaactcctaattcctacctaaacttaagaatccaaatggaacaagtgaccgtaagcccccctgcaggc

SEQ ID NO: 29958 - DNA, 1606 bp, Bovine  19866881450323
  misc_feature (1)..(1): n is a, c, g, or t
nacatgagacctagacttgagatgaataggttttcttaggtttcacttttattcctctcttcttgttcatctctttgcatttgtgaaactgattcttatttaaaaatccttgagtacacaagagaagctgctcagtaaatctgcatgccttttcagtggaaatggcaagattttcgctggcagcactagtttcagtggagcttgtcttaaaaatatagattatgacagaatctaagaaaaaagcagaaccttcagtttttacacaggcactgtcaccatgggtgatttcatatttcacgtatcaggccaaatgtctaaaagaacacataaaactgaaaatcggaaataaaaatcttttatttttgccaattagtgtaacaaatcctgcatttagacagtcatccaaatttgttctgtaggacccttgaaagacagaagaatctacattgttttttcttattttggggtgaaaactcatgtttagttaccattatggtttcctcctctgcctaggtagaccaaacatcttcacatctgggctatttaagagcctatcagaacataagaacaagaattaataactcagaatagagtttggcttatcatgaaataatactgttttcaataaatatctgttaagttgaaattgttttgtgaggcactgatgagaaatcatcagatactgatgctgtctgctgaccttttatcagggtcactttcaagtcagacatcaagcctgctttccattctcagtctggagaacctattatgcttaaaggctttgtttgcaaaatacattatcaggaaaaggaaactatgccactagaaaagccctgtgtttacacagagctcagtaaactagtttacacagcagtaaaaaataaaaccagtcatgtctcttcttcccctataatgttagatactgaaaatttctaggtgtcaaaaaccatagtaagtgtgccccagggaaaccatagttatctctaaaaattcacatatgtactctcaccagaaaaatttgcctttgcttcattgttttggaacaatcgtccaaattttcttgcaaaataaactttacatgtacctagaaggctcaattactgaatgtaattttaagttcaataacaaaccgcaaggggaaacactcacagctggaattagaaattctattttacttttagtttgtaatacaagttgaactgaagacataaattatggtatgctgctgctgctgccaagtcgcttcagtcgtgtccaactctgtgcgaccccatagacggcagcccaccaggctccgccatccctgggattctccaggcaagaacactggagtgggttgccatttccttcaccaatgtatggaatgaaaagtggaaagtgaagtcactcagtcgtgtccgactcgtagcgaccccatggactgcagcctaccaggctcctccatccatgggattttccaggcaggagtactggagtgggttgccattgccttctccgaaattatggtataagtcttactaaaattgggttcagtcataatgtcacaaaaaattattgtgctaaagtcttccgacaatccaataaagaaatgactgtaaaagagagg

SEQ ID NO: 29959 - DNA, 1171 bp, Bovine  19866881459023
  misc_feature (1)..(1): n is a, c, g, or t
natcttacctaaatctgatgtttctgtgatttacccaatgatcataattaatactgaattctgacctccctccaccaacatacctcccctgctcctctgcactcccattctggactttctgtcttcctttatcatgcttgattattttaattttttccatagaattactcgctttttgtatctttccacaaataaaatataagccttaggaatttttgatgttgatcatcaatgtttccaaaacacctagaacagtgtttgatatttagtagacatttgaagcacttttaaatgaatgaataaattaattaatatgagaaaaatgatacattctggctaaaatctaatctgcgggcaagaaaaaccaagtagacacagtgagtttaaagggtacagtggtttgaaaggaaaaagtttctcttttcaatctactaagtccagtttatgtcattatcttacacaaatgtaacctattatgcaaaaaggtttcacattttcagattacatattatagaggaaaaaatatatgcttctgtattaaagagaagaagaaacaatgactgatggtagggaaacaataggacaacatagaactgttgcgtgcaacacttgatctgaggagtgaccaagagtccaaagctgagcggacttcaaagaggacttgtagattcaaagcacctgaattttaaaactgggtgtaatgtctggcgtgatctggcatgttttgaaaggataacgttctgagttatgataaaacttcataaagatttatatgtttcttgaagcttatgatttgtgtatttccttcatctttccctttgttattataaatcccagctgttattatatgcatttataaaggattggtgtgccatatattttcctgttagagactgtttggatgccttcaatccatgaaatgtgttcagattttgaaaacttcacaacagaaagggattttttagaaaatagaaatcattaggttatagcatgtattggtagtatcattaaacattagaaaagcatagtttaatgttaaaaatagctgagttttatccttcatacagtatgtttatctgagtgaagtggaactgggaattaaaaagagatgaggcagttgaatggacaatggcagaaacctcttgggaccagaggggtaaaagccaagcaa

SEQ ID NO: 29960 - DNA, 923 bp, Bovine  19866881597303
  misc_feature (1)..(1): n is a, c, g, or t
nccagaatctcagattaaatcatgttaaagaatttttgcaaatatgagaatacatcctcacctttaaagaatgtttccaacattcattctgataaagatacacctacttcagttgttgtttctgtcagtcatcaagtgatttcccattaggtgatttacactcagggatttgcatggtagaatctgcagggccaggattcttaaatcattagatcatatttgtaatatctttagggatttaaatgattcaaagtttttgtgtgtatgtaataattgaatatatactaaatgatgaatatatgtcactccacatgctaagatgaatggatgatttaatttcaatattaataaccagaggaaaaaagtgtttggggcaaggaaaatgagatttagtaaatttagtaaactactcattggaaggtaggttatttactaaagaactatatccttacgttttctctgatgttaatgatgaggggggaaagactagattaatcatattagcatttggtttctactcaaaggagaaaagctaagccaaaaagaattgtattgcattgtcaattaaaattaaatgtgagagattaattaaatctattgcattcactcagaaattgaatttttagtgcactctatttaacttgaatgagggaacacaaaattagcagcattactcatgattctgatcctctgatctattaaacataataatgtctgcactggttatctcacaatattgctatgatgatcaaataatataaatttatttaaagccacctgagatcttaacatactatatagattcaatgttcttgtaaacttagaatattaactaacaacagttccattttgtcttctgaattgtattgaaaatcaaccgtcaatatatatagcctaatagagaagaaaacaggcatcagaat

SEQ ID NO: 29961 - DNA, 1501 bp, Bovine  19866881632741
  misc_feature (1)..(1): n is a, c, g, or t
ntgtatgcacaggagacaatgaataaatgtttggctttagcaaaaatgttaatataagggaagaatggcagacaacccttggaaagtaggcttaggaaaactttgggaggtctatgagtgacaagtgaaattaaattaaaaggaggcattggatatttaatttttttataaattctacttctttcacaaattatcagataatggctataaaatcatatttatcaattgatgctgcttctcttgaggtattgaaatattgagggaatatttttacttttaatatcttttactaaaaatctaattgtaaaaatgtaaacaaaatccaaggatggatttgtttggaatgtatatatgtacacagcttcagcctgtatacatttttgacagttgaaaaaagtacttggtccctgagacctaaataattagagaattgtgtgtatactcgagctattccttttaaatgtaccaccaggtcttctataataacatggatctctttaataaacttacagataatggagaaaaaaatgttcaagcagagatctgatgcagtatgtgttttccattaattgatcagtttgtgtaattctgtaattctgttataccttgctgggaatctcaaagaaatcaataccgaccaagatgagatagtttctctgccaacctgacctgtgtttaatcacaattcgttagcaatatattgcaacttataaaatccctattctcttctgagcccaccctgctttgataattggaggctcatatacctcataattgtatgtcattcaagtgtcataatcagagtagtctctgagttctatgaaagatgttaagtttcaagatgtggtgtatgatttatgatgattgttttcttctcagtttaactagattctctagagaactgaaaaggaattttcatcaaatcaccctcaggcctctgaaacaccagcaggagaattgtgagtcccctataaccggcaaggccacttcctctcaagtgaagacattttaaaactggtcctggcaaagtaaatatttctaaatgtccttgaatgttgtcatgtcaacttcagtcatgcatctaaaaaataaattcatgacacagagggcttaggtaagtggatcacaataaaatgatcactatcatggtttttaacatgattattatctctaaccatgatactgatcatttgaaaacctattcaaacccacaaagattcttctttaatactttttgtgtttgttagctctcaaaagcctctcctttgtcttagaaataccttgagctcaatcaagtgcaaatcaagctgctaataatgaatttagtcacaatttattgagagttcactgaaggtgcaataatactaggtgctgcagcaagaaattttaaaagaagtcacactgtcctgatattttggaattaatagttttcaaaaggagatggtgtaggacagggaagcctggggtgctgcagtccatggggttcaaagagtggacacaa

SEQ ID NO: 29962 - DNA, 1822 bp, Bovine  19866880107772
  misc_feature (1)..(1): n is a, c, g, or t
ntgtttcttgacttcctacttttgcgttccagtcccctataatgaaaaggacatcttttttgggtgttagttctaaaaggtcttgtaggtcttcatagaaccgttcagcttcagcttcttcagcgttactggttggcgcatagacttggattactgtgatactgaatggtttgccttggaaacgaacagagatcattctgtcgttcttgagattgcatccaagtactgcatttcggactctttttttgaccatgatggccactccatttcttctgagggattcctgcccgcagtagtagatataatggtcatctgagttaaattcacccattccagtccatttcagttcgctgattcctagaatatcaacattcactcttgccatctcttgtttgaccacttccaatttgccttgattcatggacctgacattccaggttcctatgcaatattgctctttacagcatcagaccttgcttctatcaccagtcacatccacagctgggtattgtttttgctttggctccatcccttcattctttctggagttatttctccactgatctccagtagcatattgggcacctactgacctggggagtttctctttcagtatcctatcattttgccttttcatactgtgctgcaagtaagctataaacaggcgttatttttctatatccttttcaccctgtagcacagttctgcaaagaaagagagggaccatctaatattacagcagagaaccccaaggcctggggaggccagaaagtgcggtgacgagcttgggtttctgtagccaggctacttaggctggatctcagctctccggtttatgaggggtgaggcaaccagggatgctctgtggcctctctgagctcagctgcctcgactgtgaaataaatggcgatcacaacagcacccacttacctagaagactggggcttccctggtggctcagtgggtaaagaacccgcctgccaatgcaggagatataggttcaatccctgggttgggaagatcccctggagaaggaaatggcaacccactccagtattcttgcctggagaatcccatggacagaggagcctggtgggctacagtcctgagagttggatgagctggacatgatttgttgactaaacaatgacacaatctaaaagatttgctgtgaggatgaaacaaagcaaccgatggtatgtaagtcaaatgcttaggatggagccgggcacatggtaaggtgtctgataatgtcgaattgaatgattggggttacccagccggtgcatggctgctgaggacgtgaacttggagtctctggccccagagccaacgcttgccttgcacctggggcggccttgggctccaggccccctacccccagccccagccccgccccagtcggtgctttctcccgcagatcggcgctgctcggcaaggtgctgcgcatcgacgtggaccgcaacgagcgcggcccgctctaccgcatcccgccagacaacccattcgtgggcgaccccgccgcgcggccggaggtctacgccttcggggtgcgcaacatgtggcgctgctccttcgaccgcggcgacccggcgacgggcgcgggccgcgggcgcctcttctgcggcgacgtgggccagaacaagttcgaggaagtggatctggtagagcgcggccgcaactatggctggcgcgcccgcgagggctaccagtgctatgaccgcaagctgtgcgccaacgcctccctcggtgaccgcccccgccaccccgctctgagcccccggggacccctctccccagatctgccacccctcactccacg

SEQ ID NO: 29963 - DNA, 2044 bp, Bovine  19866880369329
  misc_feature (1)..(1): n is a, c, g, or t
nccaatctcatctcctgacaatgctttccttggctgaacctagctgcaggccagtcagctgaggagcatgggaaatgtagtttgtaggagctggtaaagtatctgcctgcaattcaggagaccagggttcccatccctgggttgggaagatctgctggagaagggaatggcaccccactccactattcttgcctggagaattccatgaacaggaacctggccagctacagtccgtggagtctcaaagagtcagacatgactgagcgactaacactttcactttctcccccacaactccagagtcctgccaatgctttccttggccgaacctagctggaggccagttagcggaggagcatgggaaatgtagtttgcaggagctggccttctgaagtagagagcgggtaagaggaggaccagggctgatctgaggacaaataagcaaataacaggacatcatgcattcgataaaattataaactcttgacattgaaagtacaaaaagaaggaatcaaactgactaatgtgagaatctaatgtattaatagattttgcctgtgagcttcctggcaaccagggcaaaaagagaaagcataattctcgttatcttatatgaggccacacaactgattctccaagagaggccatgtttgtcatgtgactctcacagaggggagacagagagacaggatgaatgtgtcttcagtgatgactttaaaaaatggattcctgatgaagactgaaggtggaacacaagatatacagatgaacatacttcagaattggggttcagcaagggtccctctggggacctcaccagtaccagcctagaacctgactcttacaggggaagaagtaggcatggctggctcagggcagatccaggaatgaatgggcatccttgcctgagtcagctgtcagtctcttttctcagggctggatgtccaacagcctgagctgtcctttgcggggggtacctggtttggggattgtgtgtggctccccatgtcatgtatgttgatctcacaatagaaaggcttctggtcttggttctgaaggttgaaagtcctgggttcaaggtacctgacatttctgtacctcgggtttcttatctgcattaataaaggattggccagtcagtcgccaatcctggaaaacctaaactagcctaagcattttggtcaaagggaatttaatacagggagttggctacaaaggtattgggagggctggagaaggaaaaggagagggtcaagctccctagagatgagttcttgtgagaagcgaggggaacaaaaggcacaaaggtcttggtgctgctggggtttgccgctcctggtacccagatgtctgggcagaaagccaggagtccacactgaccagccgctgtcgcccttcctgcaaccattgcttccggaggcagtgccagagaccagggacatgtggctcctcccttccccttgcctgccaccctctcctggcacgccctaactgggagctagctgactggcagtgtggtggaaggttcccaccctggcagtaaaggaggtcactgaggagtgagtgtggagctgagcacagtccacaccctccagcccgcctccctagaagttacagccataacaaatgagaggctgtcacaagtgctcagcttaagtggctggtgcgcgggtagctatgatgatgaagaaaccagtcgtgctagtgattgggtcaacggtttcacttgatcataacaggcaggggctagttgtgggggagtagttgaaaaagcactagaccagaaccagaagtcctgagttcctgtcccagctctgccgtctatgggctgtgtgatcttgggcaagttgctcaacctctctgagcctcttggatctcattggcacactgatgtgaatgatcccttcctagcctgccagatccttataaaaaccacctcctataaaggatatggaaagtctttccaactacgaaatggcatgtaagagagaggaggctttattgctgtggttttgttttgtgtttatggctgacatttttgttt

SEQ ID NO: 29964 - DNA, 1497 bp, Bovine  19866880380767
  misc_feature (1)..(1): n is a, c, g, or t
nattggcaagtgggttctttaccactagcaccacatggggagccctggggaagttcagttaaactcgattccgcaggacacagggagcccagtaccaggcctggccctcccaacatgtgtgcatttccctccttcctctccccttctcctgggtcgctcatgtgaggacctcgaaggcagaactgcccaccaggccccttgcttccttcactgggccattctccacccagaaatgcctggcaggcagctcgcccaggggcaacaccacggaggtgccaccgtgtgatacccacatcttttggggaaggcgattcccccacaaaacaaaagcacagtctagggcagaagacaatggcctccccctgcaggctggcccgagcccctccgggcatgtacagcccccagcaggtggcaggtgtctggacggacagatgctccagccgagggcgaggtccctcccaggactgagtcctgctccctacggtgtttctgctgcccgtgaccttgtgcccacctccccagctcactcgagcctcaaggacagcggcgggccccagccagtgcccacgcagagctggcgctcaccgcctccccatcagtgaaggagggctggcatgtccctgggtgccctacatgcccaccacgggaggcaggggctatcacctcacagtacaagcctccccgggggcagcgtggccacagccacaggccacagagctggccgagtcaggggtgccccccagtggggggaggtgacgcccggcatccgcccaggctcagcctggccttgaaaggggaaagggaggtgtttccgagtgacacacgctccctgagggctgtcctggaaaccagagatcctgaaggcaccacccacctcctcctcctctgcacacttcacactcacacacggagctcacactcatgcacatacgcacacgcgcacacacacgcacacgtgtgccccatccctctcctgggtctcgacactgagaaaacagtatcgagtcgggaagcagtcaaggggtcatttattttaattattaaaacagcagccacttactctcaagccgtccgtaatgccacttaattacctactacataaaactgcctttgcatcttagcagagcaataaatcagctcggaaccagagttgtttaaagcattctagccgaagattcagaggggtgggggggtgaggagttgccccctcggcgccccgggaagtgataaaccaggtctctgctctgaagccgcggccacagaagggagaaacgggccagctcccgccagctgggtgcgggccggcaggccagggtcctctcccggtccctccgtccactgcgcagccggcccctgccctgccgcgctccatcctttgtgtggcccacaatagccccgccagatggcatggcgcggccagcagccccttcaagccaatcgctcatcctgtcgagacccagcaggggctatgggcaggacacctggaacggcgcaagg

SEQ ID NO: 29965 - DNA, 1903 bp, Bovine  19866880400052
  misc_feature (1)..(1): n is a, c, g, or t
ncttctcctgatttttaacttggttatgtcttttggctcacacccaccaagagaaacccaatttttcaggtaacacaactacaggaaaaaacagttcttcccagaaacttttcccctgtgaacaaaattcttaagcttctagggtaagggcagtaaatcatgttgcccccaaggcacaaagatggggagaacagtaagaaaaaaaaaaatcctttaatcctggaggcaaagaaggaccagaaaagcatgatgagtcctgactcagaggtggtctattgctgggggaagaaaaagaaactcacttgctaaagagtttgtctcccacaaaaaaaaaaaaaaaaaaaaggagcacgagacaggagggaaaagggcaggacacacatgctagataaataaagggctgcaacccttaggatacagactggctggaaccagttaaaactaaggtggctctgagaacagtccaatcattgacctgtagttcattataccttcattgtaataggtggtacagttggtaatgaacctgcctgtcaattcaggagacataagagacatgagtttgttcaatccctgggtcaggaagatcccctggagaaaggaatggcaacccactccaatattcttgcctggagacttccatgacagaggtgcagtctgtggggtcgcaaagggtcaaaacacaactgagcgactactgctttcacttcgacgagatggaagttccttgggcagatcaccatagtaatatagacaaagcccatctcttccctttccaaatgcttaggtttgaaaagcaagaccgtatctacatcctctccgtaccaccaataattcgtatctttttaatcccagtctctgcagcaggacagttctgaatacccactatgtaccaagaattacgctgggcactggtggttataaaggatgaataaaacatggtagctcctacctaaaggaaatcatctatgacaactaaactgataatgttgttaagtgctgaagaaacacagcagcaggaatggctttctctgggggcgtggggggcactgagtgcctccttgaagaggcagtatgtaaattgggtcttagaggacagaagtctggctgcagttggtcatgaaccttgctaattgctctcgacacttgaacagtaattcagtgagacagttataaaattctgtttaaggaagcaccctataatgtattactgcgaaattgagttcagcatctagtaacgctgttcggggtatagtcggtgcagggtaggtgttgagttcatgaataaatatatgaataaagaaatgaaggagaagggcaccagtgatggtcactaattctgtgtagtcatttctctgtcctctttttctctactcctaggacacaaggaccttctactcagaacactctgccttctttttaacacaaattctcatgaaaagccagtattatataagcataattttttttcctgtatttcttaaacaaagacacttttaggctcaaatatcccaccaagactaagtagaagagagattagtctgtttagagaaaaggaaacttaaaatcaacagatgacttaagccacacagcgactagatcttaactacatttcataagtaagctgctgctgctgctgctgctaagtcacatcagtcgtgtccgactctgtgtgatcccatagatggcagcccaccaggcttccctgtccctgggattctccaggcaagaacactggagtgggttgccatttccttctccaatgcatgaaagtgaaaagtgaaagtgaagtcgctcagtcgtgtccgactcttctcgaccccatggactgtagcctaccaggctcctccatccatgggattctccaggcaaaagcactggagttgggtgccattgccttctc

SEQ ID NO: 29966 - DNA, 2222 bp, Bovine  19866880473141
  misc_feature (1)..(1): n is a, c, g, or t
ntgcctgactggagaacaaggaggtgaattcagggtgggcaggggctcgaggggcatgttacagttcaggcttcttggtttaatgagagcctgtttgagcacagcggtaacggtcacgggcggggctgtgtgtcttgggcccacccgctggccctctctgtgcctcagagggtgcgggcagtagcactggtgtgggtgaagcaaccgccttcttgaccctgtccctccttgttcttgtccctgccctgtgaccctccagggccccctcatggcacagaggacagagagccttgccctttgtgacccaaggggtctggcctgagctgtctcagagtgaagcctccagcctgggctggtgcctgcgtcctgggagacctggggttggagaatgtctaaaggagcaagagggggcaggcgggggggccttccgctctgctgctggctggttagagcagaggtgcggtgcccagggaggctggaggttgctgtgttgggaatagtgagtgtgcggagtctgtgtgtgtgtgtgtccctgtgtgttcacgtggttaggtgtgcctgtatgtacatgcatgtctgggtgtgcctgttcacccacccacgtgtgtctgagtgtgtgtgagcactggtctgggtgtgcaggtgtccgtaccgtgcccacccagtgacttctgcacagcaccgaggtcctgctctgctgagcactgtctcatgggtgcctcaccacaagcccatgtgacatttcaaggtcatcatgcccatttcatagatgagaaggcagaggctcaggttgaggggtggttccctgctcccaggaagcagcagagccagacccttgacccaagatgctaacaggagcatctggtgtcagctgtgaccctttactcctcccaagcaaagtcaaaggctcccagctcccacctttcgggtcccctcatccccctcatcccccctcccgccccatctttggctctaaagcaggtcctgcgcacctggcgagtcctcggccgcctcgggggcgggggcgggggcggggaaggggaggcctttcccgaggtcggcgagcaggggacgtgctggtgtggatgtagctgctgaggctggagcacttcctggaggaggcgggctgagggtgtcaggtgcagaggggggcagggagctggagtgggaaacaacaggtactgaggccagagcggaaggtgatggggtgagggcgtggtgggagccgaggtcagaggagagtctgcaggttcacgagggcatcttgtgccggcacggaggcgcggggacagaccgtggttcagcaggactcagaactccgggcccaccccagggctcctggatcggagacttggggtgtgggcccccgggaaggaggggagtgtgcattttaattcctcaccctacttggggccgggggggaggggcaggggggtgggagtgtgagagctcagcgcctcctggtgccaatggcccctccgccttcgggcagcgcctgcggcctcctgcttggctcagctggaggacacgggaagcctcatcgggcggacagggcgtgcgcgtgcttatgtagtctgcgtgctcgcacgtttctgcgtgcgtgcgcgcgcggcctctgacccgctcgtccctcccctgcaggtacggaagatcgcgcccgagtactacgaccacctgccccagcatcactcgtgggtgaaggtgctctgggattttgtgttcgacgactccctggggccctttgcgcgggtgaagcgggtgtgcaagctggcggagaaccgcctgtgagccccacagccggccggtgccctggggcccgtgtgccccgctggatgcagggctggctgtcaccgtcccacggcctagtgtccagaactggttcggctgtatttggttcccgcgccctgagccactgctcactggtggcagcgggcacggatggcggctccggttgtacatggaccggtgacctcaggccggccctccctttcagggctgggcctgaccctgccctgggcactctacgcttaaggagcagtcctccggcgtccccatggcctaaattaaatccagcattggttttcaagtccccagagcctgcttcccctgattgggcctggctccctgcaagcagggcctgccctgtgccccctcgtggggaccacactgaggcagcattcggctggccccaggcatgggcagaggtccatgcggccctcggc

SEQ ID NO: 29967 - DNA, 3662 bp, Bovine  19866880504081
  misc_feature (1)..(1): n is a, c, g, or t
ngcctagaactttcacaacagtgcaagaacttctttggtataattgttttccagtttgtgggtcatctgctcagcagctctgcggtggggctaatggcaacttcctccaagaggtcttaggccacacgctgctcctcccggctctgctgcagccagagcccctgtccgcacggcggccgctcctaatccacaccttgcaggagacactcacacactcaaaggcaggtctggctcagtctcttgtgcggccccgggtcccggtgcacacaagggttttgtttgtgccctctcagtgtctctggcgagtatgaggtttgattccaaacatgattttgcccctcctaccatcttgttggggcttctcctttgcccttgatgtggagtatctttttttggtgtgatccaacattctcttgtcaatggttgttcagcagctagttgcaaatttgggtgttcttgcaggagaagctgagcacaggtccttcagtccaccatcgaagtcatactccagagcttattattaatctatattaggatcttgaggatgagcaaaaagagtttctgagtatttgggaaagtaggctcatagccccaaactgggggagcttccattaaaagaaagctagtgacacaaatcatatctccttttgttacaagtttactagactgatgggggataatttcctaagaacactgaacataatcccacttcatgtaatagataccagaggtaaatgtacactgaataaggtctggttagatggatttatagccattcaaattaccaaatcacaaatgttgatcaacaggttgatgtcaacttgaaaagagttctttggagataaagctgcagggctctctggtcttgctttcactctggttagcactttttttttgttaccaacttttaaatatatgaggcatgctttctcagattaataaatgtattcaaaatctgtagtagaagtttgttagatgacactttagattcaactcattcttaaaggcgtgaacttataaaccaaaattaacaagatgcagatttgtcaagaattacttgaattcacaaaaatttagttgtgtgtgtgtttgagatgaagacctgacttgggaggaaaaaaaaaggttgtatgatgtaatgttccatttacagaagtgaactataaagttttccccagataggggaaaggtggtgtttcgctctaatgataaattgcgtttctcccatttactcactgtggaattaggcaagttgcttcatgtctctttggctccattttctcagggataaattgtgaggataagaaagcatagcttgcgggcgtgctgcaactcggcagacacacagtgggcatgttggtgaatattagtatattcactcatagtatgcagatcatatggggaatgttgttttccacattgattgctaatgtttagggaggctcttgaaatactaaaagccacattgagaaaacagagctgtttctttacccaaaagagaaaggaaaagaaaaattgtcttcacatatttcaaagtcaatcagtagataagggaaaggtattttcaaggcctaggcggctaggtgggagccacaaagttgttgaaaggtagatttcattcattcattattctgcgccatttatgtaccagatcccggggatgaatagaacagataaaaatcaatataaggttaatgcaaaagtaatgtaaaaaccagttattgatacctagcaataccgtaggctgctttgtcaactattaaggtcccagtggaaatggcgaattgaaggtgaatgaccaaacgttactgtttagaggcagtctgtgtaccagaagagaaaattgagtagtgacctttatagttgattccagtttgtaagtatccataattctaaatgttgaaaatgcatttaatcttttctcagttaaagtgatacatttaaagcacattcctgaaagatgttgttaaaatgccttaacatgccgcttgtttacagagagaattttactttgtggagctcataaatctctccatcattttcacagtagtcatgaactgctaatgagaaaatttagaactctagagtcttgtgaaaaaaaaaaattgaagagtaatagggaacaggcttctagaacccgaggttggaactgtttcgggagtgactgatttagaggactgtctctattctggtttatgtgacttattttctctgtgttacgcctgttcatcctgtcctggagtctaacagcacatagggtagattattagcatgggttttggcgatgacagcagggtaaaatgggtttgaattcttttccatccctatttaatccctagtggactgttcctgatcctttttttccactctgtccctctcttctcagcagaagtcttggcacttcccaaagagaatggagatgctgtcttatgatttattttctcccccttaaatgattttttaaaatatctttctcacactcttccttccctctgtctcagagaaaaagcaagctcttttaattatccctaggctttttattatctcttggccccttaaccacgaagtggcttgctcagcctcttctagtgactccttctggctaccgacattgttcattctcctctatgctgaagaaacaataacctgttttttagcctgttcattttttatcacccatacagttttccttctgccctactgcacctccagaaagtttcttctatttacacatgtgtatatgtctgctttattgagataacaattcacgtatcatacaaatcacccatttaaaaaggtacaagtcagtgagttgtgcacccaccactacactgaacttttaatgtttcataactaaccaccagtcctagtaaccttttcttttttcctgtcctttgatttttctttagcatttgttgctgttggctagtgcctcttggagaaggcagtggcacccactccagtgctcctgcctggagaatcccatggacggaggagcctggtgggctgcagtccatggggtcgctaagagtcggacacgactgagcgacttcactttccctttcactttcatgcattggagaaggaaatggcaacccactccagtgtccttgcctggagaatcccagggacaggggagcctggtgggctgccatgtatggggtcgcacagagttggacacgactgaagcaacttagcagcagcagcagcagtgcctcttacttaaagctggtgttcccttgatttcttatgtaattaagggtggaaatttccctaccttttgaccattccttccctttctgtccttcctgcttcttaaagttcttcagagttgtgtccctgtcttcacgctccatccttctgtctatgaacatgatgttacctgtcacgtctatgtaggtgaatcccaagtagatgaatcctttctagagttcagtagccctgtttatgggtctggtggttatttctgcacaagtatctagtaattatagaaccacattctttccctcctctatcgaaaccaactttttttttcacacttaaaacatagtaaattaactgaaagtcaaagtcgctcagtcgtgtctgactctttgcgaccccatggactatacagtccatggaattctccaagccaaaatactggagtggatagcctttcc

SEQ ID NO: 29968 - DNA, 1133 bp, Bovine  19866880549819
  misc_feature (1)..(1): n is a, c, g, or t
nctcccgtgggaaatggacaaggcggccccgcagcaggcgtgctcacagtaccttgacgtccgccagcctctcttccttctgccagtcccacacggacagcacgtggtcgttggagtcgtccaccgcacagaggttgctgcctccattctaggaaaaaaggaggtattcacaggaagactacactcgagaataaagcagactgagcgtgattaaaaaggaacataattttaattttttaatcacgagtctgctacatctttattaaagtgtatttacccatcactgttgagatctgcttaggacttgggcagacagatggtggggacaggggaatgtgggggttaccaggcacaggagcaggagggagagctctggggcggacttcagtaccgcttccgttagacctagcctcccaggggctgcagagctctcgcactggaggagacaagtgtctgcagctccggggcacagggcacagggcgtggggctggttatcgtaaggttgtatgaggggacaggtgctgggggtgaggcgcaaggcatactgatgtgaacacgtatgtgtttctaactggctgaactagtgcttcaaagggcggttcatcctgaggaagcctggggaccacgaggcccctccagcccctgcttatggccaggcagtgggtggggatggcacagacaggcaggggaaattcaaggccaggggaggcaagactgctctgtgagcctgagacagtgtggccgaagggcctcttctcatcaccatggaaatgtctgactgggagcgtgcgggactaggcatgtgctccctctgactgagggggcctggcaagcgggaggtttcagagttcagatctgggcacacatctgggcaggttcgggcgtgttaacctctccctcttcaaccttgagctgagtctcacctccctgtgtggacaaagctgcaagacccacagggttcacacttacagattttgagaatgcgatacaggtgacggctcggtcgaaaaacccgattccgacgacatgcagcgtattcagcgtcacggaatcccagatgcgcacgtgtgggggtaactgctgcttcggaagaaaatgctgggtcactcatcatgccgggtctgcaaattta

SEQ ID NO: 29969 - DNA, 1643 bp, Bovine  19866880550351
  misc_feature (1)..(1): n is a, c, g, or t
ntgccttttttggccctgcaccctctgacctcaatgggctgggtgttcctggtccccaggcccctggaggaccaaagtgcccactgcaccacgcccctgttcaccctggactttgcctggaggggtcaaggcccgtcccgacggttatctgcctgaatgtgtccagagatagctccggaggggcgagggtcagggggcaagcgtagaggtcccctggggcctccggcccacccccttgcttcccgcagaggggtcgctccctcctctagcaccctgctgtccttgccaggagccccactgggaaggagcccagcccccactgcttcagttgtccttccaaagtgaggctctggcgaggagcagacccacgaccccagggcgtcctcagggtcctcgggagagaggccagagccctcacctgcttcccagcctccaccgccgccactgccgccattgacggggcccctcccatcacgcatgaacgcccgacgccccacgcaccgctaggtccgcctctccccgcgctgcctttgcgcctgcagtttcttctgcccagaagccctccctgccctcctgcacctgtgcttccctcattcactcagcaacccccgacctctggcggctgggcaggttgccccagaaccccaggggtctcccgcctccccacccgctctacgctgcaccccacggaggtccctaaaatgtgccaaagagcaagtgcctctcctgctcagaaaccatccatggctcccactgccttccctgagtctgacccccactgtccactcctctcaagcaggccctgagtttgtcctgtgcccttctgggggctggatgcacctgggtttcactttctgctcccatgtgaccttggaggtgatacctgctcactaaacagcaccccccccccccaccaagctatcaacgggaagcttgaaccacaggtgtctctgagctcccttagggctcccaggtctcgatgctggaggaaaagcacattgagaacgtcccaccacgccctcagggaagggtctggctcctcctgcctgcagcctccgagcactggtgccctgaccctgccgtgtgatctgcagaaaccgctaacctttggagtctccgagaggattaaaataggaaactctctccgcctcccacatggggtagacggttttcacagttcacacagcactttggctcagcgagccacggctgccattccagcattttcagacgtgacgatcaatacttaaaaatggataaaaaagaaaagagagagaaaaggtgagtggtggtggcgacaggaggtctgctccccggggcctccacgtgccaccagaatgcatcctcttgcttctgaacaggtctgaggtgggacgtgacacacacacgagtgaacgtgcatgcagacatcccaagtaatgcctgtaaacacacaaatgcaccaacatccacaaacccgcacacagccaaacactcgccaccctctgccacccacaggcgcgtcgaccggccacacacacgcgcgtaccctgagtgcctgcacccgtgtgcttctgcgcacacctccccctcctcggcgagctgggcatccccttgtctgacttgcctctgagcgaatccacggggtacacgcaaagacacag

SEQ ID NO: 29970 - DNA, 1763 bp, Bovine  19866880611081
  misc_feature (1)..(1): n is a, c, g, or t
natgggagaaccagggctgcatcccaccttctgctcaggcttctgtgccatcttcaatgatctgcttcaccttgcacgcttgtctcctcatcaccagagtcctacttgtcaatctaatgtttgttcttctgcccaaaatcctgtgacctttacgggtaaaacagataagctggctggtgtcaaggtaggcagggtagagaggctcatccagccttcaatctgcccccagaataagcactcatccgtttgttcagcaaacagagaaggtttgctcgttaatggcacttggaaagcgtcccccgctgacttccaggggtgcgaacttaacggtgaaaatactggaaagagtggtttggtcttccaagatcagatgttggccaaagccgtctggttaacaccaaaaggagctggttgaccgtgacattggcaggagcccacattttgccattttatgtgcattgtgcttagcgggaaagacagaagaaagagggatggacacagagatacagaggctgagagatggctggtgatagagaacctctggccctcacctgtccctgcctggaccacacggacacccggtgaatcctcgctggacgggcatctactgggtcagccaccaactccctccacaagttaagttcgacatcattttgctgctgccaaatctttcccccaaatgacagattattatcaggttctccattagaatagcttagaaggtcttcagaccctccaccatagtagtaaaagtcattcaagctgtaaagaaccattaaacttcaaactgggatatttctaataaatcacctatgcccagtatcttagtccatgttgaacagatggggaaactgaggctcagagagggaatgtgatttgtcaggattgcacagacagccagggtggctgtcagaggacaactgtggtccctgaaccagatgaaaagactgtaaaagcactctggggcctcgtcaccggatgcctgccccctagacaccagactcaaccagccagttcagaaagcttctctgaagtcagcaaagccctgtccatctgcccctgctttgggctatgtgggggcttctaccttcgcaggacagtggatgtccccgtgccagtaattatcaaccctgtggctccagaaaccaacatcaattacaaacagaccttgcctccagttttcagacaactggatgctggagagagtctgtgctgagaccacacgtacatcctgagggctctgctggcctctgaaatccaggctgcacgtggagcccagctaacccctccatcaagccctaacatgctgccagcacctccctgactccgtggctcttgtgcttgataaagggatggcccaggagacagaggagatgaattccaggaatgtgatctttcaacacccaaggagctggagcctggggtgagaaattccttcctgcctcttcaagtggcttccgtgctcctaggacctgacagggccggaccttcttctaatccgttctcattcacccatccaaccgctaagaggcagagagcacccacactgtgccaggccaggggccgtgggggctccagcactgtgtcgccctgcttccccaccacaccccgtgctcaggaccctgtgtccaccctgtcaggacacacatctcctaatcatgtgtcagatgatccccacccccttgcacctgcctttgacctgtctgaactcctccccagaccatgacacccatgggagacacacagaataaggtctttgctgt

SEQ ID NO: 29971 - DNA, 1368 bp, Bovine  19866880636773
  misc_feature (1)..(1): n is a, c, g, or t
nctgtgttcctgctaagattttatttttgcctgtaggacattttattgcaccaaattagagaagcagtaaaacattcttaaaagatagccatcgtttggaaaaaccatctgttttagttggaagagtatacacagaaaccataccatgaaaatttgctgctgaaaatgctttttctcccaaatgttacttttgtgctatgactatttataatgtcctggatgaatctccaaaatgttttattcaaagtccctgttgctctcccaagactgccattatgtgggaaagagaagagggttaatgagttccactcgagtgttaggcatgcctttcaaattggaacaaaaatcatcccagagtaatgaagacatcttttccacctggtggtcagactgcccgctgaagtgcagttctgatcctgttactgctcagctcagaggtcccctgtgaccccccactgcctgctgagtgaagagccaggggccaggccagccttccccgtgcgggatctcgcacacgtgtccaggcctcacatcactagcctgtgaaatggacctattctctagataccaagccgctcagtcccatcccagcctctgtgctgtcccttctctttgttccctgctagggactggactgtgtcttccggcatttccaggtcatagctctaatcccccctggtgacttatttggggacagagcctgagaagaggtaatgaaagttcaacggggtcatcaggccctcctctgatagggtctgtgtccttctagaaagagaagccttcgtgggacttgcctggtgtccctggtggttggggcttcacctcccaatgtgggggaggcgggtttgatgcctggtcagggacccaggagcccacatggcttgcggctgaaaaacataaaacagaaacagtcccctcggcacctagtactgtccgggggaccctagcccctccagaccttgcctcctcttcccagggggctgtgcactcccggaggacagactcactccctctgaaatctctggatttagaaaataggtttaacatgaaaacacaggttcctgtaacttttcaagaaggctctggtgctctgcctccgtgtctcaggccatgtgccagcaaactgcgttcctaattatccaacagtattaaatgcaaagtgtgtgtcagtatgaagaggagaaccacctcttttttggtatcttgtaaccagaaaacctctttaggatcactggactagtttccattttaagctaattagtaaattgcatttttggctctttggctaggttaaatttagctcatcttttcccttcaagtcaagctgtcagtgggatctttgcaattaaaattttcactctcaacttt

SEQ ID NO: 29972 - DNA, 1005 bp, Bovine  19866880760033
  misc_feature (1)..(1): n is a, c, g, or t
nccaccccatcagccctagaaccccacagagggctcttccacagctgcccccctacccaggtgcatttcagaagccccgtgccccagcctctcagcagaatggcctgagagtcggagtgcggggagctctcacccagcctccgttgggcagaagatagacaccaggccagttcctcccagggcgagcagctgccgcccctcctccagtggagacagggcgtcacggcccagccttatgagcgcagggctcgcatctgactcctctcgtggtcattaaggaagatgggctggcgatttccaagaagagaggaggagggctccattatgcgggcactaatgcctctcgggtctcctgcgctgctccggggagcgggtggggtatgtgcaggggcccggctggttcctcttcccatccaccctctgttctctgcgcatctgggtgatggcaagtagggcggaggaagcccccccaggggaccggctacggtgagtgaaatgagctctgtggcctggggagtctatggagcagagaaggaatcggggaacaagcgcctgcatctttgcagtcagagccacttggaattagcggagaagtacctatgccaaactgcaaagcgtttgttccctcccaggtgtgggaccctgggtgaatgcccaaccctgtctggccgacacaggagggaggtgggttccagaacgggcctcccgtggtcccggctagatctagagctctcaagcacctatccttggaatgatgtggaaggtatggagtgaggtttccacagcaggaagggaatttaatttcaagactttgccttattctgtgattgtccagctgacatttttctaacctttagtttatgatggccagagtagatgtcactatttttaaatttccttattcagcaagatggccagagatgtatgaagtctgtgagtcacgtttagcaggagttctgggtcctaaaggactcacactgcaggctttggtcacaatagccctgg

SEQ ID NO: 29973 - DNA, 949 bp, Bovine  19866880839401
  misc_feature (1)..(1): n is a, c, g, or t
nctcccggtgttctcgcccgtgactcccaggccagatgaacggctgtttgatttagagaaacccacaccctttgtgttcaagttactctgaaggggttgccttgcttggatggctctcttctttttcctccagggagaaagggagagatgttcttggaagtaatgtatgtttacatcaatttgcaaattcctatacatagagatatattttttaagtgtgaatgtaacaacatactgtgaattccatcttggttacaaatgagactccttcagtcagttacccaataaaatcagttctgaaatggcccctttggtttgttacgggcagaagagggggcgctcctggggtttgcagcccaaaagcaggtggtcttcctggggcacaggagcagggcatggaggaagggcccccaggagatggcccaggggggccttcaggggcccgccccccacatcaggcaccggccgggctttctccggaggaagtagttgaatgtggtgctggtttgggattgtccatctccctccataggcaggtccctgggtcagacctgggtttaaattggaaaccctttcccctgctggtctgactggaggccctggagcagcaggcgtcagccccactatccgcgccaaggggccccatcaccagagacaaatgagcactgcgcacggaggcttgcaaggagcctttatttatctagcacaaagtatacactatcacaatcttctctgttaactccttttactaaaatagttcaaatcaatgtttttaccacactatcaaaaagttctatttctttttctctccccaaatcaaagtggttcaatagaaggtagaaacgggcacaggagtccagggctaccggcgctgcccggagctggggttgggtcggcccgtgctccagccatcacgtcccacggaagacagtgtggctgccggcccggg

SEQ ID NO: 29974 - DNA, 551 bp, Bovine  19866880853204
  misc_feature (1)..(1): n is a, c, g, or t
nggctgacagcacccagacggcaggagagccgacccatttcagaaatagcccatgcactgtcagggaagcatctctttgtcttccctgatctgtctttctgtcggctctgggctgtaaggcaagaagcaggcgcgctcttgtcttggaatcagaggctccggggagccgcccccacccccccaccgccccccacaagggcccgattgtgcggcgcccctgaatgggcccgccccgccccaagcgcaccggctcctgtcctaatgagcccgctctgggagtggccctttgtggcgggttccggccacgctccctgtgccaggggctcccagaaggcttgattcacatctcctggagctccgggggtggacaatgggagctcccgccctgccctttcgccttttcctctgtgttttctgtattttgggggaatgcacgcacacaccccacttctatacgggacagaaaatcaaaccacaggtttctcgccctctctgcagcttctagccttggtgggaggagggccgggttcccagcccctcctgtgggacct

SEQ ID NO: 29975 - DNA, 839 bp, Bovine  19866880870359
  misc_feature (1)..(1): n is a, c, g, or t
ncagcaggagagaaaaagaggccacagtcagcccaaagccctccccagcctccccgcctcacccccccccgcctcaccccccaacacatcccggcagcggcctgaccccgcctaccaggggcaggttgcagctggggatgctggggaagtcatgatgttccatgtggtagcccacattgaaggtgatccagttgaggggcccgtagtaggagtaggtctcgtggcccttgaggaacatgtagtgctcagccacaaagtggcccgagatggggtgcaggcccagacccagcagggagctggccagcaggtagaccatgggcttgagcccccagagggcatagatggtagcgtcggccgccagctgcaccagggtgttgcacagctccatgcgggtcatggccttggggtgcacgcagagcggccgcagagtgtagaagaatggctgcagggccagccagagcagcttgcgggccggcgtgcagaagagccggccctcgaagtacgtgggcacgtccacgtccagcccgtcgccacccaggtagcggtggtggtccacgtggtacttcttgaagctggcggcgtagggcaagcccacgggcaggttggcgaagatggcaaaccagcggttgcgggaagggcggcccgtgccgaaggcggtgttgtgcgagatgtcgtggatggccagcgtcagggagtggttcacgcagcccccgaaggcgtaggcccagaagaagagccagcgccacgccagcccctgcgccagccagcaggccagcagctgcgccagcaccattgccgttaccgtccacttgaggtaggggtccggccgcatcagggcc

SEQ ID NO: 29976 - DNA, 3083 bp, Bovine  19866880977553
  misc_feature (1)..(1): n is a, c, g, or t
ngaaaagtagctgagagctttctttttgattaagcaaattattttatattccgcttcagttgattaaaaaaaaaaaaaaattcactctcgtttcaagagtccataactctttcgagcactgttctatcaaaaaataaaaattaagaaagtggcactaagatgttattggtatttattagctatttctctactggcattaaaatttctaatggaaaaaagtcataaagaaaaattcttctgtagaattacagtctaccttgaaacaaaaccgggtatgacactgagaaggtttaagggctgatcaagttgtgcagggttgtctgcaccagattctgcttggctcccacctctgagaaccagccaactgagagcccagcaggaaaagcaagaaaatgcaaatctacttctttttccaccaaaaaaaaaaaattatttgccttatatttccgtaattaaatgctttactgatcaatagttatgagatggatttcattcttgtttttatcagagaaaatgctgtctcactttctgagaataacaccattaaacatcattttgttgggagcagtcaatatctgaaaacggatttccagtgagagagcagtttaaccagtgcacagcttttaatccctacctataatataggcaattatcaaattgttcacttggaaccaaaagcaaagaatcgactatattagcttaagtcaccttttgacgtaagatgacttctgattatagtcagagatgagagaatattttagaactgggttttgaaaaccaggtctaagtcctaacccagagtcccgaaagctggggagcacccctgttcaggggcagggacggcagtgagagaagtgcggggaagagagcctgatgggtccgcaggagctcggggaggccaaggaggcaaggcggcaggaggccctgggcaggaggacgggcggatgggacccatcagggtgcgttgccggcggtgggagcgcccagacccaggggcctgaagatctctcaagtgtggaacatccttggtagacgccataagtgaagacagaggggaccaggacgttatctcagaggcatagggacattgtgtaaacccaggggctacacccgggaaggaaggaaagatggggatggagagacggcaccccgagcgatgtcacaagccccgggcacaggccatcaggctcgacttaactgctggccaggacctcagagagaccaagggaggcaaagacacaaagaaactgagaacgagacagcaaggaacaggagaaatgcctgtcaccaggtctgagctctctcgtagtaaagcagcaacggggaagcctgggggcagctcagggctgcggagactcggaaccaccacctgggagatgagatggtcagcaaggtgtgacgaggcatctctctggccaggcgggggttggcctgtctcggaactgacagtcaccgggacactcctgatgatgctcttgggcctgggagcagaggctgagagaggctgacatggaggcccgggatccgctataaagggtagtgcatacgcctccttcctaacagacgcgagacaacaagggttcaggtttagtctcaagctactcagggctggggaaggcggtgcagagagaacctctttctaaacacttaatgaatctgctgcagaaagaaaaaaatctgttttcccatctgcacttgcagacacctataataaagtgacattttccaacataggtttttctagatcattagctttgtcaattaagactccatgctcagcaaaatgaccattgtttttttcagccatcttctaatttctaaaaaaaaaaaaaaaaaaagctgcaaaacttgcaagtaatcttatatattcctgaaaaaaaaatgtgatgtagaaaagagtttccccaattttcacaactagtgtttggtactactttccagagtagaatgatttgcctcccgtccagtgattcactttgcccaccctaagacagtttaagattcctcttatttcaaatcgttagatgaccttcagtgacctgtgcttttctaacacagaagtctgcaaaataccacctagcatttggcttcacaccatattaaactgttcttgagttgctccattcattgattcattcagtcactcccttgttcaacaaatactaccgagtgcctgctcgggagtgaagtgctgtaccagatggggaacaagtgaacaggatgtcctggccttctaccctcctggagcttcctgtctgctgggtaagacaaggtcacagacaggctgagaggaggaaggcagagcagaggggtggtccagccaggcaggtggcagggggtgcggggagggaggaggggcaggcagaggcagccctgggctcctctgctgaacccgtcacatacgaggagctgaccaacacagactgaccccggttcactgttcccacttcctgttcccactaggggtcaagccccaagggggacaatcagtaaaactggttccccacactcagggcaatgacatcatcgcaggtagcctgtccggatgggcaaaacatgatgtgtcacagcagaccacatgccgtgtgctggaatcacacagaaggggctgcagacactgttgggaacaagatcaggcagtgactcggagaggagggggcacatgaatccggtctctgagcaggaaggtaggaagcgtcctgggcagatagcaccggcaggtcggttcacaaggaggggccgaggcgtgctgggtggaaacgcacgtgcggagcagcagcaggcggaaggcaggtggggggcgagggccctgcaggggagggtcagggcccagggcactggctctgcagcggcctccaccatcgctcagcagcctcacccacgacaggaagacagtgcccggtcccctaggtttgctggtacttgaggaggcatcagcaagttagtattcttccggggcgggggggagacttcattttagtagacgttggtaagttaacagaaatgatgaaggtcttcttggagctgcttttttatatttaatattttggcaacaccacacagttccccaaccagggactgaa

SEQ ID NO: 29977 - DNA, 1306 bp, Bovine  19866880982149
  misc_feature (1)..(1): n is a, c, g, or t
ngaggttccacctccagtagtttccggtccaggacagctgatctgatgagtacgaagcacacgtagagagcaaggccgttggagaggcaccagaggctagcgctccggggggggggttcactgcatcctggggaaatcgggggagatgccagggaggaggggccagcccggagtcaagccttggcagtaagtgggaccttgctgtgctgagatagatagagcagtcgtccaccagaaaccagcctgatccaagctctgggggaggcgtgcagccagccaggaggcccgtgggcaggaagggcatggtgggactctgggtgggaaagtagtccgagctagactactgtgggccttgaattccagactggggaactgtgactttagtaggtcagctgacacgatgggagagtcttatgaagaagactgaattagacataacaggaagttagtctgctggggcttcttccttttgctgagatttactcagttctgcacacatctcttcctcactagtttgtgatactctcagaggagagaccatgtcaggatccactttgtactctggcatggcacctgactgctgtgttacgtgtggtcaggattctgttaatggaggggcacgtagaagagcaagcaggcaaaggaaagctggagacagagcagtgagaaggtcgctgtgatggaggagctgggcctggagtcaggcagcaggaggaaggaaggagaactcgggccgtggtacggggtgaacgctctctagcaaggctactgggcagggaggcagtgtctctaagagcacagcatgaaaagaaagtttgtttctatgacttcttccttctacatgatttacatggcatattattcagaaaactgtatttaagataatttgtgaagccaaattggaggtcgcagggtggaatgtttgtatgtggactttgcttcaagcttttagagtgccctagtgtttgtgaatgagaagagcaaggcaggaagggaggcgcccccggttgttgagaaggccccaaatctttctgtttctgggtgagccttgatagtgagatcaagagcttttgtcttccttttaggtaacaggagccttgttgtctctttctggctgggaaagtagaagaaacaccaaaaaaatgtaaagatatcatcaaaacagcacggagtctattaaatgatgtacaatttggccagtttggagatgacccaaaggtaagaatcataacttcctgtgctcaggtcttgattcctcagggcagcattaaggcagagttcctttgtgttgacaatggctgtggcc

SEQ ID NO: 29978 - DNA, 925 bp, Bovine  19866881041550
  misc_feature (1)..(1): n is a, c, g, or t
naaatgtatatgaacaggacccaaataagtcttaagtaagcaggtactattatcattttgcaaatgaggaaattaaagctcagagaggtgaagcagctggctcaaggtcacacagctaataagcataccaggctttggacacgggtcatctcagctatattttaaaacatcatgccaggtgtgtggcttccctgggtctctctgggcctcagtttccccctctgtacaatgggagaaacaggtggtcatgaggctctgtaagctccccaggggaaagagtctgacccacgtcagacttgggaagtatggtcttgaaccctctctgaaacctgtttgggatgtggatttatcccacccccctttctccccaacacacccacccctctctgggggctcagtgggtggaggcagcaaggcttcatggggcccagtgggctgacctcagctggatccccaggtcccctctctccagcaaggtgacctctctggccaggtggcacaatgacatgtcctggcttctaggagacagagcggtcaaaggtgctgttcgggttccccgacctttcacctctgcggtccctgaccctcagaactgctgtcgggtcacttacccgctcatgagtctccaaaaacgtagaggccgttcaggttggggtactcgcagccccggtacacgtagcccccagtcaccgacttgcccagtttgtgcgggtaggcgaaaatcggcagcacgtcatctgcagagtggggagacgctgggtgagcctgcgggggtccccggaggctccgcgggtggtcctgagtcctgcggggccaaggggtgggaggtccctaggagggcccgagagggggccccagagagtcaacgagaaagggtaatgcttaaagtttataaggtacggagagggcaaggatttgccaggca

SEQ ID NO: 29979 - DNA, 1357 bp, Bovine  19866881079336
  misc_feature (1)..(1): n is a, c, g, or t
nctgctggccttgtcgtgtctgtccgctccacacgagctggcgctcgaacccgcgccgtctggctctgggacctgtgcctttactgtcttagtcataggaggggctttgtggctgaagagagttctgtggtcagttggtcagaaaaattgcacaaccccaccccccacccccaacccgcagagtagcatgaagctctggtaagtcctgcaggggcagctattacatgtgtgaattttgcccctgagtttcccatgtatgtttgatgaagggatttttgctgcctaacatttgcatgcatgctaagtcgcttctgtcatgtctgactctttgcgaccccacggactgtagcccaccaggctcctccgttcatagcattctccaggcaggagtactggagtgggttgccatttcctcctccaagggaatcttcccccgccccagggattgaacccgagtatttctgcatctcccgcactgtcaggcaggttccccaccagtagcgcctaacacttaatttttagtttaaactctggaaaaatactgctgtatgggaaggagaatctgagcctcggaattagaagagggaggaaagagagttgttgttcagtcactaagtcatgtcctactctttgcaaacccatggactgcagaatgccaggagaagagaatattcagggggaaaatacataaatggaagaagataataaggcctgagatttgaagtctcatttaggtatgagttcaggcttctgctcttaccggctatgtattgtaatttggggcaaatcattttttattctttttgggtctcacttgccttatctgtaaaatattattgtgaggaaaagtgtgattgtatatgcagaaatgctttgttaacagtaaaattcatacttttttcaattggtgtttaccaagttcatttccactctagtacccaacatggcatctaccagctatttgaagaacagttaacagttgttggatgaatgagtggattttgtctttaggtctcagggttctgtagctggtatgttacaactgagaaatgttttacaatgagactttgtttcttgaattttctttctcaattgtgttttgtgtgttttaaaaatatttatttatctggctgcattgggtatcgaagcacataggatctttagttgtggctcatggactctagttgtggcgtgtgggctcagtcattgtggcgtgtcggcttgattgatgccacatgtgggatctgagttgccagaccaggggtcaaacccatgtcccctgcattacaaggcagattcctaaccactggaccaacagggacgtccccgtaaattgtatttttcctaggttttctgt

SEQ ID NO: 29980 - DNA, 1941 bp, Bovine  19866881123301
  misc_feature (1)..(1): n is a, c, g, or t
ntgcattccacagtttaagtgaacttaaaatattttaaaataacaaaagcagcaacgctttcccacctcctagagtttgaggagagatgggctgtgccacatttctagtatgtcagacggtgagaaacttcatttcattataagtgaaaggaaattctagcaatagaattctctaagtttggaagcttttctgtggtacttatcacagtttggggtgtagggaagttcctgtctgctgaatttgtacttttatgagaaaaaaacgtgagcaccgttgtggtcaagttccataattaaatggaaagcatctttaggcgtcttggagcacagccttaacatttcatctattcaaagaagaggtaatgagaagcttctcccatctttgctgtgcttgaccatggtatagggttttgttgttgttgtttttaaccagaaacaggattgcctaatcttcctagttagaaaatgcagcaagagaatgcccccgggcaataggttatttttatattaaattgcatcttctttaatttcattttgattattatcacatttttattatcacaacatcacaatattgtgtgactgtatttccttatgttgacttttcttccaaagggttaaaactgggttgagggttagaggggagaagcaggcacctgggagctagcgcccaattggcagcctcgtgtaatatataatttgcctaaaatcgcgcgcagagcaccagcttttgttttctaattgatttacggtttgagccacttttacctcgtcccccactgtcctgcgtaccggtgccagcgagtacattaccgtgagcgatgataaattgccgtgcacttgtgatgctaatgcgtcaagagtaaaaactgcatactacatggggcttcgtgcattaaccgtggtgcagagacagtgcagccgattgcatgggtgtctcggaaatcaccgtttgttcatttgatcacttactgcaatctgtccatcagcctgtaatggaaaccgaagattaaaattataccgttatagcttttaatttcttaattgagacaaagttttttaagtgctcaaaaggtctaaggtgtgtgtggggagagtgttatggatcgagaacctgagatgcttaaaattttctccagtgtgtgaaatttgggatatttttatcaaatgatcttttgtctagagaaaaaaaaaagtagtgaagtttaaatgtgccgatctcaattttatcttcattatatttatttgtaaaatttaattcataatttacagaactgtattttttcttgattttctgtatttgagctgcatctggcatgtgtgtgattcatttgcacataacaaattgatttctttctaaatgattttaagtcagaggttaatgagagaagtttcagtttattctagtacctttaattgctccttttactgaggtaagaagagctttggactctttgtaagggctgtcccacacagtatgagacaggatgtggaggcaggtgggacctgacttgggctctgggtttctgtgttgatcagatactcatcgtgcgggtgtgcctaccttttgtaaactcagtccaccttaaattttatttgtgtgccttgtctgtgggccctggtatcagaatacaagcagcagatttatggcggctgctgggcaccacaaattaagttgacagtgatgtatgagcacataatagcacgatgagccctcggtagcgcggctggacgcctcctgcttcatttggctcttgttaggatccgttaggcagctaaataatgaaattctgctgactgatttctgttttccctttttctcttttcacctctgctttctaaaacttcctcattcccagacccatcctcatgcccacaaactgcccttgaaggactccttcacttacgaggactacaggttggtgtgtgggagggtgatgg

SEQ ID NO: 29981 - DNA, 3825 bp, Bovine  19866881162354
  misc_feature (1)..(1): n is a, c, g, or t
ntggtgggggaataggtagaataagtgaggaggacacagaagtccaggaaatattctacttatcagattgggggcaaattctggttattcagcttattaaatttttcaataaataaactttaaaagtgcatgtcttgaactgataaattatcataaatcaagaattatagctaattaaattctatgaacataatgtctattaaaaaaacagttaaataggttcaaagactttaattactgtaacaatacttctagcaaataagctgtaaataccctcccctaaacattctccttaaaacacataagggaaagtatatcaaaagtttgggctgtggcaactcagagataaaacaatacatacttaatctgattcaaaactaaggaattctgttcactgattaggaatggacattcataatgaccaggcagtaagcttccttttccattcatgaaagcccaatctaagcaaaaaccctatgataacaaataaggcccaaaatagtaatttccagtaagttttagacttgtgtaaacacaagtccagaaaattcctatgcccacactcaagggaaatataaatctcccttcatgaagagaaatacaggcataaatacaattcaagaccttaagaaacaattttgcatcacagaagtagtaaagttgcctccttcaaaataaacttatatcacagtctaaaagaatctcagaaaatatctcactcttattctttttttttttttaaatcacgttttccttttaataaggctttttactcaaaagtgtagctttgaaaatctctagcttgttgcgacaaccagagaagccggagcggcctcgcctgaacacagccggtgccctcacgggtgctccgagccggggtggagggcgaacgcaccgcttcacaatcagagccaacgcggaaattcaggggcaggatacacatgtcctactttgattccaggagggaggacaagttcttagcacagtaaaacaaaacacaaagtaaacaaatctttagatttcactagatatgtgtgtgtgtgtgtgtgtgtgtgactcttattcttgattcaatgtaagaggacacattatctttgtgaaacagaagttatttgttagaaaagagaagcaaaatctttatgaaaccacatcataaaaattgtagaaagaaagaaaaaggaatagaagagatcaaattagtaaaaagaaacaaaacaatccaagtgattggcaggaaatatggtaaagtgactatatgtatgtacatttatatctatctcaaatctaccagaaggaaaaaaaaaaaaaatcagattcaatgaagacatattcatcttcaacaaaagtgacaaatggccacatatccctgagcctgtgagacacaatggaaataaccaaatcaaagtagggtggctacatattacattctcagtctctaaattcaagtaaatacaaatatctacttgaaagatcatcttcattgcagaaaaatactgaagacaaaggagctttttctttaggaaaaatcagggaaaatcctgtcagaagtccatttctacaacctaataatggcatgggaagtgagccacgtggcatgctattttttcccaaaaatggctgactgagttgagagagtttcaattactgagcaagttgatggtgcagaaagtagcactgatccaacacatacctgaattatggccacccagtgacctaactaatgtcacctttctctcttccacaaaatagattaaatgaaaaaacaataatacaacaatgtccttaggtatctaacttaacttataaggaaggcaatgactgtaacagtgcctcattcatgagcaaatttcctatatccaggtactgttctatatcttaggggtttggattacacaagtgtactacacactcatcaaaacccagttaactgaatgatcacttccagaatggcacattaagaacctatgaaaatccactttgttaaaagcaaaaacaatacctgaaaaaattgtcaaaatcaactttttcaaaactccaaatatttacgtcttaccaataatccaaggagtggttatttaagacacatcgatgagtcttttggtgaaaactgctagctctggtacgtgttcacatacccctatcccattcccctctcaccagctctagagaagccttgaaaaccaacagccctgcagtcatggtgaaaactgacagcctaggagttgctggaataagtttggagtttcccagaagttccttccccatagaactgccattactggatctgacagttccctagaaacctccacttgcagggtctgtctttatttgacctaactcagaatttgctcagtgtgaaatgcattttccctgggtcatttgtcagaaacaatcagtggcagatgtttatcatcatagctgactgaggcaatgaaaacagttggaaaaaaacacagatctgtcccaaaacttagaaggaaaagctggagaatgggaggtcaatagtggttttgaaaagctccaacacattcacgagaatcaagaagatcacactcctgttcaggactgtattcatactcaagaaagtactgaaaaggccctaatctctcatttctggctgactttgatattcagtgcaagcaagagttacaagctaaggcagagcagtcaacttcctgtaggaacattaaaaacatagcccatgtgcacacagaaccccttggcaagagctggaagactcagtggttccagacacttaagaaaaatgtctgatcatcaactgaccattagattaactgagcacagacttcagaggcaacacaatataaagaatacaggttttaccgaattagtctagggaagtcactacataaacaacaaaaaggcaaaaggaacaataagttgtgggtatgcgtgcgagttagtcgctcagtcctgtctgactttttgcaaccccacagactgtagcctgccaggcttctctgtccatgagattctccaggcaagaatactggagaagattgccattcccttctccaggggatcttcctgatccaggaattgaacccaagtctcccgcattgcacgcagattctttattgtttgagctacagagaagttctaataaaccctgggaagggagattaatttgatttccagatctgccacactacattatttaaaatgtcctgttctaaacagaaagctatgtgccacaccaagaaatattaaaatcggacctaaacacaggaaaaacagctctcagtagaaactgtcccagagaaagcccaagtcttaattagacttaccagactaagatttaagtcagctattttataacaaatgctggagaggatgtagagaaaaggcaacccttctacactggtggtgggaatgtcacttagtgcagtcactatggaaaacatgatggcacttcctcaaaaaactaaaaacagagctgacatatgatctggcaatcctactcctgagcatatatctggacaaaaatacacatgcacccctatgttcacagcagcactactcagaatagtcaagacatagaaacaacctaaatacccactgacaaaggaatggatgacaaaggtatggtacgtatatgcaacggaatactactcagacataaaaagaatgaaacaatgccatttgcaacaagatgaatgaaacctagagattaccacactaattgaagtcagaaaagagaaagacaaatactatatgatatcaccgatatgcggaatctaaaatatgacacaaatgaacatttatgaaacagaacaggctcaaagacatagagcaccgacttgt

SEQ ID NO: 29982 - DNA, 1776 bp, Bovine  19866881197010
  misc_feature (1)..(1): n is a, c, g, or t
naccttggctgcctgcagagcagggcagaacagaggagccggctttcggggtggtgtctcagttgtggcacgtccttgcggtggggtccagcactggctgtatccttcattctgtgccctctggaggggaaggcatcattgttatggactgcaaattattcccacaaagaacctttcgcggacaatgggcagctcacagttaaggataatgaggatagagacgatcagacgagtattcatggagagagaggcctttaagttcacttggcagatggaggcagtttcgagtgcgtccctacaatgtgccgaggacaatgaaaaatgttgaaaacatgtcctccctagaagcatcagttttccctcggcagtgtcctgcgtgcgtctttcccccggcctcccatctccacgggagagttctcctctcccacggatctcatcgttcctgcccccactttactcagaccccggtcagtgctcatctggggtgtgttgtaagggcagcggccccaaactagcctttccgcctccggtctcagctcctttttcttactcaacacgtgcttgagtacccaccgagctcctcactacgcaggtctaagggttccagccacacgaggggtccacgtggccctggcttttaaaaggaagcgcacgttgcccttcaggagctggacgctcagcatcgtgttctcggtcagttgtttaacgaccctggacatagatggtgctgagaagcaggctcaggagaggggccgggcatgggacccagaaaggcctgcgtgagcttttccctggggagtggaagccattcacccacaggggcggggagagggcaggaaagaacattctagactgggtgtgaagccctgggcgggaaaggacctttttggaaactgaaagtcttcccctgagagaaagagaaatgggacagagttgaagtgaggcggggagtgtcctgtggggcctttgggccacattaggagtttggtcttatttctggggagcagagagaatgtggtggagaattttgaggcgatagagtgacatggtcagattttcagggagttttggagactgcctctccccgcagtgcagaggaggggctgggggtgctgctgagggcgagaggggggctccccatgaacccggggagaatggtggcaattcccaccagagggctgcttgggggctggccgcacctgggctttggcctttacaggcaggaggaggaggaactgaggatgcctcccgggcccctgacatgtccgcccaagtgagtaccacaggccaagctagaaggagctggaagggcggacaggcagacaacggttcagctggggcttgtgggacctaaagccgaggggctgactggctcgtgggaggcagaaaccggagccagaagatgtctgtcctggagaggagatgtttgagagccatcagtatgtagattggggcttccctggtggctcaggtagtacagaacctttgtgatgcaggagacgtgggtttgatccctgggtcgggaagatcccttggagaaggaaatggcaacccactccagtattcttgcctggagaatcccatggatggaggagcctggcgggctacccgtccatggggttgcacagagttggacatgactgagcgggtaacactttgacacttcacacttgcagtgtatagatggcaccagaatgcatggcgaaggtgagctcacttaaggtggagttagaatactccttctgaaagatcgatctgagccaggaaactccctcc

SEQ ID NO: 29983 - DNA, 1470 bp, Bovine  19866881241144
  misc_feature (1)..(1): n is a, c, g, or t
ntgcatcaaaacttacctcctcccttctcagggatcttacacaatcaactaattggcgcctccctgcatctggttccttcctagtaatacttaaataagctcaaaatctttaaaaaaaaaacaaaaaacaaaaaaacctcccttgactccacatggccctccaatgaagacctcccacaagaatttctctgttcgctctgttttctcatcctccaccctcagccccctccaggttggcttctgctcttttcagtctccccaggtgaccagcacgcgtgaaatgatgcttagagggtgaaatgtcatccttcgaggatgaaccgcaaaggagcatgtgtgagtcagggtgagggttaagctctgttaaccaaggtgccctcagtggcttcatgaagatgggaggggtcccacttccatcgggcctgggcgagcaggctcctttggtgggcggctctgttcctggggatggctcagggattcgggtctacccttccatcctattttttaaaacgtatttatttgtttcagttggaggataattacgatattgtgatttgccatacatcaacacgaattggccataggtatacatgtccccctatcatcctgaacccgcctccccatcctatttgtcactgaggaaagtcatcatccttcctgcacagatgtttttccactttaaaagcatgggctttttacagaggacaggacccccgtgagctatttattattatcccagttttggagatgacgagactgaagctcggaggccctcgtcaagcagacaagcatcccacagtcagaaaggcatgggaccaggaccaaacgcaggtcccgcctgccggcccctgagtccattgcttctgacgggcggtcacctttcacagatgtacagccctgcctgccttgaccccgtggccaggggaagcctgccagcaggtgctgtctttagaccagaggctcagaaagtccccagggtttctggaactctcttctctcctgctctggagttcttccagcgggcccgccagccccctcccacatgcgttcagggttctgccaagagcctttcaaatgttccccaagaaaaggccagacccgctccttgagctccgcggctggccagacaccaccctcttcggtgctgcatggaaataaaacacggaggtgacaagccgcttggaggagtggaaatgtcagcgcgacaccctgagatctcctccgagcacgtaactcggagatggtaaaggttgcccagaatgcaaactgttagctaggaaccgagggaagttcctcctctgggttctcggagccaggagctccagaagaaacgctgtgcttgccaggagcccaccccgcgctcaggcaagctggcgacaagtgccagcacccctgcgcccgctcagggctcctgccctgcaccacttgtagctcctgtgcgctctgctgtcttgaaccctctggagtccc

SEQ ID NO: 29984 - DNA, 1077 bp, Bovine  19866881325274
  misc_feature (1)..(1): n is a, c, g, or t
naaaccctctgaaaccactcaggccgagtgttacacggtgcccacaggacacagatgtgggcacctaacctgcctctacctcattcttgctcctctgatcacacttcctcagaaaacgctcataaacaggaaaatgttaaaagctaagctcaaatgcaaaacattttcctgaaaactcttgtggatggtaagaaggaggtacattaaaagtcaacatttatttcgagttaaaccccataacaatgactcctgagggaaccagataaattggacataaggacaattagtcaacaaacgtttcgcatccatgtgtaaggctctataataagcgctctgggggagttacaaaaagagacggcaccgttgctgctaaaacagcagcgaggattctaccgctgggccagaacaggcactgtggagggccacaggccccctgcctgccagggcccttccctctttaaacagctgcctgtttcccgccccacgttcctgctagacctccaggccccctctgttccctaaggagaagactagatgtggtaaacaacgaagagtaaccagttacgtgctggtgtgtaactgtcaggttagccagtcttacccactcttccatcagcaccaactgtggccctggaacacgggagtctgtccttaggccatctacagtctatctgaggagacgtgggaaggagcaggtgggggaatgtgtctatgggggcccacgctgaattgcgggggggaagccacaagagaggacgggagcactaggggagggacagttacagccagtaccgtacctgttaggtaacagttacctgttggtaccgtttctccgtttttataggtggggagactgcgggctggggaagataggtaatgtgccaggttccatggctaaccagctgggatctgaaaacagtctgttttgcctcctgctccccagaccagggacccctccccatgaagacagatgcacacgcccccaaaagctgggcagccgagtcaggacttactctgcaaaagctcactggtcaggttcaaggtttcttcggggacacgcttgctgcagcaccagtg

SEQ ID NO: 29985 - DNA, 1399 bp, Bovine  19866881374037
  misc_feature (1)..(1): n is a, c, g, or t
ncttaccaaagcaaagaaggagcctgttcacaaaacaccatgagggcgcttgccagaaaactgcccagctgcaacgagaccaccgtccacaatgagcaaaatcagagccgagaccaaatcatgagccagcagacacacttccagggtttccaccttcaccgctgcaatcagtgcttttttaaagagcagtaaggctccaggagtttgacaaaggaagaaaaacaaaaggcagcaagaggctccatctggataagcagttcctagtcagtattcagaactccacaccagcaccagcacagctcagatgaggcgcaaggtggggtcctcgccaccttcacacaccatcaaaccgattaccacgctgcctgggtgcctgcagtcgacaccccagaccggcaccacctcggcgcgcccacccccacgaccgggagaaaccctgccgtggaaaagaacccttcttttatgaggaccagccggagcctgagctgtcattacacagcaaaaacctagagaggacaaaaacccagcggcaggctgatggaggaaacccaggacatacctgaattcttcaagtgcaaacatgacctagtcggagacaatttcctcagactgtctgggggcctttctggtttggaggaccaccatttagtcagtcagatggtgcaaaggtgcaggaaaaagaggcggggtctgcacaccccccagtattctgaagtgaaaggctttctgcagacaggggcctgcagcctccagctccgccagctgctgacgagcggcagctaacaggggaggcagctaaggaccatgtgatcattccagcaaggctgattaatgcagtgagcgcggaggctccaggctgggagctggattagccgtgagaaacaagtggaaccccgggcaggcctgggatcctgcgggaatcacagaacacgcacgcccccaccaaaccgtatgggggccggggcgggggccagggagcaagagctgcaagggaatgagagtgtgccctgctcccctgagctcagcccgctcacctcgcccgcccgtggccactgctgtgctcgggttcagatgtgaggaccaccgtgggaagcgcacgtagtggagatggatcctgggctacattttactgaaaactcttcaggactctgtattccacccttccactatgaaatgttcttttagcacaaacacagaggccgctctggaatcccaggagtcatggtttccggccagagctctgccacgagcatcacctgtagggcagccgcaaagcgtgacctcatttatctcagtctttgtttgctgagtatttatttcagtatttgtttccacacataatatggaccaggcttcaattccttgaagtacaaaagctgctgtaacagtttcagaacag

SEQ ID NO: 29986 - DNA, 593 bp, Bovine  19866881778247
  misc_feature (1)..(1): n is a, c, g, or t
nttccctacaagctctgagacgagggcgagcctgtctgcctcttgggccttgatgcacccagcagaggggcagagcagcccacttgttcagcaagtgtgggttccacagcatctccgggcccccgaggagctcgcaggacaccgaggggacagacagcggatggccgagatggagggacgcctggaggctgtgggtccctgagcagatgtccctggaggtgactctgggtgggagtggggggcaggtgggatgttgggggcacaaagtgggaagggacccggaggccacctggggctggtggcggggggtgggccctggagcggtgggcggtggcagggcccaccgcgggcctcagggtgcagccagcctacctgcgccaggagcttgtcaccctccagcagcttcaccttggtctccagctgccgcatgtaggtggacgagggatctgaaagacacaggagtcacgtcacctgttggcagactgtctccagcaggagggccctcccctgcgtgccccccgggtgggccttggggcctggtttcccctgtccacctgcagaaccgaggtgaggggtgctctcaccagcttgtt

SEQ ID NO: 29987 - DNA, 642 bp, Bovine  19866881790103
  misc_feature (1)..(1): n is a, c, g, or t
nctgacttatgtgaaatttaatttaatttatttttataccagcagctgtcagttcaaagaacaacaacaaagtagccatctgtgcttaatttcatcaatccgctgccgatggtcacgtgagcgtggcttttggactgaggcagcgcacgtggccagatcccagcgcccccaggcccctgccccccacccctgagccgtcggtcccgggcaggagtctggtggcgtgtgcggggagccaaggggcacggcgcctgggcgctcaggccaaacttgtcactagtggggcaaagccagcagtctctttccgagacacagaagccccctgacttttcatgttatctctgctagtgctgagtaggcttctcagccctgccgagcagatggggaaactgagtctcagaggggtctctggcccggggtcacatagctgataaacagatccaaacggtggcttgtcacactccagaacccatgtcctcatgagccaagtggcttcctgcaaagctactgaagctcccgaggacttaggggatcaaagacagcagggtcctaggtggggagccgccctcccgtctcagacccgagccccccgcaagccaggaggcacgtgatggtagtggacgggatctctctgtgtggctc

SEQ ID NO: 29988 - DNA, 1456 bp, Bovine  19866881970843
  misc_feature (1)..(1): n is a, c, g, or t
nattttatataatatgttaccccatttagtaaaattttctcagtacggttttcaaacggtaagcaaaagatttcaaactcataaggaaactggttgacataatagtttaaggtttaaaaagagtgtcagcagtgtgacatgctgtctcacctcggttttatgaagcttctggtaatttccatcccaagaaatgagcttgcggtccttccctcctcccgacacaagcgtgccatcccttaacatacaaagtgcgaaaataccgccctcgtgggccccttgaaccgcgtagcttattcgattcgtacctaaatacaatgagaaaaccatgcttaggacattgtccaaggcctcacctctgcccatctcattttttgttttaaaacgagattatcagaacatcaatgcagtgtgaatctataaaggattcaatttctacatgttctcagagcactagataaacaagacaaacgcagagaagggaatggctacccgctccagcgttcctgccggagaacccacggacagaggaccccggcgggctgcagtccatggggtcgcaaagagccggacacgactgagcggctaacacagacaaacacgaactgggttactttctaatcaaagaacacagggcaagggggagggggatgaacagggagcctggagtcagcagatgtaaacgatcacgtgtaggatggatacacgacaaggtcctatgtagaggggctgggagctgcattcaatatcctctgacaaaccacactggaaaagaatatgaaaaagaatacacagggcttccctggtggctcagtgctgaagaactctataaagaattcgcctgtcaatgcaggggacgtgggcttgatccctggtccaggaagatcccacaagcctcagagcaactaagcccatgcaccacaacctctgaagcccgggtgcctagagcctgtgctctgcaacaagagcagccactgcaacgagaagcccacgcaccccagcgaacagtagctcccgtttgccccaactagagaataaagacccagcacagtcaaaaaaataataaaaaagaggacatacatacatatatgtacaactgaatctccttgctatatagcagaaattaacacagcattgtaaatcaaccatacttcattaaaataaattaaaaaacaataaaggaaaacatgccaagatgaagcatatagtgtgctaggagggctgagagatgagctgggggtccctggacaagtggcctgattgctctgcctcagtttcctcctgggggtcatggggctgctgcttttccacggcaccgctttcagggtgcagtgaacccgtgtgtgtacagagcccgtggcactcagagtggcagcggtactaccaaggtcaccgagttagcccgacattaccccggggctccgcttctgccctcaccccacagcccaaacactgagac

SEQ ID NO: 29989 - DNA, 2496 bp, Bovine  19866880347890
  misc_feature (1)..(1): n is a, c, g, or t
nttgcaacccccatgaactgtagcccgccaggctcctctgtccatggaattctccaggcaagactactggagtggggtgccattcccttctccaggggatcatcccgacccagggatcaaactcatgtctcttgcattggcaggcggattctttaccacctgagtcaccagaaaagcccccagctctttcatgccaggttacaaatttcaaacaatatccagcaaaactcttccttactatttggtcccctaattgcatctcactcagactcagcaaaggatttggtcccaccaggaaagattgacacagtgaccacagcccatgtgtacccgtgtggccgccaggtcctgctggatctgcatcttctccaaccggggtagggctgggccaggctgggtccccagaatggcctgcaccatggcttctgcatggggcacggtagatatgggcacccaggtggagccaggctcggagggaatcttcaccagagcacggcgttcctggagacgctgaacatagccctggagctgggaagctacctcctgtgaggtgggcttatccacactgctgccttcgggactacggaagacagaagaggcctgtgtgaactctgctcagcatggctacgctaacttcatggcaatcctggtgggctttgtcatcttccatcttactgaccattgacggttccttccaaggccatcttgtggtaggcatggtcaaactaacatggtgggcaccataatgtaaacccaaacaggcaacatcagcccactgatgatcattcatcagtgatgaatgatgaatgaaagccaccatgccaatgggcacagtcactcacaccatcacagggaagccatcacaccaactcaatgagcaacactgctcaacctgccaaccctgttatgcagcattatgacaaccccctatgggtaccatcatcatgccaaccccattaagtaccatcataccacctaatcagtgggcaccactatccatattcatgccaccctggttgggtcctataccaaccccaatggctgtcaccaccatgtcaactttgttgagtagaaaacagccaaactccagcaggcctaatgccaacccccaaatagggccagttctgggagccccattctgcaaccagagccccactcactggcccacccagtccccagggttcccaagggcaccttggatatggatcctgcagtgtcactccatccatggcagccttctcttggactaggagcctctgagcttccttctcagctgcctccaagtcatccacgaaggcttcttttccagctcctgagtctgcctcccggagagtgagtaaggcgctatatgcctcctcacagtgttcactgtgggacagcagttctgagcactccagcatacccgtcctgctacgtaggtgatatccccacttggaactgtcactcctcctcctaaccccaaccctgggagtttgtaaattccttcagcactctgggacggaaattggcttaagttaatttccacggcaagggcaaatacttttcagagagggctctgtttctctctgggaagtaggactgtcctttgaggatatccatttccttcccaggcagtgagtcgtgggtggggtgcactgacctatactgcaaggctagaccaagcgcggtggcctcagcctcctgctggcccagctgcatgctgaggccctcacaccggcccttgtactcctggagcacagctgacagcagacggttgaagcatttgagcttctcaatgttcctgcctccggaggtgggggaaaagggaaaagtgagtgactttgaagggcagttaggacaccatggatttccacccttccccaccccacccccactccagctccagactcttggctttatatcccagctgggcggcaccagtgcccttatgagctcagcatttgtgactcttaccctcggagtttctccatctgggcttccatgatgtgcatctcaggcgcaaggggctgggttgggagggacccaagcatctgggtgctggaatcactctgcaggcgccggagcagggggtgagcccgggagaagggatcctgtcaaaaaggggtgacttgattcacccagaattttcattgagagcccagcatcatgggtttaggccttttgcaatccccgaggctattggatcacatgaccaggatttgagtctcatggccccaaatcctaaggatctgaaacagaccatggtttttagcttcacacactcacctgtgagccccaggtctctccatcagccccagagctgctggaaccactacctgagccacctgcttggtcacaggaaggaggtgaaaagggctccagcctcagcagggaatcctgcagctcctggacctgtggggaaatggggagtgtaagactggggtggctccaaccacctgctattcttccctaagacctgttcttggagcagtggcaagagcactagctggaaggtag

SEQ ID NO: 29990 - DNA, 1766 bp, Bovine  19866880417850
  misc_feature (1)..(1): n is a, c, g, or t
nattccaccatcagcgctttatttcgccggccggagctgtcccgggttaacctgaaaataatctcccctttctggctttcggggagccagagacagacgggacacacaactccgcacgaggagaccggggccagagtagcccagagaggagagaggactgtgctggggatcctagggaggcttcctagcggaggggaccttggagctaggcactgaggctctttgtcaagggaagggtgtctgaggcagaaggacggcgggagggacagctggggaggggcgagaaactgtagacttctgagaaaaggagaagtcttcccagaaatttggaatagatttccccagggccagggcgtaggttccccggaactcatccctccaggccaccgagatgctcttgaaaatgaaaggcactcagtcgtgtccgactctttgcgaccccatgaactgcagcccaccaggctcctctgtccttgggattctccaggcaagaatactagagtggatggccacttccttctccatgggatcttcccgacccagggatcgaacatgggtctcctgcatttcaggtagattctttactgtctgagctatcagggaagcccccgagatgctcttgcttcgactcaaaccctcgccttcctataatttccattgccctgtgccactcctcatttccggtgtctaggaacctggtccctctaggatcctaaaaattctgtctaatgttgctggaggaacaccatttcactgcaccgcagcgtgcgagccctcggcttctttccctgtcattagccagtagaagcgaagatcttcagtggatgggcggtacgttttctacggggcccaatgataatcgagaattgttgagcactttaccagtcacgccgcggagtgggcggaacctcctgcgaggacttgcagacccccgcggcagggtgggcaggcggggagctgattgtgaatccatgtggcgggggctgtggaccctggtatcccgggctgcacgtgggcctcacaggtggggtgatctgggcaagggctgtgacagcgtagggtgttgctcgggccccaaaccctctccctgggatctgggggctcggttccctgcggcaggaccacctttcgcttccgtccaagccccaccccctgccgcagagcccaccacaatccagtcttcttctggcctcagaacttccgatcagtccatcccctagccacaaaacttccacttgggggatcacgcgaccatcgagccatctatccacctgccactctggcgtcagagcttctcagatgcactgactctcctcctctccagtcccagactgtgcacgcgccagggcagtggttaccgggcccccggttccggagccactatcttcgctctgagctctggccaaggccgctgcggcatcgcggtgatccgaaccagcggccctgccagcggccacgccctccagagcctcacggcgccgcgggacttacccctggcccgcaaagcctgcctgcgcctgctcagcgacccccgttctggggagcctttggaccgcgcgctggtgctttggtttccaggtacgggactttcagatccggaacctcaagtagctcctgtgaccgagcttcctccttccaggcggtcgcccaggctgtatcctgctgacacccatctcttcaacatactaggtccccaaagttttaccggtgaggattgcgcggagttccacgtgcatggagggccagccgtggtgagtggtgtcctg

SEQ ID NO: 29991 - DNA, 1685 bp, Bovine  19866880461737
  misc_feature (1)..(1): n is a, c, g, or t
nccgggtcctctagccctggtgagccgatcccaggggcaggtgaaatgacagagagaaacagagacatagaggaagagacagagagggggagagagacacagagataagagaaagtccaaaggggaaaggcccaaagagatggggagacaggaaggggaaaatggagaaagatacagagagccagagagatggagacagacaggacacagagacaaaaaaagacatggggagagacacaaaggcagaagagacagagaaatggagagagacacaagagacagtcaccgaaaggaagacagaagataaagataaggagacaggctggtcacagaggtgggagttatccagggaggcccccaggggtgcagccctgatccccagtacctggagggacccagaaggagcggggagaagggagaacagaagccgcctctgcccacctcactcctccctctcacccacccaccctcttcagcccacccaaccacagatggggaaactgaggccggtgtgcaggccagcctcatcctcctgggccagcgctgtgcccacttgcccacgcgggacctgtatcaccaggttaaaaatggaaatgggtctggcttttttttttttttttttccctttgagaaaatcctaggcccaaataaggcgagggctgcagggaggccggtgagctggccaagtcctcctgagcaagcaagcaagtggcggctggcccaggcggcctgcatttgggcctcctccaagactcaccccgcagcagggcggcgcaccccgggagcctataagggcctctccgccgccctggctgctcacttgacgccacagccgccgcagccccctctgcgcccactgccccccaccacccagccatggaggccatcaagaagaagatgcagatgctgaagctggacaaggagaacgccatcgaccgggccgagcaggcggagtcggataagaaagctgccgaggagaagtgcaagcaggtgatgtagctccgctgggccgcgccaggctgtccagcaccctctctgagctggtgaagttctggggcggagggtgggaatctcaggaaaccttaggacttgggagatgggggctgagacaaggggtgatgctctggctgagagagagtaaggggactattgtcttccctggaggggtccctgggctgggagagagggggccgactggacccactaccagcaaggccagtggaagcaaagtgagtgagagagagagagtgggaaagtgcgtaagaaagggaggggcatttgtgtgggctgcttgtgtgtgtgtgtgcaaagacgagagtctgaggaggtgtgttgaggtgaggggctcaccatgcggggtgtgttagaaggggtggtttagggctgctgtgtctatgtagaaggtatttgtgtgtgtctgagcatctgtgtgtctacgtgtgttgtgtgtgttctggctctgtggagacctgaaggtgactgagaatatgtgtgccgaggaaggcctgagtgtgtagctgttgacagtgggtgtgaaaaagtatggatgtgtttgtgagtctgagtgtgtgttgatggtggtattgccctgggttttaggggaagagactagctgtgtgttcttgtacacatgttgacctgatattgaaattgtgtgtgtcagggtgagtgtgtgtgtgttgagg

SEQ ID NO: 29992 - DNA, 964 bp, Bovine  19866880482290
  misc_feature (1)..(1): n is a, c, g, or t
ncaagagagaaaaagaaaaacactgccccgtatttagagtggcccctgacccactcggtctccccaaggcctagccctggggctataggtcccacccgcaaaagcacatttagtttatacagattctccctttcagctgctcaatgctagatttctcatttgacggctctgaggagttcgatattaacgcttttgaagacatcattgctttctatgaaagcaagaagtaagtagaagcaagggccttggaacccgagaccagggaggcacgccctgagaagccatcatcccaaggcgctcagcaagcacagtgttcagagccagaagagaggggatcagcaagccaggggcgctctcgccagatttggcctgatcggggggtgtgggctgaagccaggggcttcatcgtcatcgtagggagcgggcgctgcactggccgctcagggtgcagaggtgacatgcagcccctctgttgtctttgcttggtgcctccctggagggtgaaggagcagaggtgagtgcggccatccggccctgggcatggtgcatggcacacaggcaaggggctgccgatcggggtcttcccaggtcaactgctcagagcttaaacatgtattcaagtaactgcaatgaagaagtgttattttaatctttttatttacttaactgtaccagttcttagttgaaacatgtgggatctagttccttgaccagggatcaaatctggaccccttgcattgggagcatggagtcttagtccctgaaccaccaaggaagtcccttggaataaggaaatttttttaaaaagagagacagactcccagatcatcctgcagtcatcgctccctcatttctagacattctgccctagacatttgtgtcaagacattgttcgcgaatgtcccattttcagagcattcgattttttgtccctaaggcattgtcattctcacacctaaaacgt

SEQ ID NO: 29993 - DNA, 1111 bp, Bovine  19866880536835
  misc_feature (1)..(1): n is a, c, g, or t
ncaggactacccaggagatgttcgtgcagtttggctatgtcgtgcttttctcgtctgccttccccctggctgccctctgtgccctcatcaacaaccttcatcgagatccgcagtgacgccctcaagctgtgcacggggctgcagcggccctttgggcagcgggtggaaagcattggccagtggcaggtggggaagggccaagggctctgagccaggatgcccagaggtggagcgggtgctgggggggctggccagaccccacctgagccccttgtcccccctacccccgcagaaggtgatggaggtcatgggtgtcctggcaatcgtggtcaattgctatctaattggccagtgtgggcagctgcagcgcctcttcccttggctcagtcccgaggcagccatcgtgtccgtggtggtgctcgaggtgggaccggtggccgggtgggggacccaggcggtggttggggggtgtccccgtgcctgcagcctcctcctctgtcgcctcagcacttcgctctgctcctcaagtacctcatccatgtggccatccccgacatcccgggctgggtggccgaggagatggccaagctggagtaccagcgccgggaggccttcaaggtacgtgggccagggcccggcatgctttacatctctgctccgaggggcttctccccgcgtcgcctctacgcgtcacctggctgggcagtcacatccttaggagggtagatgtgcagttagtgtttgttgcttagtcgtatccgattcttggtgaccccatggactgtagcccaccaggctcctctgtccatgagattctccaggcaagaatactggagtgggttgccatgccctcctccaggggatcttcccgacccagggatcaaacccaggtctcctacattgcaggcggattcttcaccatctgagtcaccagggaagcctagggtaataattagcatttcaaaaggacctggtcccttctggggtcctggtggcatcccgcaccaggccagcacttaggaactgtcatctgccagcgtgccgggcattgttctgtgtggggtcagggacacagccgatgctttctagaagcccagcctgtgccacgttc

SEQ ID NO: 29994 - DNA, 1438 bp, Bovine  19866880587105
  misc_feature (1)..(1): n is a, c, g, or t
ncctgcccccccggggcctcccgagtgatgccaggttgggcttccacacaactgtcagcccacatccggtgtgtagggcagaagtggccagcccaggtcccttatttttatagattctagcagtagggtgaggtgcatttacgacaacagtgtttaccttaagaatgaaatagtatttacgacatttaggttgcttgtttacgacactcagagctatcacccttttgtccctgtgcttaccttgggtccaaggttgttaatctgcagctggctttaccacagtcatgaatcattcttgttcttcagggaaacggcattagcgtgtaacacttggttctttttctgcttgatgacagagcggttgtcgaaaagtacctgcttgaaaagtctcgcctggtctctcaggagaaggatgagaggtagggggggtatttccttgatgatcccggatgtctgccttcttccctatgaaggagaaaagcagatgtcctgaggcggggagtatctacaggaggccctgatggatctcctatgagcatgagctttgccactttctcctgcttatttttgtgcctccctggggcttctccctggagtgggtgcttgggtgtctgctgaaatgtggtcagattagcatcatctctggtccaccaatgagtgagaggtgcccaccctctgaggaatctattcactggagaagctcgtggtttgatttttggagtttgtttttttttttttaaaaaaagatcataagaatcgacttattgtctccaatttgtacataatcgaggtgctttttcctccctggcctggtctccaaagcaatattagtagtggtttgacgagtagctatcgctcggcctccaaaaacaacttttttctcctaattttgacctacaggaactaccacgtgttttattatttgttacttggcgtcagcgaggaagagcgtcgggaatttcagctcaagcagcctgaagattatttctacctcaaccaggtaaatagcctcaagccccaaccacaaacgcggcctctgttccccacgggctgtttacgctctgccagggggtcagaggccgtccgccttggccctctccagcccccaaaccagctccaaggaggcccagagcggggcggcataaaggagcccattcattccctgcctccccagccctgccccatcgcttccagccaaaatcatcctcacacaccaccctccccagcccagaagtacccagagcactgccgactttgtttttcagcataacttgaagatcgaagatggagaggacctgaagcatgacttcgaaagactcaagcaggccatggagatggtgggctttccttcctgccaccaagaagcagtaagtgggtgggcccagccaggcacctccccctaactgaagttaccggtcactcagagacctgacctacc

SEQ ID NO: 29995 - DNA, 1139 bp, Bovine  19866880636830
  misc_feature (1)..(1): n is a, c, g, or t
nagttcagccaatcagagtcagccctgggacctttgcctggactatggggataggggaatttccttatggcagcaattaaagaattgccagcctggtgtgctgcagtccctggggtcgaaaatagtcggacatgacttagcaactgaacaccaaccaaaaaaaggagagcggctcagagttggtgggggatttcttggcactttgtggactgtttttaggctttctccagctctgcactcttgcttttgaacatgccacactgtattatgtctggcatattaaagcgaggccaaggactttttttgctctaaacgtttttaaaaggtctttataattattattttggttctggttagcaatgaatgaatgactggctggacatgcttgggaattcttgctgagtgaggtcacctaacctcaaaaagaatataaatgggagctgaacaaattcttaatttaatgcttaatgaggctgacatagtttttgtgccctttgtgagtttttgtgtattttaggacaagaatattttattctccaagtctctaacagttttgtcagcccctgaaaaggcttgaggtcataggtactatgttgaaagtgcttacagataaagacttctttctcagggcacagtgggtgaagaggtgaagtgagaagcatttttttttttttctgacctcatttgagtgcctagatccagccacacctgaagccactaacccctgaccttttcagatagataagtcactccatccactctctttttttaaaaaaccccacatccagagtattttattaagtcaaacaacaagagtgatccagagttagttatcctgtgtgtacaaattcccacaataaaccctaggctcatatttcataaattatcttttaaacatatcttccaaacttctatttctctattgtggtactaaggaaaaaaacagtaacagcaaatcccttgttattcagtaagctgatttttttttcctccagtaaaacaggtaatctatagggctactagagatctatggatgatttaacagagtctccagaatcagcgacatatttttcaagattggaacaaaacataagatgtcaacagtctcttcaaagaaatgtgatgatctgatttcttta

SEQ ID NO: 29996 - DNA, 2461 bp, Bovine  19866880669413
  misc_feature (1)..(1): n is a, c, g, or t
ntgttggaatataagggtctatctttttgttgttgttttagggatttaggttctgttagttggaatctgaagagggtgtatgtgaagctgaagctggagaacaggttgagaacattcctaggccacagatgattaaaaagttctttcacaaatatggtttatctaattgagctttgtgcctctgatgaaatgagagaggagagaatattgtatttatttcaaagctcaggaagctgcagctgagagtaattcttgctttctgactgttgtttagtattccattgtaggtgtcagcaaactttttctataaagagccagacagtaaatgctttaggctttgtaggccatctggtctctgttgtatctactcagcactgccattatagctcagaagcagccagagacaaatataagggagcgtggctgtgctccagtaaaactttatttataaaaacaggtggtgggctggatttggcccttggcccatattttgctgacttctgttcacttttgtttgttagttttaatccttttttcctgttggtttagaagttagacattctgatattacatttttctggttacttgtccaattcgaccatgcatatttaaagactaaaattaataatttaactcctactcccacatcactccctgacacacaaacataaggaattgggttactttaattccatttttgttcccaacttatatgcgtttttgccaggtattccatttctcatgttcttttttttttttttaattaaaaaaaaatcacaacttacagtactattttatacagatatttgtttagatctgtcacgttcctatatctttgctcaatattctgatttctccgctctttcctttttctctaaaagttttattgtgatataatttacataccatacaatttacccacttaaagtattcaatttaatggtctttaatatgttcacagatgtgtaagcagtatcatagtcagttttagaattctgtaccctttagccaatatcttatctcctcaccccactaagcaactactgatctacttttaagaaagccttcctcagtgatcaatgcaaagacatagaggaaaacaatagaatgggaaagactagagatctcttcaagaaaattagagataccaagggaacatttcatgcaaagatgggctcaataaaggacagaaatggtagggacctaatagaagcagaagatattaaaaagagatggcaagaatacacagaagaactgtacaaaaaagatcttcacgaccaagataatcatgatggtgtgatcactcacctagagccagacatcctggaatgtgaagtcaagtgggccttaggaagcttcactacaaacaaagctagtagaggtgatggaattccagttgagctatttcaaatcctaaatgatgatgctgcactcaatatgtcagcaaatttggaaaactcaacagtggccacaggactggaaaaggtcagttttcattccaatcccaaagaaaggcaatgccaaagaatgttcaaactactgcacaattgcactcatctcacacactagtaaagtaatgctcaaaattctccaagccaggcttcaacagtatgtgaactgtgaacttccaggtgtttaagctgaatttagaaaaggcagaggaaccagagatcaaattgccaacatctgctgcatcatcaaaaaagcaggagaatttcaggaaaacatcaacgtctgctttattcactatgccaaagcctctgactgtgtggatcacaacaaactgtggaaaattctgaaagacatgggaataccagaccacctgacttacctcctgagaaatctgtatgcaggtcaaggagcatcagttagtactggacatggaacaacagactggttccaaattgggaaaggagtacatcaaggctgtgtattgtcaccctgcttatttaaattatatgcagagtacatcaagagaaatgccaggctggatgaaacacaagctggatcaagattgccaggagaaaaatcaataacctcagatatgcggatgataccacccttatggcagaaaggaaggagaactaaagagcctcttgatgaaagtgaaagagcagagtggaaaaggtggcttcaaactcaacattcagaaaaccaagatcataacatctggtcccatcacttcatggcaaagagatggggaaacaatggaaacagtgacagactttattttggggagtcccaaatcactgcagaaggtgacttcagccatgaaattaaaagacacttgctccttggaagaaaagctatgaccaacctagacagcatattcaaaagcagagacattactttgccaacaaaggtccatctagtccaagctatagtttttccagtagtcatgtttggatgtgcgagttggattataaagaaagctgagtgcagaagaattgatgcttttgaa

SEQ ID NO: 29997 - DNA, 1579 bp, Bovine  19866880684515
  misc_feature (1)..(1): n is a, c, g, or t
ncccaacatgaccaccctggctgacaggccttgtctccctggatgcccaggaggtgacaaagcccgtcccaccctcttggagttggcttgcagctaacgacacccaatgtggggatatgacaggagggtcccatcgcctcttggtgagataagctctgcgatacgactgccactcctgggttccccgggatctggctgagcccccttcctgccctcccccacctcaggtttctcctgggagttccctgctgtacaccacttgtgcagagaccacatcacaggcctgcttctagaaaacccaaacaaagacccctctgtgtcatttcaacaggagatagtttttcagaagggaaaggggagagggaaggaaagagaaggaattagagaagctcgagaaggtaaaagcccccgccccaacccactttctagaatcaagacgcgagtcagctgctcgcgaggcggtgctgggtggtgctgtgtgtgtttacctttggaatgatctgcttttgtttgatacctttacttttcctgtcaaaatattaaaaatggttttgtgaacagaaggaacacagtgtctggctctgggttagttcagcaagccacgccttgcgggttagatggagcgagaacagagagagcgacagagtccggaggcacaagtgcaacgaggccaccgcctcgccagggactgtgcatacctgcctcgccgggccagcggctgcctccgcggtggcaggggcccctgggtgtcggggggagctggtggatctcacagaatgacggtgagaggtcccaaaggggcttcgagggaccccatgcagctctgagcctaccaggtgtcccagctctatttgctagacgttgggaaccatcaaagcggtctgaagacccttctggagcccctgccctggtggccgggtcaggggcctgtctctcgaagaactgagacagggcctgtgtgtatgggtgccttatggacgtgaactggcagaaggctaaaaaatgaaagctgatcttttcggccgagggagggggggaagcccacacatccttagacactttatggaatcttgcagacaagcaaagatttttttaaaaattgcagcctgggcagttgctaagacccgctgaggaaatggctccctgcggatctgccagaggcttggctccgaggctctttgtgttgtttcacgtttgtccccgtgggtggaacgaggcatcataaaaatgactttgcaaacaggcatcactgcaggcacaagctttgttctcgggggcctgagccctgagcagctggtgcccactggttgaggcggctgcctgctgggtaggagggtatgaaaactgtcacccctgctttgcagacagagggtgaatgctcacagcactcaggtcaaacagtgattggggggggtccaaatctcatctgtgtggcttccggccctttctaccacatcacacccacaaagcagggtcatgggatgcgcagaggtcctcaggattgcacaccctgactctgaggcttctttataagctcatagtgacaaaggccggggcgggaggaagcaagccttgctcg

SEQ ID NO: 29998 - DNA, 905 bp, Bovine  19866880709393
  misc_feature (1)..(1): n is a, c, g, or t
ncttcttgacccagggatccaacctgggtctcctgcattgcagacagattctttaccgtggtagcaaccagaggagtctggtgggctacagtctttgggattgcaaagagttggacagaactgagtgactaaccaccttacagcacagagagtttatgggctcttcgtaactggaaaagtcctctggcatcagtggtccagcctcccagctccacttgtggatgtacctgtgtctccccaaagctctgggggactagcagttccagaatctctgggaaagttccgggatcccctctgattggcccaggttgggtcatgtgctcaatcctgaaccaatccctgtgaccagagggaaggtctatgctgattggcccattttgggtcatgtgctcaactcagacccaatccctgtgaccaagtggaccatgctgattggcccattttaggccatatgctcaaccctaaacaaatcgctatgactaagaggaaatcttgtgtagatttgcatagagcttcaggagagatgagcagtgccccactaggagctgggcagttggctcctccaagaaagcagagaatggacactggaaggcaaaaccagtagattccggctagtcctggaggccaaagagcccagacaagtgtcagacaacaaatgagtcatttgggtagaagagagaagttgatgggagactagttagatgcattggagtaaggtccactggggacctcagactcctctctctccacccttctccttggtcctctcccatggagttttctctttgctgccttttcacagtttaccttgggcaagggctggggtgaagtgaataaagtatgcaggctggccaacctccccctgaatagctcggctttgtccatctcctctggtcttcagtagt

SEQ ID NO: 29999 - DNA, 1229 bp, Bovine  19866881012250
  misc_feature (1)..(1): n is a, c, g, or t
nacccagcaatcatggaaacacttcctagcacaatttagacgcagccaaagcaacactctggaggaaaattcataaccttcaaaaggtttaaatgcttgagttaaaattaaaaagggcttaaaattaattactttggtgtctaactccaaaagatagagtcagaggggaaagggaaggagagaggaagtaaaggaaggaggaaatggtgggagggagaaagggcagtagagagaattttctaagcagtctcggaatgagaggatcaaactccagctacccaccctgccccagttcttctgttcccaggcagacctactcccccacaacaccttctctcttcacccccaaaccctcaacctcaagcacgtgggtgggggcgagaactggggggagaagagtcaaagtgcctagtgctcccacctgctgggccagtagggattctggccccctggggacattggacaatgtctgaagacagtttgggttgtcacacccagaagaaggggggtgttattggcatctggtggctggagatcaaggatgctgctcaggactctatggtacacaggatggccccaccacagaaaatgacccagcctcaaatgtcaacgtgagtttagacaaccctgctcaaggtaatggcaattacctggggggctgtctggaggacacggctgccatcaggctccctgtgtggggctggaaggcggggacagcctcatcagtgtacaagccgccgtcctgccggtggtttaggctcaccaggtccgtcatcaccaccaggcctgtttcctaggcaacagacaacgcccagacccacagtggggaagtggatatgtggctccagaagccactggcccaacaccactgttgcatagccctggggaagtcagtcctctctctaggcttggcgacacagaccaagagggacataagaccaagtgaccatccagggcacaacagagttggggtcagaatgcttgtgggctaggctcaaaacggaaatcaaatcctcatctcttaggattccgtttatatgaactgtctaaaaccatgggcagatcagtggttaccaagggctgggggagggtggatagggtgtgaccgctgatggggacgggatctccttttggggtgatgaaactgttctggagctagacagaggtgctggcgtgcacaacaccgtgaatgtactaaatgccgcaggattcttcactttaaaatgggt

SEQ ID NO: 30000 - DNA, 978 bp, Bovine  19866881022988
  misc_feature (1)..(1): n is a, c, g, or t
nagcatcatccgcctccagagcctctgtcgggggcacctgcagcgcaagaggtgagcagaatgggaccaagcacccccccacccaaccccccagaacattccacccactcaacactcaagtgctacctgagatatcacctggccggtagagctgtcaggatgtccctgtctggatgcagggaggctgaggaggggctggcaggcgtctagccggtctgggcacactgggccctagagagacactccagggctggtaggtggcacctatggcaaccccaggtcaccattggtagcactcagtctctgccagagggacccccccacccgcctactgcacctgcccacccccagccactgagcagaacacctggactcagagggttcaggccaccgggaccaaccctcaggggggcccccttgtccccactcacagggagtccaccaggccagggaccccagaggaattcagggagttctgaacagatccctcctgcaacaaacctcataaaggtccccctgaccctgatggctcagatggtaaagaattcgcctgcaatgcaggagacccaggttcaatccctgggtcaggaagataccctggagaaagaaatgactacccactccagtattcttgcctggagaatcccatggacagaggagcctggcgggctacagtccatggggtacagttcaatagagtcggacccaactgagcaaccagcacttttcacttttttcactggaagaaagtgtcagtagacagtacaccacctcggtctcgctcactaccaagtgggctgagcagacctgagtacaagggtgctgtaggcctcgccgacgcttcctgtgcccgcccccaggtcttccattaggcagcagtgcccatgacaacatgaggctattccctgtctcccccctttcctggctgaggatgggtccacctttccagaagcatctctaggggccagggtcacaccc

SEQ ID NO: 30001 - DNA, 2305 bp, Bovine  19866881081503
  misc_feature (1)..(1): n is a, c, g, or t
nttggctatccatgatagtcctcttctttcaaaccctttctgccccaatcccaaatccttgggaaggattgagccttcccaatcccctagcctcctctgcagtggttcctgggtacctgaaccctccagcttcttcctgcctgagtcacacatttaacaggagtgtgataaccccacgagagtcctagttttcaaactccacatcatggcatggacagatcaggttccccctgcggtatgctggaggcacacgaaggcatttccaagatgtggttgaatgagggaggtggaatattggcccctgggcatccctcagccatccctctccgggaacctggagcctcctgtgtgcatgcctccggagaacttggcctggagtgggtctgtaagcagtctctaaaccccaaaccacaaaggcaattgtaaattccagtgcagaaaggcacaataaaggccttaaaagcaagtgtctgtgcctttttgtaattggataatgcgtccttcctggagaagggaatggcaacccactccagtattcctgcctggagaatcccatggacagaggagcctggccgggtacagtccatggggttgcaaagagtcagacacgactgcgtgactaacacacacgatgcatccttattctgaagacaaggtatttttcttaatcatatgcatgtggttaaacttttttcaaagagtatgaaagggtgtatcctttcatatatacaaagggtgtattcctttttcaaagagtatgaaagggtgtatcctcctttcccttctaagaggcaaaaacggttactaattccttaactctccttctagaaattttctgtgtaaatttgttgttcagtcactaagtcgtgtctgactctctgcaaccccacggactgcagcacaccaggctgccctgtcctccactgtctcctggagtttgctcgagttcatgtccactgagtcagtgatgctgtctaaccatcttatcctctgttgccctcttctccttttgtcttcagtctttcctaacatcagggtcttttccaatgtgtatgcttctgctactgctaagtcgcttcagtcgtgtccgactctgtgcgacgccatagacggcagcccaccaggctcccccatccctgggattctccaggcaagagtactggagtgggttgccatttccttctccaatgtgtatacataggacttaaaaaataaacacacacaatgggagaatagtcctgttctctaccttcttttttaagtcaacaataaaccttagagaccattccgtatcagtacatgcgtgcttacctcaccgcttttcactgacgtgtaacgttctcttgtgtgaatgtactaccgtttggtaaaccgagtgccccgctgttgaaggttctggctgttagttaattcccacagtgctgcagttaaccacactgtctttgcacatgtgtctgtggttaatttcagtgttcacccatcagagaggcaactgcaagttgaaagggatatgagcatttttaatcttgagaagatttgccaaatgtcaagtagggcttggtaatattattttcttaaagaataggacagtccctgaggactgtgggctctgaggcttctgaggataaaccaagaaatgaaagcgtgtgaaaaagaatacatacacacgcacgcacacgcacacacacatataattgaatcacttggtgtacatcagaatgtaaatgtacacagcactgtaaatcaattatcctgtaataaaaagaactaaaacaaggaaagcacagaggaagtggggggaagagttccatgtagtgatgcagaaaaacatggcaaacccagggagggaaattaacaaaggagaggacttggggtggtccctgtggcccttcttaccttctgagctcaggctgtgaggcaccactctccttttaacaagtctctgccaagccttcgatgcctcacttttctagctgtaatcaagtagaatgttgattaaaattgtgccaggtgaaagaattaacacgtcaagtccttgtaaagtagaatgctaacctttccaggtaagagaattaaataaaccatgcagcatattaacatgttgggtaagagaatgaacatattatagccgaatcaagtagaatgttaacttaccaagtaacagaattaaagttatggaactttaatcttttctttttaaaaaaattttcgtagagcagagaagaggaaaaggaccttcttccctgaaacatgggtttggcactgtctcaacatcaggtacagtaagatttctttccttcgctgc

SEQ ID NO: 30002 - DNA, 898 bp, Bovine  19866881117243
  misc_feature (1)..(1): n is a, c, g, or t
ntgactgagggactgagccactgaccccgctccaggccaactggatatagaaaggtttagttctgccgaccggctcgggttccaatcctagctatatctagattcctgggactggggtttcagaccagcacaagccaatatggtggttgatgattgagtttctagggtatcggtcacctctgtaggacattctgcaaagcaactggcttggtctcctctgagactctttcatgggggctgggggagaaccataatttgaatccagggcaggctgcttttaatttcagctgccccaggcccttcccttaggcaggctggaaaggcatagggattaattttcaaaaggcatgaattttccagaattcgtatgctgcccaacctctgctgggcccagtacacaggggtacacagtagttactcagtaaatgtgagtggttgggactttgaggatggttcttctgcgaggcccagggttgagaaagagttaagaaagggttaagaaagagttcgaagggggtagcaagaggagaagggaggacctggctggtacctcctccgagaggccaactttagcttcctaattacaggtgacacgaatgtccctctctcaaaatagagctgctggacactgactggggggtggttgttgagtgggtacttagggggagggttagcacagggcctccccagcggggctcaggggtctggggtagcctctaccagcaaatagcagaggacagtggagccttctttttatttttttaaagttcatttatgtcgtattttttttcaactggactataattgccttacaacgttgttagtttctggtgtacaacgaagtgaatgagctgtgttagtggaaccttctgggcagaaggtagacacaagggggaat

SEQ ID NO: 30003 - DNA, 758 bp, Bovine  19866881202839
  misc_feature (1)..(1): n is a, c, g, or t
ngaggatgcctatttccctgtgaagtcccgtgtccctgcaatttcaccttgtactacgaggtggctgcgaggggcaacatcgtgctctcaggccagcagcctgcccacgtcacccagcagagaagcaagcgggcagccctggagaaacccattcgcttaatgcacctttctgagacaggtgagctcatccacaggctggaggttcctgttcttccttctgaaccgttgagactgggatgggcatcccagcaaggcttggtaagcagagtgcatcccggaggggagcctgcttcagggtgaagggcacatatgccaggcaagactggactaggaccaggagggtgggcagtgaccagctgctggagccagctcctcttgaggctgccgtagcctgggcccctgagcaggtctgcactatgccatgctgccttctgccaacccccttctgcttttgcccagactgattccccatcaaggagtccttctccctgctttccttgatgccacatgctccccacaagacccattttctcccctgggtcttcccatccctctcttcttcacagcctctctgcccagagcaggatccccaaactaaggaccgtggacacttgcagggtattctttgtggtggggggccgtgctgtgcatgctagggtgctgagcaacatccctggtctccacccgttagataccagtggcaatccacctacacgcaggatgacaacctaaaatgtctcctgatattgccagtgttt

SEQ ID NO: 30004 - DNA, 2921 bp, Bovine  19866881272233
  misc_feature (1)..(1): n is a, c, g, or t
nccccaagaaaacctcaatttgcagcaaagcctaaactctttttctgttgagtttatattttctaggattaatttagaatataaaatatttaaataaaatttctaagactgtgggctaaagaaccccacaaaaaacatggcaaagcagaaagggccactgagggggagggcggtcagtcccccccacttcctgcagtccagagacaccactgagtcagccctcagggtatccaagggactattcccaggaaaacaagtaagttcctttatggaacaaatgttgattggagagttactatgctggtgactggtctgtgaccacagacccagggacccagtccagtcccacggggactcccatcaaagaccttggagacagttgatttcctggaagtccatggacctcagtgccaggctggaaagtcgcctgttgtatatcaaattttaaagatggaatatcctcattttgggaaagtctgaaatagggggacaaaagaacttttgttgaccaccaatgggaaaagtttcaataaatattgtgtatgaattccatatgactgtgccaggtatcacacttcgtgggaatgatgcaggagtttgtctcccttgaaggggacttcgtaggtgactcagcggtaaagaatccgcctgccagtgcaggaaacgcaggatcgattcctatgtcgggaagatcccctggaggagggaatgacaacctgctccagtattcttgcctgggaactcccatggacagaggagccaggcaggctacagtccacggggttgcaaagaatcggacatgactgagcgactaagcacgtccttgcaaggattccccagggtggcaaccttgagtctgggcacaaagcaaagaacttgactcttttgttctcatcagaaaaaaagaaagataaacaaggagctatttttcagttggatgtgctaatctgtgagcctcttaattttttttataatcctcgattggtattagtgcgtggactgaactctgcctttcatatcgtagcttaagtcagctgctgatcattcactacatcataatagcatagctcagttcctaacttaaatctacactgctttgattaagacacaaatctctaagagaaaaatctcttttttcctgtgaaaccataaaggatctgtttcataatattgagattaatttgctgttataaaaatttcatcagttaaaaaaaaaagtaagcgctgggacttctctggtggtccagtgattaagaatccgccttacaatgcaggggacggggattcagcctctggtgggggaactaagatcccacatgtccacatgctgcaagtaaaccccacatgacacagcaaagatcctgcatgcctaaactaagacctgatgcagtcaaataaataagtagtaagtgctgtgaaaatcggagggaaaaagagcttggccactgtaagtgagttgaagtatgtcccccggccaaaaattatatcctagtcctaattcttgccctggaacccgtgaacatgatcttcttcggaaacagggtttttggtgtcaggtgtcacctggatgctttgctgtcaaaggagatgcagagacattgctcagggccgtggagggtgggacgtggaaaagcataataggaaacagctcacaaacaaagatcaggatgtaccccaaatcatgtttcccctgtgtgacttccctctgatccaatcactggcagttaaaaaagacagcacataaataaccctgatgctggaaaagattgagggcagaaggacaagagggcgacagaggatgagatggtcggatggcatcactgactcaatggacatgagtttgagcaagctctgggagatagtgaaggacagggaaaccaggtgtgctacagttcatggggtcgaaaagagatacgacttagcgattgaacaacaacaaattcgaaggtcatcatgtaatttgacaagtcattttgcataaaatgtcttcagaattcttgaagacatgtcctgctctgcttcggaattacagaatcattgcaaattgctttggctcagtcactgctgggccccaccttgcacctccacagatctgcgcccccaccctgttcgtccctgatgccaaatctgtgcacattgatccccacggcctcgtgttcccgtgcctctcaaggcagctctgggaggcagatgcagaggcggccgtgtgactgcacaaatggctggcgcgtggccaagtcagctctggacccgaaggccagaagcttctagcttttcgggggcaaatgtggcgctgacaggaaaatgtttgtttggtttgtaagttgagctggcccactgtggaagggatgataaagatggaagcccgtgtggtcatggtgtggtcaaggctctgaacgtggctttgatgggcaacgccacaggcgtgatcctaagggggctcagcagagagttgacggacgtgacctgcgaccctttccctttctgaaatcatcagacatctgctgagtgagctgtttgggaactggtcccaggccaatgtcacggagggagcagagtgtggggtggggtggtgggtgggggggcaagataatctccagggcccttttcatcaggaacacacatgagtcatttttaatcaatcaaaaagaggaaacgagaccaaatgcagttaatgaaggctcgagtaccacgctgtgaagaaacttccaggagttggacaggcaacagtgaaaccttggagacagcttaaagggccatcaggagggagagtggttaagtaattaaggtcccctctgcacaatgcaatatcagcaagttgataaaaaaagagcaaaggaaagctatgtatgctgacatggaaagatacatgacatagggttcagtgcaagaaaaacctgcgagatagtctgtatttgttt

SEQ ID NO: 30005 - DNA, 1199 bp, Bovine  19866881329671
  misc_feature (1)..(1): n is a, c, g, or t
ngtggcgctgctgcgcctcagctggagcgagctcttcgtgctgaacgcggcgcaggcagcgctgcccctgcacacggcgccgctgctggccgccgccggcctgcatgccgcgcccatggccgccgagcgtgccgtggccttcatggaccaggtgcgcgccttccaggaacaggtggacaaactgggccgtttgcaggttgactccgcggagtatggctgcctcaaggccatcgcgctcttcacacctggtgagacaccctggaattggggggctctggcctggggaggggctgggtggcggaggggagagacctagctcctgaccttgacccccttagtcctccacttccggatctacagctagccagacttgcgtccctgcatgcgcctttagcgctgttgggggacagtggaggaagcgatgcaggcggtctgacaccgtctgtgatggccccactccctgatcccaggccttcataagaactttgatcccccacggctccatgtcttaaggccccacagcctccccccttgattctcaggctccctgagacccccccccttcaccccctcatcaaggtgttcatcgtgctcagtgggcactgacgtgctcagtgggcactgacggcagaatgacaggtggggggccgcgggaggggaggtctgcccacttggctctgtccgtcacttactgatttccgttctccctgaactctgtgaccctcatctgccaaatcaggatgctcctcttgttactgaccacttaatggaggactgccttccacttacgaaaggcaggggttctctgacacctggttctggggtctcctgggcccttcgctccctgattcctaggaccctagaccactgacccagggctcccaacctgcccccccacccccggaaggccttcaggggccacccacagcagagctggatcgggtagggtgtgtggcttgaagcccctcccacctaggggcggaggcatcttagttccttcctagtcttcagtaaccgccaaagccctgcttcattgtggtgggagtggtggcatagcagactctgcactttgcaaggaggtcccactaggtgtctcctggaactaaggatgcggagccagacccaggctactctgggaggggcttttatccaataataggctttgcccctcttacttacccaggacattttctctgccc

SEQ ID NO: 30006 - DNA, 1423 bp, Bovine  19866881354087
  misc_feature (1)..(1): n is a, c, g, or t
nttagcatccacatcaagcctttcctgtgacctgccttaaccctcatgctaaccccagtgtcactcccaatccttaatccagcaacctctgatccttcaactcaactcaaatccatcccgaccctgaccccaacactgaatcagtccctaattctaaccctaagccaattttgaggcccaccgccttcctaaactccccaatctttatctctttcttaatatcatttccaatccaaactgcaccacagtcctaatgccaataaaatcctgtgtcaatacatgatcataatcctaaagccattctagactcatgggcacccatgtttgatcccagcctcaagtctaaatccaccctcaatgtctcaactcatcccagtcccaaaggaatcacagttttagattcacccctcactcaaccctggacctgatggacaccctacctccgactccaatcttaacccatcccctttctcagtgctgatacactttctaagctctgcctcaatcctaacatcagtgaaactcaagcgagtcctaacaaactcaatctacactgggaagccaacctctaaaagaagttaaaaaagaagccaagttcaaacccaagttcaacatcaccatcaacttggcctccagacccatccctccaatgcaaccagaatctagggccccctacccaccttcgccttgatacaggtgtccagggctgagttgctgactgccaactgcaacttgaggtgctcagtctcacgcttcttctcttccagctccttgaccagcctgtcccgttccttctgcagtgccaccttctcctccagggccagctgggtctggcgggcacattctgcttggagcttgacagcctgggcctgcgcctccttctccaccttctccttggcctcctgactggcgcgtaggctctgctcgacctccagtttctggcgctggagtttctcgttctcgagggtcacgctgtcgatgccagcccgcaaactccgggccagctcttccaccttggaggtcatgatggagggcaggctgtcgcaggctctctggatggaaggcagttccgagccgaggggatggtacaagttgaagctcagggtactgagggtgcgcgggatgatggagtccctccagaggtttcgcagatccgtctcaaacttgttcctgtccagggggatgcagaaggcctgcaccttccgcagccggtcctcagccagctgccgttcctgctgctgctggtctcgggttttgccgcactcggccagctgttcctcatgccactcgcttgcccaccgttagaccgtccttgtctttggtacataccaacttctcctttgccagctccacctccagtgtctggctttctgggtcagcgtgagggccaaagctaggagaaggaccagaagacccaggaagg

SEQ ID NO: 30007 - DNA, 994 bp, Bovine  19866881446632
  misc_feature (1)..(1): n is a, c, g, or t
ncctggcaacccctaatctgctttgtcttatttttagaattttttgggggtcacatcacacagcatgttgaatcttagctcccgaaccaggattgaacctgcatcccttgcattggaaatgcagagtcttaaccactggagcaccagggaagcccccgctttccgtttttattgatttacctgttctggacgtttcatataaactggatcatacactacagggcctttcgtgcctggcttcttccactcagagttaacagtttcaaggctcaccacgcaagtgtgtatcggagctgaataagattctgctacgtgaaaggcccacgttttattcattcatcatctgctcatggacacagggcttgccctttggcaattctgactagaactgtgccgctatgaatgtacacgcactaggatttgttagcacgtgttttcagttcttttgggttcatacctaggagaggaactgctgggtcatccggtaactctacatgattgacttgctggggtgctgtgagacatcacagagttactgaccagtcccttgaacaccctgtgctatggtgcgatggttcctagcctacaaatgagacactgatgcctgagccccacaccttaggcctgtccctctgccttccaggaagaaataacgagctgctcccaaagaaatgtacttcctcagcagagcccttattttccagggagtggcgtgggctgtgcgaggaccccgtgtggagtggaaggtatgggtacaaggggtcctctgagggctgcgattgctgaccttggtcttgccgatctggtagctcctcttgtctatgtccatcttctccagcagggcagagatgacctccctgcagggctgggcattcttcgggagaagcacctggaactgctctgtgaaatcctgggtgattttgggtaagaaaggagaatctacgtgagggtttctgccaccagaaagaacagggctctagccactccccggtca

SEQ ID NO: 30008 - DNA, 1076 bp, Bovine  19866880200963
  misc_feature (1)..(1): n is a, c, g, or t
naagactcttgagagtccccttggactgcaaggagatcccaaccagtcccattctgaaggagatcagccctgggatttctttggaaggaatgatgctaaagctgaaactccagtactttggccacctcatggaaagagttgactcattggaaaagactctgatgctgggagggattgggggcaggaggagaaggggatgacagaggatgagatggctggatggcatcactgactcgatgaacgtgagtctcagtgaactccgggagttggtgatggacagggaggcctggcgtgctgtgattcatggggtcgcaaagagtcggacacgactgagcgactgatctgatctgatctgatctgaaaccatggaaagttcccatcagtgctcctgacttcaccggcctccctaaggcacactttctggtgctcattcaaacacctggtacttgacttgtcagattaggatgattgatctggagacatatgaagtttcatcaagtttgacttttgtcagaggagaaaggaggaataagaggtggatgatgacgaaagaatagagagtgggcttagtaatagttgttgggcatcagggctggggtggtcagaactgtgattggaacattttacccactgagaaatttatggtagaaataatttcccacaggctactaggataattatttttgttgtaataatgacaacgataacaataataatagctcttttttgaagttttatgatgcacttgatttttttgatgtatgctctctaatctagcacctctctgaagaaaggtttattagccccactttctggacaaggaaactctggctcagagagattaggtaacttgccataagtcacaggaaaggtacacggagtacctgtctcacttcaagtcagggcgagctgcttacgttttggtgacctcaaactgcagagatttgctctctccctctccacctcccagcagtttgtaaccttggacattaaatctgcattaatcagggaagaatgacttgcgttttgcagaccaaggtggccctgatctgctgagtatcgcttcacgtgaacag

SEQ ID NO: 30009 - DNA, 1610 bp, Bovine  19866880349882
  misc_feature (1)..(1): n is a, c, g, or t
natttgcactaaaaaccctagggctcatatgtttaaagcgatcctagtagcatatagaggtggaactgcatttgaccatgaagcaaactgtgtaaaactgatttggggatagaaaagaggatttcatctctgttcagcaagtctttaaacttacttccagttaaagggaaaaatgtgaagaaaagaggttaatgtcaagatatctggaattgtaacaaaattatgctacagcttcccagcattgtctgtttcttagtcgctaagccctggaaaatcccatggatggaggagccctatcaggctgcagtctatgaggtcgctaagagtcagacaggactgagcgacttcactttgacttttcactttcatgcattggagaaggaaatggcaacccactccagtgttcttgcctgaagaatcccagggactggggagcctggtcagctgctgtctatggggtcgcacagagtcggacacaactgaagtgacttagcagcagtagcagcagcagcaagtcctgttcaactctctgtgaccctatgaactgaagcattccaggcttccctgtccttcactatctgccagagtttgctcaaacccatgtccattgagtcagtgatgccatccaaccatctcattctctgttgtccccttcccctcctgccctcaatctttcccagcatcaggatcttttccaatgagttgtctcttcccatcaagtggccaaagtattggagcttcattatcatgcattccaatgaatatttagggttgatttcatttaggattgactagtttgatctcctcactgtccaagggactcttaagggtcttctccagtaccacagttcagtacactgggaaagaatctggataaaaacttaactagtttttgagagagttccttgttaactgctccattttggagggggacaaaaatattttctaaggaatttatgaaattagcagtcttaatttggaggtacagattcttaattctcgtttttacttgtaccaatacagaatatgagtttaagagccacatttactcattaatacagcaatgacttttttatttaactacagatcgaagcacatttataagcccacagcaaaaggagtcctcccaaatagagaaatcacaaagcagaaggctgacaggctcggctccagtgttctgtgcaggaagccttcctggagtagtgaatatttttacaaaccaaagagatgatgaagaaaagttccctgctaataatgcaaaagaaataatagaatttaaaaaatatctctttatgtaaatcctaatgaataaaggataaaagtgaaaattgcccagtcgtgtccaactcttcacaaccccatggattctccaggccagaatactggagtggatagcctttcctttctccagcggatcttcccaacccagggatcaaaaccaggtctcccacattgcaggcagatactttaccagctgagccacaaaggaagcccaagaatactgggagtggggtagcctatcccttctccagcagatcttcccaacccaggaatcaaaccggggtatcctgcattgcaggcggattctttaccaactgagctatcaggga

SEQ ID NO: 30010 - DNA, 1331 bp, Bovine  19866880350011
  misc_feature (1)..(1): n is a, c, g, or t
natgttgcacaagatgagcactgacactgaaagttttcccacattcatcacatttataagatttttccttagggtagacttcctgttgtataacaagacctccatttgggtcaaaactttccttggtttcattgtatgaataagtcttctctctggtgtggattctctggtgctgaataagacctgagcttctactaaaggcttttccacattcctcacatttatggggtttgtcccctgtgtgaattctctgatgacgagtaaggttgcaaagttgactgaagcttttcccacactctttgcactgataaggtctttcacctgtatggatcctctgatgttcaataaggaatgagctccgactgaagctttttccacattcaatacaaagaaaaggtttctcaccagtgtggattttttggtgttgtataagatatgtacttaatctaaaggccttcccacattcaccacatttatggggtctttccccagtgtgaattctctgatgttcaacaagtaacgaatttctactaaagcttttcttacatttggtacagtgatagggtttctcaccagtgtgtgttctctgatgttcaatcaggtgtgacttccaactgaaagctttcccacagtcactacatttatggggtttctcacctgtgtgaatcctctgatgtttaacaaggcttcttcgctggctgaagctctgtttacagtgattacactgatagggtctctctccagtgtggattctctgatgtctaataagggttgagctcacactaaaggtttttccgcaataattacactcatagggcctttccccggtgtgaattctctgatgttcaataacaaatgaactgcgactaaaacttttcccacattcattacattggaaaggtttctctccagtatggaccctttgatgttgaatgaaatgagccttgcggacaaaaccctttccacattcttcacatttatgacatttctcttctgaatttggtctcttacggataatgttagtgtttcctctgaacattctttgttcctgggtcaaagattcccttggtatttcccataagaagattcctctttgtttatctaacctaccaacaagttcaaaggtttctctatgcatgggatcctggtcaatttcacttttgattcttgtaactattataccctgtggttccatttcttcctcaatttcctcaatttcttgtttcacagttggctcctcatccttatctctgtttaaaacatctggaataaatggaaaacagcaatgtcagcctagttcttggccagcaaggagaaactgtcataaaaat

SEQ ID NO: 30011 - DNA, 3630 bp, Bovine  19866880469153
  misc_feature (1)..(1): n is a, c, g, or t
ncagtccatcttaagtgagatcagtcctttgttcattggaagaactgatgttgaagctgaaactccaatactttggccacttgatgcgaagagctgactcatttgaaaagaccctgatgctgggaaagattgagggcaagaggagaaggggacgacagaggatgagatggttggatggcatcaccaacttttggacatgggtttggatgcactctgggagttggtgatggatagggaggtctggtgtgctgcggttcatggggtcacatggagtcggacatgactgagtgactgaactgaactgaactgaactaaacttatttagttcatttactgttggtctttcatcttttatcattgagttgaaagttgttttctttctttctactttaaccatattctcttaaaggtccaaagtttcaaacaaaaggcccgatgtaaacaataccatgtgtggttgtgtaactcttactgtgaggacacaatgcctttaaaatatcaagtgaggaaaatcatctgtcttgacccgcccaacggctaattccatgtctctgggaagtggcttgtgatggtaaagagctgtaggtattggagtcgtttcaacctgggtttgaattctgactctgccatttagtgacacagctcaacatctcatggaagtagacttgctcaactcatcctgcgtggcagggtctacagataggtcttaaaatattctttaggagaaaataagattgagacttattgcaaaagcttatgaaagtgaaaataacctttattataaaataaaaaaactaaaaactgaatcctagaagtgtgatggcaaaatgacattttaaaaggaggactcttacatatgatgagaagcttgagagacttcaaagacagaagggttgagtgcagtttatgttcacgacgtgtatcactggggcccctcaaatgtcatttacagaggaggtgcctgagaaggtaaaggccagatgctcactgcttcttgaagagtctagagttgctttgtgggattttacgagtttttttggtttgttttttcattttattgacatatcattgtggtattaatttctgctgtacagcagaatgattcagttatacacatatatacttcttttcatattcttttccattatggtttatcacaggatattgaatataattctctgtgctatacaataggtccttgtggtttatctggagaaggcaatggcaccccactccagtcctcttgcctggaaaatcccatgggcggaggagcctggtaggctgcagtccatggggtcgggaagagtcgaacatgactgagcgacttcgctttcccttttcactttcacgcactggagaaggccattctatatagaatagtttgcatttgctaaccccaaactcccagcctgttcctctcccacgccttggcagtcacaaatctttctctatgtctgtgagtctgtttctgtttcatagacaagttcatttgtggcatagtttagatctcacacataagtgatagcatatggttcttatctttctctttctgacttctttcgctcagtgtaataatttctaggtctatctatgttgctgcaagtggcattatttcattgttatttttacggctgagtaatattcctttgtgtatgtacacaacatcctcttcatccattcatctctcagtggatatttagattgtctccatgtctttggctgttgtaaatagggctgccatgagcatagaggtgcaggtatcttttcagattatagttttgtctggatatatgccatatgatcacaaagagttggacacaactgagtgactgaacaagaacaaatgcccagaagtgggattattggatcatattggagtgagtatgtgttaacttgatgctgtaactttgagcccctggtcagcaatataggagcagctgtcattagggcaagtccctttggaaccatttgtataacaaaactcatctccaaagtgtaactagagccaacaccccctgagtgctcactgggtaccaccactctaagccccttatatggactatctactcagtcatcacaaaaatgatgtgaagatgctcttactaccagccctgttttatcatgaaagtgaccaacccacagtcctccaactaaaaggtggagtcaggatctgaagccagccagacactcccaagcctgtgctctcaactctcaataataacaaggtcgtcaagacatactaaaataataccaaatccagcacattttaaacatatgtatcttaaggctttcctggtggctcagacagtaaagaatctgtctgcaatgcaggagacccaagttcgattcctgggtcaggaagaattcccctggagaaggtaatggcaactcactccagcattcttgctggaaaaatcccatgggcagaggagcctggttggctacagttcatggggtcacaaagagttggacacgactgagcaactaacacacatacactttaaaaatatatccaatccctcccccaacactttccaataagaaatgaaaatgtcaggtcaatgctactttattttttacataattgaatattctagtgaatagagagagcaagagaatcgtctttaaatagtattcacagaaagaaatttgacgtttgttcaaaacaattgctcgattgcctgatccagactccttttgccattgaattctaaaaagaaaaaggaaaaatgtacaggtcagatggaatcattatcggaatggagatgaagcagagggtcatgttattacacaacatatttaaaaatgcctcacttgacatggcataaaggcccataatcaggactcatgagatatgctattgttgtaactgatcaggccattaggtctgcgtgagggggatggcctcagggaccagctccctctgtacagctggggtagtgtgctccccagcatctggacagagctctcagacactctggcctgccagagcctcagccactgctggctggtccaggttgtgctccagctgggaggctggggcgcccctgaaggacagcagcctcatgttcctggaaccacatcattgtaagagacagagaaggtccagagttgccttcattcagactccccccaacaccatcacaggccagaagccgagaaatcccccgagatttcacctcggggtctctgagcataactgaatggagggaatagtctggcctggctatagtcagaaatgctgccgctgtagaaaactcctccccaccgagcatcccagataggtggatttgcctcatcacaagggcccagtgagaagtcacaaaagcttctgcctcctcacagtggctgctggagacagcgcacctgcaaagactgccttatttgggacaatgccaggctgcagtggggtctctgtgatgctgagagcatgaaagggagggagcagaggtccttaggggttccacatggtcctcactttttgaaactatcacccctctggctgcctgtcactcccccatgtctgacataaaacatttatttggagaagagttgcagagaggctgaccttggacaatcctaccaggtgtcaaagtcaaggtttcttccattcctggcggaaaacaaaca

SEQ ID NO: 30012 - DNA, 871 bp, Bovine  19866880470557
  misc_feature (1)..(1): n is a, c, g, or t
ncacaaatgaggctaatttaatggctccaacaagcagtaccctaatggggaagccagcggctgcaggtgtgagcacagacaggcccgactcaggtctcctttgtgctgcactgctctgctaatcggatctaacgaaggagctggaggtattctccttctgttttctaatgatgttaatgtcttcatgaggttaatgaaactgctaacacaggccaattatgaatggctttatgtataataaaaaaccatctattctgagttttttgcaaacaagaaggacaatgattgctgtggtggttttgcctattattgagtatatcaacagggctttttttccttcttttttcctttaaggaccaggctcaaagaccactaaacttatgtgattcagagatgcctagattgctaggtggacctagctggggactgcttaaggctacagccctcatttagtcctatcctttatggtctctactgccccctgctgactgggagaggcaggagctgctctccagcacccccttgggaaatggaaagcaccagaagacaaaatatgaacagctattatttactgtcacttactatatgccttctaatttaatactcacaacattcccgtggggtagctcctgcccttttacagatgaagaaacctaggctcgagtaataaaccaagttccccaaggacacaaggcttgtgagtggcagatccaggacaaggtataaatctgtcaggactcacagctgctgttacactcccaccagagacatggtagagtgaaaagtacatgtattttaaaacaagataaatttggatcttggttttccttccccaatttaagagccatttaagataaaccttaaacaagtt

SEQ ID NO: 30013 - DNA, 968 bp, Bovine  19866880610852
  misc_feature (1)..(1): n is a, c, g, or t
natgaaattaggttgcaagctactggaaacacaacacatgttaatttcttagacacaagtggaaaaaaatcagttatggaaacaagtctgaatatcagggatctgatgaaatctcacccaatggtttctttacaatgtttctagctccccacaccccaaagagtctatctaagaaaagaacagactttaaaacagaaccagctctccatccagatcaccaaatgaaatacctcccaagctgagtgcagagaagcgcatcttattaaacagttttagcagtggtaggttatgaaggagacagctgcaaccagaaaatgaaataaaatgttctacaaaccttcagttcgtgtcaggttttactttgtgctcttgctttcaaaggatttgatacatttcattacctttgattctatagacatgccattagcatcaggatcctcaacattggttgctcgttggattaacctggcaaaattaaaaaacccaggatgcttaggctacgctccagccaagtttgagaaccactaagctagatttcaactttgagggtatttataaatgaaggctattcataatgtgaagcaagctacattgtaaaatgattccaaacaacatatggagtttaataaagcaatcactgtgacgttcgtgcttggaacattcctcatcaaatggtacaggtttggtgacacaggactgcatcttcctctcacatccaagcacaccacatagttttgcaggaagaaatattcacataattatgcttattggcttctgattttcagaattaacctataaaagcattaaagacaaccatagttacaagagagaatttaattataactttggacaatgtaatagtaatgattttggtggaaaaaaaaaagtaaagtaatgttttaactgagagaagctgagaaattgaagggggagaagacgtgcaggaaagcaaagaaaacagtaattta

SEQ ID NO: 30014 - DNA, 1249 bp, Bovine  19866880620550
  misc_feature (1)..(1): n is a, c, g, or t
nctgtgcgctgcaactagagagcctgtgtgaagcagctactgagactgcacgctctggagctcatactctgcaatgagagaagccatgtgcgacaagcagagaaagtccatgcagcacaacaaagagcccgggcacagcaacaaagactcggtgcagtcaaaacatttttttaaaaagaaaacatattagaaaaaaaagaatcaaggaaagtgtagaggactttaagagtctagaagagtctaaggagacatgacaagcaaatgcaaagtgcaattctggctcagaaaacagacattaagtaaaaactgaagaagtctaaatcatatacggactttagtggctaataatgtaccaccaagatcaagccagtcaatcctaagggaaatcaaccctgaatattcattggaaggactgatgttgaagctgaagttccaatactttggccacctgatacaaagagctaactcactagaaaagacccagatgctgggaaagattgaaggcaggaagagaaggagacaacagaggacgagatggttggatggcatcactgactcaatggacatgagtttgagcaaactccaggagagagtgaaggagagggaagcctaatgtgctgcagtcaatggggtcacaaagagttggacacaactgagcaacaacaatgtatcaccaccgagtcatcaactgtgacaaatatacccgaagtaatgttaacaataggggaaactggatgtgaggtatacaggaactctctgtactattcgtacaacttttctgtgaatataaagctctgctttaaataaaatgtttactttttaaaagtcaataaacccttgctcaaacttatacttggaatgatataatttttccaactataagttctcatagtaaaaggattacattacattgataaatgtgcattttggagcttggcacaatatagcagtttatatgttttctaatccaaattatcccccttctaaaacatcccactgagtacgttcagggagatggttataaacgcaggattctagaactcatggtaattcctcccagtggaattccggccagaataaagaatatttgactcactgcttaggggtaaaaaaaagcttttaatgaaaacagaaaatgtgttatgtaggatatgaaggctgggaatccaagaccaattattgtgagaaaagctcttttccacaaatgtgctgaagcaacattcaggatcagcgcagcctaattctaatg

SEQ ID NO: 30015 - DNA, 1011 bp, Bovine  19866880637668
  misc_feature (1)..(1): n is a, c, g, or t
ncccccagggagcccctgtgccctggagtcaaaattcagaggcctccaagctacttgtgtcataacctaccacatgtctttatcttctctcagatgatcccgcagtgctctgaagtacacaggtcacattaataccactccccccaaagccagcagaatctttgcctgtgacagaatgcagtactaaccactgttcacagtgttagcaagcacagttgtgtgaacgtactcagtcacacagttatggccgactctttgcaacaccatgggctgtagcctgccagactcctctatctgtggaattttcccagcaagaatactggagtgggttgccatgcccttctccagggcatcttccccacccagggatcgaactcatgtctatgcattggcagtcatattctttaccactgagctacctgggaagccccacacagttgatgagcacagcttaaagcaattgtcaggacatagcaaaggtacataagattgggttttataattctaaaaataataattctacacctgatggaaatgtaagtcgtcataaaactaatccctgtatttctaggaagtactgctcattcttcacatctaaggctcttgagttcaaacccagattaacagtcactgcacaaactgtctgtaaaaatcagtgttcacgctgagaacagaacgcatgattagatcagtgaggccgtgatccagaagacagctgatgtgctatttttaaaacttctcactggtgtaaatcagctatcctccaatcaaattgaaaaaccagaaacttctcactgttaaaaataatccacattttgcagatattccttagaaggattatctcagtagctgaaaaatggacaatcctggcatggtcataagtcttctcattcatttgatgtggaaataagatactctggccagcaggaaaaccacactgtcaacagctaaaaatacgttgctgattttatactatacatcctcaggttggaccaaacatatgtcccacat

SEQ ID NO: 30016 - DNA, 1031 bp, Bovine  19866880686111
  misc_feature (1)..(1): n is a, c, g, or t
natttttttaaaacttgctactgttttatagctttgtataaaatgctaatgccatgacatttatagaactattaaatcattttaatgaaagagtaaccgttataccactaattcatttgagtgcatttcccttgcagaatcgtttagtagttgattgtaaaaggatgggacttttttttttttttttttagctccatgattttgttctaccatggaaccaaatcccattattttgatgtgctttataacccaagtgtaatggagccaaatccattgacaaaatttgttgtccgaaatctgagcttgtttgcttcctggcccccacttaatttgatctagtgtctgcacaagccaagtctgcttttcttgagaagtagggctttctgtttccctcttatgtgggtaaatatatagtcatgtattttcagctactgaaaaacgagcttcattgccttaacactgaatcaaagaaaatatttgggctttaaaaaatatcttgtgatcacatcaggagacagcttggattgattctggatctgggcccacatttccttgttagtggccatcccactcagcttatgttgtcataccggagtctctgtggaaggaagtggctggaaattcccagacacgaagcactgtgagtggcagaattagacctccaatctccaatagatcactcttgtctgaacctgcagctttcatctaaagtgaaaatgatgcttattttttcctctctgtctttttaaagccctcatttatagataattattatttcttggacagaaattatctttcaggaacattgcctggcatccttaaatgcatgagagacacagagaattgacttcaccatcaatatatttttcaccccttaggaacatgaatattcttgtgaaatgttggagcctgcatttactttgcttaccttgaccgtacatttgtatttacttttcatagttctgagtttcttcagaaataattaatctcattatcattctactacgagttaaagggttttgctgctaaaa

SEQ ID NO: 30017 - DNA, 1773 bp, Bovine  19866880729829
  misc_feature (1)..(1): n is a, c, g, or t
nagctcctggggctgtttctttaaacaggtggttcctttaaacctgatggtgccacgcagatacacctgggccatggaacgtgggcgagccttgggaattagaggctcggcctgaacgcctctcctcactgctctgaaccaaaattgctgcttgagttgttttcctgcactgagaaggttttaatgtgataaacttctctccttaaaagaagaattagtggcagattcaagagatctggtaatcacatttacatatacacacacaattatccaagaataagtttacaaaggacttttaatacatattgttttaaaaataccattaaggccaagttaaatcatgtatttatccttagttggccttatgccagaatgagatggagaatagggaccattacacatatatatttactcttgaaattatttctgatatttgtataaatattcattggcacaacagatttgtgatgtgtgaactgtttaactacattttgcaaatgaataaactgaggatcacagaagtttaataaacctatccacagcttcaaatataaatagtaagtggctgagctcacatttatagttaggatgtgtaaagcaaaacccacacactttcaagtacctctccatgcctttcagtttatcaattcccactctgcctcaattcacatttttctgtattatcctgttctccatttggcatatgatggatcacacttacacatatgatgctaattcagcttagcacaaatgatggagaattaaatggataggtgcccagaagtgattttgtattatttatatattcaagcatagtctgctctctgttaattgctttattcttaataattggttaggaatcagcaaaaattaaatcaagctgagaaaggtctcaatgaatgtgtgccagtcttattttaaaaaggttcttaacaatacataataagtagtagctaccattaatgaccctggtagctcagacagtacagaatctgcctgcaatgctggagacctgggttcaatccctgggtcagaaacatcccctggagaagggcatggcaacccactccaagattcttgcctggagaatcccattgacagaggaacctggagggctataatctatggggtcgcaaagagtcggacacgactgaataacttcaccctttcacgttcaccatttatgaggtgtcaggcctttaatctaacttaatttttataatgttcctctgaggttggtatattattagttctattttctagaagaggaagcagctgagctctaagaacactgagaagcttgcccagagttatacggctgtaagaagcacagttttgatcatacaagctctgtctgatctaaataccctgatctgcttcacgtcttcttgcatgctggtctcaaagaggaagcttcctgccataaaaacacagaggcagtgagatacttaagggaaaatgacacatgtagaatactttcagtaatttcagtattttttttttagcttcctgaggcataactgacaataagccaggcacatctagaatgtaaatttgatgacttttgacatatgtgcatgtctactaagccaacaccaaaatctagataatgaatatatcatcacccccaaaagtttcctcattgcctttataatctccctgccctgttttctcattcccaggcactcataatatgctgttgctgctaagttgcttcagttgtgtctgactctgtgcgaccccatagatggcaggccaccaggctcccccatc

SEQ ID NO: 30018 - DNA, 1854 bp, Bovine  19866880815973
  misc_feature (1)..(1): n is a, c, g, or t
ngactgggggaaagtaacagtggtggtcactgctgaccagagtaactttcctatcagataagtactggttgctcagcagttctgaaattcttcagcccattctttccaattcactttgcctctacagcatcctaactgcacaaacactcttcttcagacaagaaaatggaaaactattttaaaaaatcacatttcaatttcaattttactctctagttcaaggtagtggtattctaaaccctagaatttggattgctttaaatttattcatctgagatatatgaacatacacaggtactccagtcttcctaaaatgcacagagttcacagagtcggaagcgacttagcagcagcagcagcagcatcaagcatgataatgatacagaaaaaattcaccatgagaaaatgaaagatgatccctgactcttccatccccacatctgctgcacccaatggctcttgacctgggcttcattctggtgctctgagtttataccctcagattctgacctttttgaaaacccaccacatgtctttcacaagctgacctgtaatactctgaatataccaaatatcattggattgtacactttaaacaggtgaattgtatggcatgtgaattctctttcaatcaagtcgttacattaataaagggaccataaaagaattgaaagcacaatcttagatatgtgcacacccattttaatagcagcattattcaaaatagccaaaaggtgaaagcagctcaagtgtccagagaccaatgaatagaagagcaaaatgcgatatctatacttatctgtgtctatatctataatctgtatctataagtgtgttatatgatatgtatacatacactgggatattatgcagcctttaaaaattaaaaaaacaatatttttggctgtgttgagtcttcgttactgtgcgtgggctttttctaattgcagagagcaggggctactctctcattgcagtttttgggcttctctttgcagtggcttcttttgtcacagatcacagactctagagcatcaggtcttcagtagtcatggtgcgtgggctcagtagttttggagcatggagttagttgccttgtggtatgtggaatcttactggagcagggattgaacctatatcctctgcattggcagacagactctcaaccactgaaccaccagggaagtcctatacagcctttaaaaagaaggaaaatctgacatgtgctacaacatggatgaaacttgagggtattatactaagtgaataaaccagtcacaaaaacacaaaactaaatcattccacttgtataagatacctagagtaaattcagagccagggggtagaaagatagtttccaggggctgtagcgggagaagtggaaaatggttgtctaatagatacaaagtattagttttgtaagatgagaagagttctatagattggatacacagcagtgtgaacatatggaacactaatgagcactactgaacacttaaaaatggttaagatgctatattttatattatgtgtgttttaccacactttttaaaaaggggagatggggctgtggttcatgcgtaccgtttaaggggagctgcagcctggttgcctgtgaaattccagtaaacaatgatagaagaactttcagaatctaatatagttttagaagaaagtaatggtcatgttctaccccttaatggtttcaaagttctcagagataggaattataagacagttactctagacttttctgacattgataggaaaggattcatatatttattaattcatttattcacaaacattgagtgtgtgcctactgtgttttaggcttggtgccgattgctggga

SEQ ID NO: 30019 - DNA, 1672 bp, Bovine  19866880830095
  misc_feature (1)..(1): n is a, c, g, or t
ncttccataattattacttctaggttgcaactgacagaagaaaagcacactctcatagcattatttccacataccgttgaagagacacccccaagtttaattgtttccaccgtggtccctgaatcttcaacagctgtcttcttctctggaggcacagatgtgccaggctctccagctgctcttttacttccaattcctgacatcgtggcacaagaagatagctgttttcctggagacaaaaaaaatcttaggtaagataggcaaggagagcaactagagtccatctatgatgtaaaaactagcaacttttcctgtcaatcctttaacccgggtccattaattccacacttagcaacatgatcctcaagttcctcttggaaagagaaaagtaaattgtgaagtaagaggcgcagctgaatttacagaactacaaagttctaaatagaatgctactaaaatacaagataatgggcaaaagatgaagagacttagaaaattttcaggcatctcatttcctgaaatgccaacagctgaaaatatagtttgatttagaaacatagaaaatcaattaattctttagtgttgggagaatcagagagctggaagagacctgggagatgtctacttaattattaatactgaacaagccatatatcatctctgagcctcaatttcctaaagcagaaataacaacagtatatgcttcctatgctcctcataaggaatgaataagtacagaaagactttagcataaggccgtacacgaagcatgcactcagaaatgctaactttcctttttatatttgcagtttccttatttctaaacgctctccccaccaatttgtgtcaccctagagaagctagatctgggtgtgaatcccagtactaattcttagagagccttggaaaggaattcttgatatgcacaatgcaagtgaccacatactctctctgctctactcgcctcccagggtttcggagctcaaaagaagcggaatagatgctaaagcactttgctactgaaggtatcagccctgccatcaccgagacgacacacaactctgcttccaactgaagctccagaagggtattggtggcagcgaccagagtgggtcctcgcctggagagaaaggaggaggacaatagcctcaatccgactccagaggagccaaggacccagccttcggagaggccaattacaggcccgggagagggaggccttggagcggaagagggtggggattcccgttgcccgctgagtcccgtcccgcccttggccgagatctgacctgagttcttccaacttgcgccgcccgggagtggaactcggggcagttattcaccaaggtccgagtagccctcccacctctcacccctaacccacaagtgaagacccagcgaagcttccgggaggcggatccaaggggaggaagaagggaaagaaaagaggaagtcgcttcaatctggcagcgtgaaggacaagactcaaccgggcggaagtgacgcgaatcgagggcgccccgcttccggaagtaagctctgtctagcagctcttgggcgcccggcggccgctaaatcgaggcctcgctgacgtcagaggaaacgtcccagattttttcccgtttgttaaccattgctactgcgcgacttgtttgtttttttttttttttta

SEQ ID NO: 30020 - DNA, 1023 bp, Bovine  19866880861611
  misc_feature (1)..(1): n is a, c, g, or t
ncctcccgctgccgaggccctcccgcgtgtgcagggggctgccaggagctgcccacctgcgtaaacgggccctgggcggccggcaggatgtggggcggctcacgacacatcaaaccagaacacgagacagcggagcatgcttgccacctgctaggcctctcggagtttttcaggaaaggacatgggcccagagcagccatagttcccgggcaggaagcctgcggtagctcccctccaggccttgggtgggagagggcggaggaccccctgccccagtggatggtgaccccaccttgggagctgtctggctttagaggtctgaacacatgtgcactaagaacttaaatggctttccccggctctcttccaaaagtgatagttgctcagttgagtctgactctttgtgaccccacggactgtagcccaccaggctcctctatccatgggattttccaggcaagaatactggagtgggttgccatttccttctccaggggatcttcctgacctagggattgaacccgggtctcccacattgtaggcagatctgtatcgtctgagccaccagggaatccagctttctctcatgaccatgtattaaaaagaagtgcaggaacaggagaagcacattgattctgcttccacgggcaaactcacagcatggatgacacacaattagctgtgggcatcctcccttcctcctccctgtcctgggccacattcatcaccgtctaggtttgtgtcacttgtgccagctggcacccttgccgtctgcgctgccttctccagccccagctagggaggcctggagggtggccataatgttggtgtcacatgagcagatggtgaggctgtgccggacccaaatgctggtggcagggttgatgataccagtgtgaaaagagcaattaaggctgtggggagataaggtgtcaggagctcccatcccagggattctcctcagctctcgcttcctgagaatgacaacccgatatatgaggatgcattaggtcctgatcattc

SEQ ID NO: 30021 - DNA, 2074 bp, Bovine  19866880891355
  misc_feature (1)..(1): n is a, c, g, or t
nccacattaagattgttttttaatcgaaatctcacatctacagagcttccctggtggctcagacggtaaagaatctgacccaagttcaacccctgggtcacgaagatcctctggagaagggattggctacccactgcagtattcttgcctggagaattccatggacagaggagcctggcaggctacagtccatggggtcgcaaagagtcagacatggctaagtgactaacactttcacactcattacatctaccatagacagagaagcttgattgtttcttgagttttcttccattttgttttgagccactttgctttcttcaaaatgtctgattattctccacacaggtgctctgggtagagttcagtattccattaatactgaacaattcacatacaaatgggtagtttaaccttagatatttccccaaggcctggagaggctgacacaaatataaacagaattggaagagctggtaaaatatttagctgaaactttaaagaaatttttctctctctggggcttcctggtgatggttgtaatgcagctgaactactttagctctgtatgttttatcctccctcctggatgcaggctttctgatatccctggatgtttgaattagacagcacatggacacaaagggcggactacgctagtctatccagttgcatcaatagcttcttagatcccttttctgattctattattctgtgactgcctaatagctcatccttttgttgttgttgttagaatctcacatatacagataaaaaagaacatactattttgaaagaattaagataagaattaaaggaaaacatttaatgtttaaaaggaagacaatatgaagtgggacacaagtgtctatttttaatggatctaacctaagagaattttgttttaataaggatgacttattacaccaatacttaccagggatctgctctgtataccaagcactatatttgcttcctgatgataatgatgatgagaataatagcagctaacgttataaccaacttagatagcatattcaaaagcagagacattactttgccaacaaatgtccgtctagtcaaggctatggtttttccagtggtcatgtatggatgtgagagttgggctgtgacgaaagctgagcgccgaagaattgatgcttttgaactgtggtgctggagaagactcttgagagtcccttggagctgcaaggagatccaaccagtccattctgaaggagatcagccctgggtgttctttggaaggaatgatgctgaagctgaaactccagtactttgtctacctcatgcgaagagttaactcattggaaaagaccctgatgctgggagggattaggggcaggaggaaaaggggacgacagaggatgagatggctggatggcatcaccgtctcgatggacgtgagtttgagtgaactctgggagatggtgatggacagggaggcctggcatgctgtaattcatggggttgcagagtcagacacgactgagcgactgaactgaactgaactgagtgtatgtttcatttctgctactgtatactttagctctgattgattcttttttgcattctctagttagagttttcacttgaagttcttactgtgtccttccactctcaagttcagagagcatctttatcaccattactgtgaattctttatcagatagattattatctttgtatcattaaagtgtgtccgtgaagtttgtcttgttctttcacttggaacatatttcttcagctcctcattttgcttggctctctgtgtttgtttctgtgtattaggcaaaactgctacctctcttgttctttatggaatatggtgtaagtgatgatccttcttatccagccctgactagctcttggttgtctctagtatttttgttgttgtctatactgcctgatttatttttgatatgctcctgttgttgagggtatgccaaggtccatcagtgttccaaggggaggaatctcatttagcacctagattcaggctgaatcttgttttgcaaggagccttgtcattctgtagcaagcccaaggaggtgta

SEQ ID NO: 30022 - DNA, 1371 bp, Bovine  19866880907494
  misc_feature (1)..(1): n is a, c, g, or t
ngcagatgctttaccctctgagccccaggggaagcccttaagaactcagcacaaagtaccctatggcagaaaggcatcaaacaacctaagtagtaagattacatatgtcaaagaaacaatcaaggtactgatttcacttggaaatattaatacatttcacagaatttgtcatcccttacaatgcatgcttgaatgaccaatctaaagagaaatatttcatacaacccgggcttgttctttagtgacaagggtaggtacatagacccccagactggctggacaagattaattggctattttgcatcttgtgtttgaaaagtgtcagaactatctgtcttttcattcagttctgtccaaatagattaatttccatggacgacaaacaaattaaacagttaaattttgtgtatgtcattagcttgacaagttagccatttgggtttgcactcgagctggtgactctgccagtcagacaaatgtttgcaggccgcagacactggctacccagaaataaccctccttcggcccaggacagttactgaataagaatgatggaacagagcaagctgaatagaagtaggtgataagaaaccttgaggacattcctgagctgacaaatactggcttgttcatggtgtgaggttctagctgggctgtctggtgagctaatgagtagtaagcatctactttccatgtgccaggcaccttaaaaacactatgtaatctgcaaaaccacctagtgaagtcggtattactagtattattattattactaccctgtaacaaatgagaaaactgcaactgggagatgactagtaaggtattacagctattttgtcagacccgcaaacccatgcttcttccaaaacaccatgccgccatcctttagggctagaaaaaaagcacaccaaagttcagctccaaagtgtttgccttaggacgtgcaaaaatgagtttgaacaatcgtgtcctcaatttttcaggtcaaataacacgtagtttcagggaaaatgagtctttaaaatacttctttttttttttttttttggctaagcattcttttgtctattatcaatggaaaattgattcctaagttatctaaattccatctagcatatacagaattaatatttatctccagaaaaatctgaatattttcaagaaaaagttgaaggatttaatataaaataatgaggatactttgggaagattgttgaacacatcagatttcatagaaggaaatactagagaaacagtgtgaaaaatacaacagcttgaactgactccattttgattgggggggatttaataaaatttcctttatcaaatttcttaaaaaaattttaccctccattcttcaaatctcattcc

SEQ ID NO: 30023 - DNA, 1666 bp, Bovine  19866880936445
  misc_feature (1)..(1): n is a, c, g, or t
ngacatgagtttgagtatactctgggagttggtgatggacacaaagagtcggacacgactgagtgactgaactgaactgatactgctaactattagtactctaggggtaactctaggttaactatcaatactctagggctatgtacctggctctgttttgaatactttacaaatactagcccatttaatcctcacaataaccgcatcaggtgattatctgttacaagatcccatcttacaaacagggaaactgaggcatggagaggctaagctacttacccatggtcacagtcatgtaaccagtaagtgacttagcctagttctagactggagtctgtgtgactgtgctcagaacctcttaccctatatgaagacagatacctaccttgagaaagctaaagagaggaaaatatcaaagtaccaaatgaatcatttgaggcacaattttattattgttatttcacataaagtgaaagttgctcagttgtgtccgactctgtgacaccatggactatacagtccatggaattctccaggccacaatactggagtgggtagcctttcccttcttcaggggatcttcccaacccagggattgaacccaggtctcccacattgcaggcagattctttaccagctgagccatgagggaagcccaagaatactggagtgggtttgtcttaaataaagtactgcatatgcatagcacatttttcttttttaagagaaaattttctaccttcccaggcttaattctcatttatctccttgaaaagacttccttttccccacctcctgatacagccatcatccagaatacattgttgtttatgagataatttttcaatgaatgaatcaatcaaccaattagtcaacaagtgacttaatcgccatagagttaatttggcctggaattgaacagagcttggtgtgaattattattctaacaatctaagatgttctcagagcattagcacagagcttcctttgatagctcagctggtaaagcggaggactgtagtactttcagagcattagcacaagttttgtagactagtgcagtgaatctctagtatgaataaaatggagaaatcatactgggaaaaataaaagagctagtcttaatgatgtgccagtgaggtaccggatacaagactgtttgcatcatttaacactctatttaatttctcacaaaaacccatatagtagatgagaaaatggaggatcaagaaataaagtaatttattcaaagttataccagctattaagaataagcagaaaactggaaatgtgacccaaatctttctaactctaaagctcttttcactaccatccaaaatttcagttaagtaaaggagcaaagggacttccccagtgtctcagacagtaaagaatgtgcccacaatgcaggagaccagggttcgatccctgggtgaggaagatcccctggagaaaggaatggcaacccattccagtattcttgcctgaagaatcccatagacaaagaagcctggcgggctgcacagtccataatgttacaaagagtcggacacgactggagtgacttagcatacatgcaaaggagcaaacagtggagttggcgagggaaggggaagagagaaagaagtaagaataagatgagacttagccaagacagcagctttat

SEQ ID NO: 30024 - DNA, 1932 bp, Bovine  19866881040477
  misc_feature (1)..(1): n is a, c, g, or t
ncaatggatttgctcaacagatgattgttaggaagtgaatgagggagtttatgaggaagcacagagagatgaaatagcaggcccaaactggatgtttctctttgtttagccaaaccaaaggggacaactataaaggaagatgacagtggccagagagctctatcattgtaaatgtgaacagtaccaaattacaatttacgactaattagaatttgcatgagtctttcacaaaaccactccaaaggattcattagaaattttctttctttttttttttctgactgtggcaaaatgacttaatggaattacctttacaaatgtattaatttattctaccctgaggatattatattcactgatttggcaaaactaatctggcctaataacagacacacatttactgagactaagcaaattttccagtagagagatactcagccatttggaacaaatgaaagttgaggtataaagatgaaagaatgactgtaatttccaaaatatgtactagcaagtgttactgactaaaatgcaaagctaaaatttgtgctgacaaaaaaaaaaatctacctaccaccaccaccacctagaaattctcaaccacagacagatgctcaagttcaagagatattctccatacatgtgtctcctaaggatgtactaagctgctaagtcgcttcagttgtgtccgactctgtgcgaccccatagatggcagcccaccaggctcccccatccctgggattctccaggcaagaacactggagtggattgccatttccttctccaatgcatgaaagtgaaaagtgaaagtgaagtcactcgtgtctgaccctcagcgaccccatggactgcagcccaccaggcccctccgtccatgggattttccaggcaaaagtactggagtgggttaccattgccttctccaaaggatgtactggccaactcaatatacgtgataaacacaccttctcggaggctttggttctctctggtagagtcaggaagtgactgccattcacttccattctgccagtgaaatactcactgtatactgtctctttgaaaatcctaaatctatttcagagaccagggatgaaatcttgcagccaacagggaccagtataagtgagtgaaatagaacataaggcaataggtagtaaagagacttgcttaaccaaagactgttctattctgtttagaggggaaattctttcccagcctcaggagattgctgcattatgggatgtgatcccagtgttcccagatttcccaattttccaaaagggatcagaacttggaattccatgtaaagtttcctagctgttacaatagtgtgtgactagtctgaatggccagcatcaagaagtctgcaaacaataaatggtggagagggtgtggagaaaagggaaccctcatgtattgttggtgggagtgtaagttgatacagctactatggaagacagtatggagcttccttgaaaaactaaaagtagaactaccatatgacccagcaataccactcctgggcgtatacccagagaaaaccataattcagaaagatacatgcaacccagtgtacatatcagcactatttacaatagccagggcatggaagcaatctaaatgtccatcaacagatgaatgaataaagatgtggtacacaaatacaatggaatattattcagtcataaaaaggaatgaagttgtgtcatttgcagagatgtggatagatctagagactgtcatacagagtgaagtaagttagaaagagaaaaatgttgtatattaacatacatgtggaatctagaaaaatggtacagatgaacctattttcaaagcagaaacagaatcacagatgtaaagaacaaacatatggataccagggggaaagtgcagggtgggagaatgggagatgggattacatacatatata

SEQ ID NO: 30025 - DNA, 3689 bp, Bovine  19866881048613
  misc_feature (1)..(1): n is a, c, g, or t
ntgatctctgacgacctagagcggtgagatgggatacagggaggcttaagagggcggggatatatgtatacttacagctgattcatgttgtacagcagaagttaacataatattgtaaagcaattatgttgttgtagtttagttgctaagttgtgtctgactctttgagacctgatatactgcagcatgccaattatactccaatttaaaaaacaaaagatctttctccatctctaccaagaaaataatttcctatctaattattccaacctttggaatatttctgtatctcctcctaatgaatgtttcctctcatgatcaagggtcaattttcctgcttcttttgtgcctatatatatatatattttttgtatcctggatattttgtataaaataaaagcaatagctaaaataagtaatatttgcctcaagaaaagagcattctcctgtcaaaatgttagaattaggggctggatcaatctgatgtgtagttgagctgggtatgggctttgttggggctttatctgattcagcacacactggcttctaatatttgggggattaggcccttctcattagaaaagcctagggtttcaacatcagtgagcttctggagatttttttttgtatgttattgtcatgttgctagcttttctaactgtggaatatatatctctgatttacaatccttgtggaaggagggtaactaaggaaatgtcttttctctgtcattctgctcctggctttctaatccaggggatatctctctattttgctgctctgcctccatcttttggaaggcagctgccttgctttatataaaggcctgcaaagtcccagggggatttctctcagccaagtccatgctctgactctgatgtattgtccctgagcacattgtcaagtcctatagaaagggttggcagttggagcgagacttactctgtcgctggagtttctcagaattctaatctatcaagccagcccatgcacatacattaaaagtacattaaattttctgtggatttctctatttttcccctatgggttttttttgttgttgttgctttgccatgactgaaagtcattgtgtaggagtaaaaatatcttctaagaggagcttgtcacttgctagagtttaattcatttagattctttgcattcttggcaatctaatgagtttaaagaaacaaaagaaaacaaaaagcacttctgtccacctgaagggcttgtcagtttctagttttgcttcagttcagttcagtcgctcagtcatgtccgactctttgtaaatcctaactatgaagtaattttttttctagggagcaatatatatcagtctccttgttctccctctgcactttattctcattcttttgaaaagatcctttttcatgttcgtttgaggtaaagttttcgatgccaaagcattctgtttgcaggactcagagaggggattagcagtgaagtcatctgttccttacagaaagatgttcatcagttctccctgttttcatccccacctctcacccctcctattctccattgcccttgacttttcagggctctaggtggaagaattgtgatgtcttccttagatgtgttaatatcattcatgcatattttgactgctgcttcctcaaccttggttcattatttttatgaaacttaccaccttgctttatagtttctagagatttgttgaacactcctagggatcttgaattagaagattacatcaggatatatgctaactaacagaagagttagggctgaatcccaagcagcctgattccgggttcagtttatttttcattaacactatcactgccttgtttcattctcccatatttctttctgttttgaggtttcctgaaggcattactgaagaatcatccaagatgccacactgtaacagtggttcagctgacagctacccaagcaagtgctcttattgatgagccagaacatagccaagatacaggcctgactccatttcagatatagcttctttgagaatcactggaagatgaaaaggggaacttgtttcattctcaagccaactatagggccaatgaagttggtgagcaagcaccttttctttggaggttattatgtaggggtctactccatgggtctcctttggtccctgaaacctgagaagatattaattagactgttgaaaagagatgtgatgaatagccctttgcaggtccaatttaaactttatgattcagacataatggtaacccatgttgccatcagtactccaaatgtcagtctgattttgtagaggtggtatgtagcacctggtatcaccggatcctaggtcaaagaaggctgccttcagggagcctgctttctccctctaggtgaatagaattaccatggttattgtcatcttttttcctccctcttttgaatcccttctcctcctagaagtttgtcttaaaaatggatatatagagagtattcctttcctgatttagaatcagagttaactttcggaacagaacaagaatgtggtgatagctttagtccaactcaggctttatctcagcaattctggagcctaagggtatggcagtagtttattagagtgcctgcattttgaaatttccatagctttggatttatgtgaaattcattcacagtgaaacctggctatctgaagaccctcatcctgttatggaactgtgtcccaggtttttttgggagttctgtcatgtctgaattttaatttaggcataggtcattacttgactgccacagtaaactgatgatataatgaattgaaatattgtaaaaaacacagaggatgcaaaggaactatataccctttagttgcataaatattgcatatttataggatattccataaaccagcagctaatataacatgcttcctaatggctatagaatttatcataatttctcatagtaatctcaacatattaataagtggttcaaaacatctgttgctacatttttcagagtttattatggggctggatgaagcaaagttaatttcctagaaatagccctcagtaggtccaggtttaacgtgtgtgtaaggtagctttgatctggaatcaggatgtatttcctctattattttttttttctaatagtcaccttctagaactgagacaaggagaccctaagtgttagaggtagtttctgacaacatggagttttaggtggcacagaagggaaaaaagctttcctttgcaaattcaccatgatccatgcacttcttttgggtaaatttgaaattttttatactcagtatttagcataactttattgtgtatagggatcaagaagtaagtgacacaaacttccttgcctctaatattcagttaagaatctgaatatttgtgcagggctttcaccttgggattatgtgctggtttaggttgtgctaagaggtataaaccctcttagacttgtgtgtgctgggtctcctgatttgggtgcttattttgttggggtacaaaaaagggttgtgttgtgtagggccaaaagagtcaagtctcaaagaagttctcaacaacatttttccagaaaaagatgctcagcattcttaagtactgtcaattagaagatgcaaaaacattcctattcacgtattcaaatagtatttttaaaccaagatatattcaatatcactttatttcttcttttct

SEQ ID NO: 30026 - DNA, 1623 bp, Bovine  19866881053299
  misc_feature (1)..(1): n is a, c, g, or t
ntacctaggggttgaatgaagatgaaaatctgaatgagcattaacggcaggtgggaattatgcagctttcttatgcttcaaatagaactgaatcagagaaagccataggtatgcacaggtatgttttaatgtatccttcctttgtgttattccttaagaattttaagatataaagctaaaagtattttaaggatagaggatccagaaaaatgggatataagaagtttctagaaactataataattcataagtaattatatctgacacctagcatttatgtcatggtagatgtgcaaaaattgcatttatttttattggtgtttaataatctgtctattcatgaccgaacatggggcttgtgaatgtgttagtgtgaagaaaggcggctctttatctcatctactatgcattccaaatctaaatatttcctttccccccaattcctttcatgattacgtgcctttgcctgtgccaataaaaggggagagagcaaaacagacaagtatttgttgtatcagagtagtttctaacacagaaagaactgtttcatttcactcattacagctaactgagagctgtaagcattagtgatgctagtttaccatgatgtcaattcagctgtctccccaattcccaggacttggaaatgctgaatctgcagctgctgtgacagttttttcaccctctctcaccaaaaaaaaaaaaaaaaaatttaaggcctccagcatcttcatcttagaaaaatcaaatatgtacatgctgtacttttatttcattaagtttcatttgaaacagatgacatttctatgtggatttttccaagaaaaatagtttctctatctgctttgatttgtgatcattttaaaatgctcagcgttaccgagagcacttagtctctgagtcaagttcttatgctgatagaacaccaatgccccctactgataaatttcccaaaacctttctatggacaatgagaacagaacccccttacttaaaacaagcatactattcaccagccttgtctgaaaaggacaagtacttcttggatcacctgtgtctgctttattagcctcttattagtgtaatttcctctattagtctttactaaagcagctagaagttatttcatgcttggctggctgtattagaaaaaacaattttaaaggtatcagcagagctttatacctgataaaatgtgaaccagaactaacatttgattatagtaatgtaattcatgttacattatatttatatttaatgggaaaagtccttctgaataccttatttgtctccctgtgtcttcagtatttatagaattcaggcataaacagactttaatacctaatgctccagatttacatgaatcccttctaatgtcatctccatcgagtaattggttggttttccctagtgacagagaacacactacctatcaaagcaacctgttgcatctttgaaaaattctggcagaaagttcatggaaaaacttttcagctttcaaaatattgggcaacttcttcccttcctttgctgtaacagctctaattcttcttcaatatttgaagagaaagatgatgccccttcttctggcattcttctctccctcaggaagagtgatgtcag

SEQ ID NO: 30027 - DNA, 1152 bp, Bovine  19866881082530
  misc_feature (1)..(1): n is a, c, g, or t
nggaaggaggatgaaggaattcccacacattgcttggccaaagcttcccaaccagcccttaggctcaatcagggtgatgcccgcaaaccacagacaagccagcctgtccctgctgcccctcccctagctgctcactgcatggactagccggatggctctgcttctgagaagcccctcacagcttccttcccattactcccattggtcaattgagtctgccttgatttaattcgctggggacatccaaatcagcctccattctctatccccatagaagctaagtgatcattaaaatataaattttacagacaggagtgctttcagagctcatttcagtccacctcattttgcaagtggagaaactgaggactttcttgctttcttacaaatgtatgtggctaatttagaaagttatatgtgaaaaaatcaccttctaattacatattctcatggaagcctcatcttatttcttaaacataatggaaatgaggtccaaaaatataatatgacttgcccaggtcccacaacagggaatatggatgcttaaaccctagtcttggtaatgtagatctgctttttcacaaggagtgtaccatgtgcccccaaaagtggaaggtttgataatacctccttaccatctcaacactacataatgattctaaccgtagaatacttcacatgtaacagctgagatataagtaacaactgttagttaaaaacagatattttaactggcattgccacctttatgtttaagacttaccttctcagtaacatactggcagtgttccatgtcatggctgccatcaggaattacctctggctcaacaatgggtaccagaccattctaaagagaaaaatagaggggacagaatgaagctctgttcactgggatctttttcttaacatttagcattccaactggtacaggatgaagcccttatggagaaatatcatataaatgacttaaaatcaatgaacataaatttaacaggatatctagtgagcatctgtggtttagccaaaaaaagaacagtgagggaaaaaaaagttttccttgaaatggggtacagtaaatgcacactctatttctgtatatcattccagagactattctactacctcagaacctatatgttatcctttagggca

SEQ ID NO: 30028 - DNA, 1049 bp, Bovine  19866881083635
  misc_feature (1)..(1): n is a, c, g, or t
ncattgtctggttacagctttgattatcaccctggcagagtgcgtgctgctggcatcccatgggtaaaggttagaggtgtcccgggcaaggggaagccaggcagggattgaagtgaggtcagaaggaaactcaggagttgaagtggctttgtcttggaaaggaaggaggattacactctctccttacctatcagaatgctcctaaatacccggaacatttggtgggcttcacgacagggtaaaccacaggaacagctgaccagtgagactgtgatcagcttggctcgactgcaaaggaccgtggggtgcagagtggcaaagcagaaaggggcaactctcatgcttctaggccattgttttgctttgtttttcttttggtggagcacaatggactgtcaattctgttagggaaatgtatgtttttgcaatataatttaatggttgctctcaaatttctatagctttcatttgagtagttgatgaaacagactacctgctggttacatgtggcagggttatttttctgcctgggggtaattttattcttaggggaaaaagatgctatttctgtaaatctaaaatgttacatgcatcagagaactcaaggaaaaagcttttattctcttgagacaggcatagatagctccagtttcttcttcttgtttaaagccaccccataaagtgctatcacaaacacactccaaggatgaattgtttagtgctataaagtttatttgtgtgcaaatacacacacatattgcatttacactccacatgtagttatgctgtactctctaagagcactttagaagactcaacatagattttattccatggaaaataataaacgcagacaaataagaaagccacatgttaaaatgtaaataaatgatggatgtaaaaattttaaattttctactaaaagactgaaatctaaccatttggtcatggaatactgatttcctacttgttctgttttccctctttaaaccagatggtgtttctcaaaattcaggttataaaggcatagcacagactgcatttttttc

SEQ ID NO: 30029 - DNA, 1355 bp, Bovine  19866881119406
  misc_feature (1)..(1): n is a, c, g, or t
ntggatttgaatctaagagatttttgtctacataattttgaggaaaatttctttgaattattttgtgtttattcaaactgaaaaaacataagctaaataatctgcctagaatcaaggagcaaatttttgatgggttgttagataacagaatcagatacaaaaatctagtaatctttctaaaattaaatgatagaaacttgcatttaaacttttaaagggactgtgagatcatgctaattggcattttaacaatctattgcttatcaattatttagcaagcctctgaggagcagggctatggtatcatagagtgactttcagacatttccccataaagttgaaccgtttaaagtgatcctatatgacaatgatgcctaaagagttaagattataaatatatatactttaaaaaacatgccattgaagggccagagaagacattcaggaaaaatgctgcagtgcgagaattttgtttactactaatatcattacttataagtgaattagtttttaatttcattataaaattcccttattaagtatcagcaggttctaaatgctggtttattcatttacctagtttgtttttatacaaactaatctgacttttcttaatgactgtgtgacattgctataaactggatcacttaatcagtggatggcgtaaaatggaaaatcatgcttcatgctgcatttcattttgcaattacataattctgcaggctctttttgggcaaataagaaaggcaaaaggataaggcttatcaaatatgtattatgaaaaagaaaaaagtccttcagtttcctttgtatagagtgctgtttgaattactctttagataagctgtagcgagccctttgcttgcaccatcaaggtaacagtatattttactgtattatctttggcttaagtgttattttgaatcctcctctgttatagaataggagcatagagtagactgtcagtatgaatttttgtgtttatttacatatgcactcacatggaaatatatttgtgatatcagcatcactgctttatcacaatgtcatatcttggtacatttgactctttttatgatgtagcattagggaaaagaatggagtcaaaagatctgtgtccttatccccaatctgccatccactggccatgaccgggtacatcaacatgctcttcatttcagatcccagagaggggatttgatcagtgtccatatgtataatgaacaaagtcaaggaaataaaaaaagaacaaaccaaactatctgttgacaaacatgccgtctggacagactgcttctcattttatgatgaaaacaaccagcaccaccacctcagcagcatctgccatgacaaca

SEQ ID NO: 30030 - DNA, 1353 bp, Bovine  19866881127749
  misc_feature (1)..(1): n is a, c, g, or t
ntgggttcgataccctgggtaaggaagatcccctcgagaaggaaatggcaacccactccagtattcttgcctggaaaatcccatggacagagaagcctggtgggctacagtccatggggttgcaaagagttggacacaactaagcaacttcactttagaggatcaaactttttgaggggaaacctagtactacaatttgtctgaagacattgttggaaaatgatgcatatctatgtcaaagtctcaggtgagaaatttcttttaggaaaatattggaaaggcctcaccttttcctttcccttgataagctggtagctctttctatgaaaataattagaacaacacaactgacaggttgcctttttcctttggttgtcactcattcagtgtttctgattctagttcatattttcccagatcctatttttattttttatgtctctgttacctataaacaggttcaaatcctttgtcaatgaggtatataaaaaaggagagaaagaaagaaggaagggtgtgagggaggagaataccccaattttgctcataaaagggcacagtatgaaatagctgaccaaatgtatattttattctctttgctacaaacaatattcaatatttaccactccactggaaagccactgaagcagatcatgaaattttattttccctgaaaaagaacaaataatgggaactctaaaaagagctggtggttggtcttacaatggcagagagggattggaaatttgaaaaagaaacaatactgtaacatatttcttgtttatgtagatatgggaattgaaaagccgcattgatccttccaggcaacacttaatcatgcattaccccttggagcctaacaaacacctgtgaaataagtcatctgggaatgatctcagctgaagaactgaagctcaatttactcaaaaccacaaaactaagatttccttcagtgctgtaatggataagacaggaggctatagtgttaagacctagcttcaatttccagttctactattaattatttacaacacttgggcatgccacttaacctgtcctcatatgtaaaatgagaataatgagtacactctgcacaccttatttttccctcctccaaatgttccgtgtattttgcagtaatctccagaagtcttctgggccagtgcaagccttgtctgagcctcttccttggaaccaaagtctccaactcagagtcttctctcccactgcaggaaacaccatttggtccctttgcctgttgccaatgttccagctgacagtcaccccagcaagtgccctggcagatgagcctgtgcacatccaagcgacgggcctgcccccactgcagatggt

SEQ ID NO: 30031 - DNA, 1733 bp, Bovine  19866881142831
  misc_feature (1)..(1): n is a, c, g, or t
natagttatattaatgccaaacatgtattgcacatactgtatacaagtcactattttaagcacttaacatatatcagctgaactaattgtactactaatattactaagttcaaccatattaattatattatttccagggaaaataatcctcacatttttgatgtgaaggagagcaaagggaacatctcaatgtgagtaaagtcaggactggagatgtgtacatccgtgtatgcataaaagcagaggagagtgaactgagcagacgggtctcaatgtgggtgtcttaaacagaggctattggggcaggaagttaaaccattattaaaggttttgacagacctgagtttgtggtcaaattttccataacttttttctcaaagcttgctagccaggcctggtggcgtggggaagggcagaatttgaggaccgctcttacgttcagacatttgctatggatgagattcatcaacaaaaagtaggggaaatgctctcgcctctcagggtgcctgtggctttgaacaaatggaaacctggcctccctgtctccatgatcccttccccaaacaccgagagacaagtgttctcatgagttactaattaggtggaaccactctaatgatttcattgctgttgcagcttccaccgagagagcatttgatgcatgtaaagcaatcagaactataatccagtgctagcaaatgaaaatagacaagaacattattcctagtgagtgtatcaactttgcttactaccaacaagggtgatgggataggaataaagagtctgtctgccaaaagcccgcttagaattcccatctgttataatgggcaaacgtttcataaagtaaaacagtggtttcctcccagaatagctttgggaggtgaagacagaggaggaaattaactactggaaagagttcccctgatggcacttaagctgatcctggcttccctggtggctgttgttattttccatgtggatgctcttcaggaggaaaagcaagaagacaaactagcatctttgttttataaaaaagctgcagagctgcaaaatctcatatttaatatcaacagcagcctcaagtcactggcacctgcaaagtgctgggtgtaatcacctttttaaatccttcaatagtccaacgtgttagatacagtgactttcattttagagatgaagaaaatgaggctgcaagaggtaaagcatctttttttttcatattaatctttttcaaaatttattggcgtatagttgatttacgatattgtgttagtttctcctgtatatatagcatggtgaatccgctatacatatatccactcttttgtttagattcttttcccataggagtctttacagggtattgagtagagttccctgtgctatacaataggtccttattagttctctgttttatatatggtagtgaatatatgtcaaccccaatctcccagtttatccctcccttccctttcctccttggtaaccataaatttgttttctacctactgtgcttctgtgcctactgtgctcaaggtcaagtaacagagctgggatatgaacccacacctgttatttctagagctcacgatcaaaaccaccgtattacaggcttgtgtctaggatggccatgtctgtgtcttgcccaggccgtgtcagtgatgccctgtctgaagaggccggccaatcgaatgataggtttctgactggaagagattttcagacaccacaga

SEQ ID NO: 30032 - DNA, 772 bp, Bovine  19866881181910
  misc_feature (1)..(1): n is a, c, g, or t
naatgttagtagttgaataagacccttctttgtcctcattgttcctggtaacctttctgtgtcttttcctgacaagcatcttgaatgggtaccttttctttactgaacctgtgttgttgagggtcattgatatgcccttcaatgccagtatctccaaagccttttcccacctttatttttaacctctttgtagggtgctgttattgaccctttgaaacttcattctgtttgctcctagaatccttagttcatcttaatatatatcatcactgcttttcttggtggcttctcctcttcatcttctcaaaatgaaagatatcccatgttcattccttggccctcttcattgtccctctaaagtgtctctttggaaactgccttcaatccactaacatcaattatactccctgtgtggagagttcaaaactctctccagccttgtctttcctactaagctctaatgccacaatttcaaatacctggtagacactatctggagtccatcatggcctgaagaaagcaatgagagccaggtcccaagtatccactcgattaagcacataagaagaagtgtcttaccagggcccgcttcataaaggcctcctgggttgccttcttgttttcagccttgccaccccacgcagccagtgcactggcctgcagggcccgtccataagagaaacttagtttccagggctttggtagagggcaaaggttgatagcattgaggttgagagtagcatcctcttcactcacgccaccagacaaaaag

SEQ ID NO: 30033 - DNA, 1208 bp, Bovine  19866881184361
  misc_feature (1)..(1): n is a, c, g, or t
ntgaaatatgttaaaaacatgccattgcgatctcaaaacccgtgcatctgaacacgtcctatgttttcctgtgataagctaagagaaataatggatattgctcctaaggcatttacagtctatttagcctattctattagatcctactggacacaatttgaaaatggatttaacagttttattttaaaaagtcaatatttccaaaatgctggaaattatatttcttgcaactaactgcttacaacaaaacatttaaacaacaacaacaaggctgttgcttccactctgagcaacagtggagggttatatggaaggaaagggcattatgggacagcttaatttaaggggcaagtgcattaatgggatagagggagttccatcttgtatactaagagtgtctacaccacctggttctcttgataacctgtcacttgtcactctgacttgaggccctggattttcccattattgggaattctgacgcttaagaatactggagggagatgcctggtggcactcacctgactggtgtggagccagtattgcagcctagatttgttcttgatgcgtggcagcagcagcctgtacaccatgtgctcaccaatggtggtcaggatggacaggccaaatccaatgcacagcagcatgaagagtccagagaagtgtttgatgcccatctgcaacgtctgtggcagaacaggaaaggaaaggtcacgaatgggaggctgcacctggtcccgtgcttgtccactcttggacgcacatcgttttctgctggacccaaggaaagctggagaccgttcctctgtgtgctctgcaggtgtcactatactacactgcaaaggggatccagccaggactgagggctgctgcacggcacaattcctgcgggtgctactcacatacagtgctactgtttgaatggttcctggagtggtgaagaggccctgtgtctagaccacgctatggtgtcaaaagggacactgagagatagaggtagagactgaaaattgaaacaatttagtatattaaaacatcaaaaagttatcaaggaaagaatctctcccagggacagagagtgagttagatttaaggggaaaagatgatgagcgcaataaaaattttcatttagatctgacagaaacatggataggatatcatctagttcaatgttctcattttaaagatgaggaactgggaccagaaaa

SEQ ID NO: 30034 - DNA, 880 bp, Bovine  19866881310120
  misc_feature (1)..(1): n is a, c, g, or t
ntggattgcatgaacattagaaaatagaaaaatgaggctgaaaataatgttacccagtgtttctgtattgtgaattacggagtaaattttatatcacagtatttttccatgttattcccattttctttttaaaaatttatttatttttattgaaggataattgctttacagaattttgctgttttctgtcaaacctcaacatgaatcagccatgggtatatatatatgccctcacttttgaaactccctcctatctccctccccatcccacctctctagattgaaacagagcccttgcttgagtttcctgagccatagagcaaattcctgttggctatctattttacttatggtagtgtaagtctccatgttactctctccatacatctcaccctctcttcccctctccgcatgtccataagtccatattctctatgtctgtttctccattgttgccctgtaaataaattcttcagtaccatttttctagattctgtatatatgcattagaatatggtatttatctttctctttctgactcacttcactctgtataataggttctaggttcatctgcctcattagaaccgactcaaatgcattcctttttatggctgagtaatattacagaatattacagaagcaaggttctcctttatttgcacttaaatttctttattgaagtatagttgatgtataatattatataaattatatgtgtaaaatatagtgattcacgatttttactgccttttttctttttcagtctgtaatctctagtcaacaacattctttgacattacctttgatttacttggagctgtggcccaggttcgtctgacaacctgagtcattgcatcaaatcccttgtacagactag

SEQ ID NO: 30035 - DNA, 1340 bp, Bovine  19866881310414
  misc_feature (1)..(1): n is a, c, g, or t
nttatcttcttaaactcagtatagattaattaacaccatgaatttttaggttctgagaaaacttttgttttttatttacattctgggtatattcattcatcacacactttcaaagaatttactgctactatctagacactagagaaagttcctagacttgttttccagtttgcatcaagcggatttctgcatataaattgcaaattcctcaattcacgttcctactttgtttgtgagaattacttgagatagcagaattagaactacattcaggttaaattccagtggcagcacacaagttcaatctgttgaatgtgtatttgacatagttccacttgcttaatcttgctgatcctcatttttctcaactgcaaactttgtgaatcattgcatgtcttttttattgtgcatgaaaaatttctgaaatttgcaaaaaaacggagagagggaatgcctctttaacttagctgactgctactttctgatgcttggctcacaaagcagaaatgctgctttaggtgtgctgctcttgtgattcatttaacaagagcaaatgtgctgaacagaagagaaagataagcaaataccagctcagaccaaactggaagatggtctcaaatggaaaagctggcagcaaggtacaggcaggctgccctggaggaggtgggtagaggaggcatcttcttctctcagatgcattcattcggactagatgcttgaattctttgagggcccctccagtataatgactcaaccactgattccctgagttctctagagcaaagacagattgactattcaaccatagcaaacaaaattatcagaaaacagctcaagtatcaagggctagcctaagggaaaagtaaaacaagaggaaagtatctctcttctttctgttatcctgtagtttgcctgtctttttgcttgtgatgctttactttagcggatctctaagaggttggtttcctgggctcagtgctatggaattactgacctttaggctaaacctcctactgtacttttgcatccagcccaccctgaattaaggcaaaattgggcttactttaatatttaattctactaaataaaaactggcattaaaacaagtccctgtgccttaaggatttgggtagagctgtgccaaaaagcttacatcactagactgcaggtaaatttatagctattttcattcatttgcatttaatcaacccaggcttgctgagtttaggttcggcaaggaccttattggctgttacagtttgcagggtacaggactgctggtgacgtgcaatgactcaagtgagaagtttgagttccacagtctgcaggtcatttttcac

SEQ ID NO: 30036 - DNA, 1555 bp, Bovine  19866881319903
  misc_feature (1)..(1): n is a, c, g, or t
nacatgttctgctatggaaaaggcaggaaaatgcttggtcaaagtctctgtctttcttgagttttggaagaagagacaaaagaggtaacatacaggctgtggcatctctgtactcttaattatggcctagtgtcagaatgaaaggccatagtttgacatcagacacacctgtgttagaatattggtccacccaccttctagcattgtccttggacacggatttactgaactctaagcttcagttttgtcatcagcaaaataggggaaataattacatttttatttgtaaattacttccactgtaagggttagaaatagttcatgtgaagtatatactatacctttagacatagaacaaatgttccagatatggtaactattatttaatgtctttaaaattttttcaatcaaggccatccccagtcacttttcctagtctttgagtagaagttttgcagttggagacccaaagtattgcattatgataaattcatagagggtactcaagacacatttcaaattaaaagaaagtaaattgaaacgtggactgtaacatagaagatttttgtgaagagttggatgatacaagtctaggtccttagcaatatacattaatccattgatcaccacaaattactttgtaatttacaaatgcaaataccagtagtaggaagttacactgccacagaagaaacagagaaatcagaaagtgtgaagaatgtactaattttcattaaagatataaatgtaaatcacatttgaagatccttccatcactaaatgcaatataactgctcattttggtagattgtgtataatagtaattattcacattagcactcccttgtgggactctaccacttaaaaagacttcgattttgcaacaagtaaaagtctccattatcttagattttaaaacagttttctgcttctttagggaagtagagaaccaaatcattaaaatatacagattaatcaatcaataattacctaggtagtagaacagaagaatgactataattgtgtttctgatgagcaatctactattagatttgtttacacacacacacacacacacacacatggttatagcctagggaataaaatagttattagtaaataggttaattttacttggtcaatttagtgatcagaaaagcaaagttgtagaaaaagaaacttcattattttaagaatatatggggcttaatgattatagacttttaattggatggacctcccaagggctgctgccgctgctgctgtcgcttcagtcgtgtccgactctgtgtgaccccagagatggcagcccaccaggctcccccgtccctgggatcctctaggcaagaacactggagtgggttgccatttccttctccaatgcatgaaagtgaaaagtggaaggtgaagtcactcagtcatgtctgactcttagcaacctcatggactgcagcccaccaggctcctttgtccatgggattttccaggcaagagtactgggagtggggtgccattgccttctctgtaccaagggctaccactgagtaaatatata

SEQ ID NO: 30037 - DNA, 1372 bp, Bovine  19866881359574
  misc_feature (1)..(1): n is a, c, g, or t
ntgagtttgagtagctccgggagttggggatagacagggaagcctggtgtgtggcagtccatggggtcacaaagagtcggacaccactgagagactgaattgaactgaactgtagaaaatatgaagtagaaataaaacaaatattttctgtaattacactgctcagataccagtgctgttaacactgtgctatattttcttctagttactcctctttatagcctgtacaaatgcatattataaaattggaactatattgctatgtttcccaacttcttacttaacactatgttttgatttttttgacactttaaaagctctttaaaattatctctactggatgcatttttataatacatagtaacattgtaatgcattaattgtgctgttgctggacatttatgtgatttccaggtttctgatgttttgagaaaggctgcagtggatctttgcaataaattgatgtttatatatgaagttattttctttggacagattcctaggagtgaagtcaaggatgaaagggcatgaacccttttaaagctcttgatataaatggccaatttgatttatgaacatattgtaacaacttacaatagcagtgtatgctggtgttagtcttaatgtgcttccatcaagattgagaactatcaataaaacactcctattttgttaggtaagaatgtcatttcattactgtttcaattagactttctttgattacaagtaagagttaatatttaaaaaattattggtcaattttatttcttttctgaattgctgttaatatcctttatctataatttgattttagcattatttcatgtataccttgctctcttcctgaaaagacttgaggcagcttaaaggtcacataaaatacaagacaacataaattaaaatagtttgaagtagaaaaattacatcaagccagtaatgatgcttaaaatgcataccaccagacaataaatctgcttagtgcacaagaattttgcctccaagctctctagaactgagctcaaaaagagaatcttgccatttatccaattcacagtgacagtgagtgtgtgagagaggacactaattgttcaagatataattaatgatgatattaaaatctgacaatctaataaattctattttttgtgtgtgaccccttgttgtcatacactatgctagttgctttacttgggttattttaatttctatgactactcagtggggggcagttaccttattactgccatttacagcagtgcttggcatatgggaatagttaataagtattagcttggtctgttattattactaatattaagtatttcaatatttagaacaagtcacttgaatattttttaaataatatatataa

SEQ ID NO: 30038 - DNA, 1439 bp, Bovine  19866881379102
  misc_feature (1)..(1): n is a, c, g, or t
nataattttaaaataaaatttaaaaaataatggaaaatataatgaaaaaggccattatctgaatcattttgctgtacagcagaaattaacccaacattgtacaactacacttcaataaaataaatttaaaaactaaaaaaaaaaaaaagatttgtacagagtataaatgcttgttttaggttgggttcctccagaacagtctctaaatccaagacttgagggcaagtagtttgaaagtacctgctacaaatgggaaaggatgaagctaagacacagtacattgagggcaggtgcccagggtggagaactgggctcagtgcatgctggagacacctaggatatgcctcagaattatcccaaccaaggggcaaagaagctggtgtatttatcatttggtagctgcatggtggttcaaggtttccttcaaggggcattgattcctgggcactccagccagccctgcacacagccagcacactcccacatctcaggaagccctctttgtgagaaaatagcgagtgctaagggactgtgagcagggcaccagctgcctctgctgtaatgctcaataaactcttcttgtacagaattgaatggaattttcccagagctataagaaatgtcaaatgactccaagacctgaaatcactgatttttacttacctcctgcagatgtgtgttttcagcagtatcaactttgtcagggctgaacgagttgggggcattgccatctctaaaagcagcaggagggcagtgtttattctgactccatcacaccagtgggatgtcttacatacccaggctatgttacagatagagcaataaaagtacttttttatgctttttaaactaagcagtatgggatctcagtagagactccagggaagaaagactgtattgtcctttggaaagagtactgggccaggagttgggggatttaggtgtttatattctttctcacatgacctcacgtggccctacagaaatcacgttgaaccttatagactcgtttgctgacctgtaaaatggataggttgaacactaaggtttcttccagtttcaagtatgattgtcctatgaaataaggcaataggacttgtattatgtggattgagtaaagattggaagggaaaaaatacagacttacacatatgtacaaattatgcatattgatttctgtaacatgtgtgtctattcattctgtagtttttattccaaaaatgagagaacagattgttatgacattcagaatatatccttttctaataattttttcccctgaaagcaaatggtttcttctcctatttgtaagagagaatatatttcccatgtaggatcacaacaggaaagggaatttgagaatgagatcttttcttatgactgacatgattaagtagtctatagagatgaatgttggttgaaaattcatgtgaaaataa

SEQ ID NO: 30039 - DNA, 941 bp, Bovine  19866881728324
  misc_feature (1)..(1): n is a, c, g, or t
nctttccaagtaaaaatcagaccaagtcaattccacaacaaaaatcccttgaattttgtatgtactttgtggaatctccatgtccttctgcaattaagctgatgtagcagagcagccacatccctgctgtcagcgaaatgataacactctacccatcttacaagcttgtttaggtaaataaatgagattctctgtgtatattgaataaatgaatgagtgtatgaatcaataagtgaatcaatgaatacaaaagaagtacttatatctggctggggtaaaagacttggaagttgtagtgaaaagatgcagcttaaagggtcatgagggacttggctgtaaatgcccttgtgtatccgaccaagaagacagaatttcattctagaagaaaccagaaacatatgacagcttctgctacttcagataatctctagaaaaggaagtatcaaatcctatttacattatgtttcaatgcaaaaaataatcattagtttcaatgttctcatccatgttgaatcaaaatttcctgatgaaagttaatcctcctagtagcctgatttatattacttggctttcaccaagtcatcaacttcacaaggtaatttctggaatccatttttatgcattcatttctctggacataacctttgacctcttagaaaatagtcccaatagcactctgaagtgtgctgatgacatagacaattggaacagaatcgacaatggtttcagtttgctggagtccaggggtaatattcctacctgtcttcacctgtgctttgcagaaacccagtagccctcttttagacaggatttgttcttcacaaagacttgctgcttattatccagtgccctgtgatctccaagcatattgaaaattcatttcttccaatgcctttccctggtgccagccactgaaatccttgaccatcagtggatggaga

SEQ ID NO: 30040 - DNA, 1257 bp, Bovine  19866881910681
  misc_feature (1)..(1): n is a, c, g, or t
ntgcttctgtgttgtgacccccccagtgctttatgagatgcaggcaacttccttgggccagtgctgctgaatggccaagtgtgtcttcattcgtgtctgtggtcactaaagggataacttggcttgcaaagtaggaaagtctgtgtttaagacaaaccccctcctcagttaatacactttctcaacttgaaagtcttggttgcagaaagatacatttttacaatacaagtaaaataataggaactgaggaacagtaaattatttatcacttaataaaaagaagggacaagtcataggtttattttaaataggaagatctctaatgacttgtttcccttcacagttaacttttaagaaaccatgttattttatttatatttgtatattatttgcactgttttcactgttcagtttaaatacaaagctgatcttgagatatatagaaacctaagctatctttaaagatttatgtatttgcttttggctgcgttgggtctttgtggctttgtgcaggctttctctagctgtgacaccaagggctactcttcactgcagtgtggggacttcccattgcggtggcttctcttgttgcagagcatgggccctagggtgtgtgggcttcagcagttgtgcacatgggctcagtagttgtggctcctgggcttagttgctctgtggcatgtgggatcttcttgagccagggtttgaacctatattccctgcattggcaggcagactcttaaccactggtccaccagcgaagcccctaagctgtctttaaagatgtgaaagtttgtgtttataaaggcttttctttctattcctattttatgattgtcataattataattaaacagatatgtgtcatggctaaaagtttcagaattatatccataacttgataaatttacatttaaacactgtagttatgcctctagtccctatgttgccatgtccttatgtatctgactgtcctcccagtccagttcttagaaaattcttaatattcaaaaggagctaatgagtgggaagcatcacatttgttctttaaaagatgttaaataagaaatgaatccattaaaaaatctgcaagaaaagctatctctcttggtggtttccctgttcgtaaagctccccaaatgtgcaggttttttttggtaatttaatttttgctgcagatgtccatccaatttatttgtgatttatcataaattttaatttgagtgaaagtgctgggcccagatttacaaagggata

SEQ ID NO: 30041 - DNA, 826 bp, Bovine  19866881925167
  misc_feature (1)..(1): n is a, c, g, or t
nagtcggacatgactgagcgactgaactgaactgatatttattcaagaaaggaacatttgtggacctgttactgccaatgatatggcagtaacatatgatatggcaaaacagtcattaatttgctgggttatcttaggcaagctgcttcatctctctggaattcacttttcttgggggtgaaattagagagttaaggtaattaatgagatccaaatactagatacattttcaactctttccaagtaaaaggaaaaatgctatatcccaatgtcatacttgagttctataatagctaatcacctaaactgaaatatgagcattaacaaaccatcaagctaatgtcttgcattaattggtccacgaagacactggatgtcacgttcagttcctgatacgtcaatataccatctaatacttcacaactgaacaaagacttgaaccttagagccacagtttattggtatgggcaaggcctggaatcatactttgcttgcatgatctttccaagtttcatttctttgggacagaaattatacaggtgacctcaggatcatttcctttcatattttgagatttttatggtgtatgtgtttagaataccatcacatgataataggattttaatattcatggtctcattgtctgtctccataaatcagattcatatagattagcaccgtctgctacatacactgtctggagactcacgaaacatgagccagggcatggaaatctgtgtaaggaacaactttaagtcagaaggaggaaatagatcaatctacttttatttgtcaggcgaatacatgtaaagattagccaaacaaa

SEQ ID NO: 30042 - DNA, 1130 bp, Bovine  19866882115998
  misc_feature (1)..(1): n is a, c, g, or t
ngtggcggattctgttgatgtatggcaaactaatacaatattgtaaagtaattagcctccaattaaaataaataaatttaaattaaaaaaaaaaaaaaaaagaaagcacagctggttacaagtggacattaactttgcccttctaatttttttttataattctactgtttcaagaaaaggttggcataaaaagtgatattaaaagcattacatttaatactttgttatttgtgcaagacaaaatgtcctgtgggtatataatattctcagattcctttcataaacccaacttatcctttaaaattattaaaatatttttcagattcaaaaaaaataataaaaataaaaaatcttaaaaaaaaataaagatataagtttgaaaataataataatgtgtaagtttgaaaactacaaactcacacacaaaggtgagttcctattcctccccctctgctccccgtctcccaggttttgcctcacctccactgttcagcttccgtgataagagctccaccttttcttgcagtttatcatagacggtcacaatctgggacaccgctcggcgggaggactccacgcgctcctgcagctgagattccatctcttcactggaactgctggccaaagtagcaaggaaagagaaagctggctcttgcccttcccctgaggacacagggggaaaaaagaagcccctaaaattataaaactgcaaatatcaaaatctactttttcccctcagatggagggcctcaaagcgaagccctacttcaaacacccagaaagcatgcagcgataaacttgtcacgaacacccacctctctctcggtcatctttccgttcttgattgctatcagagtctggttctggctcgggcacaacaagggcttttctctctgtgagtaggtctcccaaaccttgctccagatcataacgcttaaggatgatacggatgttttcatcaaactagagcagaggaggtacagttatgaagatacaaaaggaagcaactttggaaataaagagacggctacggagaactacagtgctcaaaccaaaacctgagtaaattaacaagctactacctgacttccagtagcggttgacaatcaacagtgaggcatcatcagtgg

SEQ ID NO: 30043 - DNA, 1056 bp, Bovine  19866880385884
  misc_feature (1)..(1): n is a, c, g, or t
nacagcccctcgggcaggtttctgcaccgagttcccactctccacagaggtgtgaaagctaaggagagactccctagccagctgaacccactggtcagaggggaacttgccgggatgtggaagtgccaaggtcggggtcacaagcatagcccatctatgtcaccaggactgggctcagagctcaaatgacacctcagtctcggggcctctcctctgggtctgcactcccttccctgagcccagagaggtctcactgggctcagatctcagcctggcccacaggcagaggtcagttggaggcagtggaacagagatgacaggagcagaggggtgtgaggagtctcttggagccggaagagagacggggctgggagccgacttcagccagcttaaccccgggtcactgggggagggagggagggagggaggcacacgtgcgcgcatgcctgaggtcgcctgcgtgcttgcgcatgtgcacgctgaggtagtgcttccacttggtgacgtagccgcactcggtgcacatgtaatccttggtgctggagtgggtcagcatgtgcttggacaggtagctcacgtctcggcaagtgaagtcgcacagttcacacttgtggggcttctcacctgtgggggtggggtgaatggggaaaggacacaggtcagacacggactgactgaggtgccctgatgcctggcaggagtggaagctgaggtgctgatggcagagtcaacgctgcctcatggccctctcggatgatcacgcctccaccccgaaaccagggaagaggggcggaaacaaagacccagcttttttcaaagttggttctagatttgttatacagcttactggcactggtggccaactgctccacttagcccaatccacttagttttgtggaagaggaggaggaaaaaattaggtaatatgacatagtggttaactctggagtccaacacagtcataaagatattaatagctgacatttacacagtgctcactacgtgccaggcgcctttctgagcactttataaaaatgcctccccttacgaatcctc

SEQ ID NO: 30044 - DNA, 1687 bp, Bovine  19866880449440
  misc_feature (1)..(1): n is a, c, g, or t
ncccctgctgcccttcacccccaattcccagctggcctgcaggcggggtgagcaggtgccagctggccaactctgcttttccttccccctaaggctcagcagtaccttgtggctcagctgataaagaatgcacatgcagtgcgggaaacctgggttcgatccctgggttgggaagatgccctggagaagggaaaggctacccactccagtattctggcctggagaattccatgcactgtatagtccatggggtcgcaaagagctcggacacgactgagcgactttcactttcacttttcaaggttcagcagtagaaggatgaagcagatggaacccagataagggtggtaccccccccatttggccccgccccctgcccaatgccaggacaaacccaggcttttcaaagccgaatcactgccccaccaggggtcttccggaatgcctcctgcccccaggcaagacaactcaaatccagctcaggagcaagtggaagggtttggacctggaactgcttgacggccaagtctcacggtgcatgttgcaccccaggtgcctcactcgcctgacctcctcctggtcctggtctggaggtgccttttcataatgtgactgcagtaacaagaacgactcagcaggcactaaggatgtcctgggcttaacactgggctcttcactttcatgattatcagtcctcacaaccaatgttcaccaggtaagcattatcccatttcacaggtgaggaaaactgaggggccaagagattaaatcacccaatcaaggtcacatagccagtagataaagacagctggtttttgaacgcggctccttacatccacctcatgctagtctcctcttgggtataatcttcatccagttgctcttactcttaatcaactgccctcctgttgggaacaagtcttctgcggcttaaaaactaattgtctcgggccctcaggaggatgaggcttcttcaatacacttccagaggaagaggaggaaatgggctgcagcaggagaaactgggatcagacatcagagagaacttcctgaatgcgaagggctgtgaaccacaggatggataagggaagctgcacatcctttgctcaattttttcttttttttccaaaaaaagacaagcatgtcctctcactgggtttaatcacccccagtggtgtgggccggaggaggggccagtctgccaaggctgctgtggctgggatgactgcctcgaggttcatgcaagaagacacgtcggtggccggcagggagggtgggctgggaaaaaaatgtgtctgtaggctgctgttctggaggaaggaaaaggcagagggccatggcgggtgggggaggtgcccaagccccggactggggggaggaagggccgggcagaatgcggactcagcctccggaggaacattccgtccagaaattcctcacaccctcccccctctcacccctccagcttcccctctcttgccccctgggagccctggaattcggacagtttttcaggccaaaaaagaccccatgacatcacatctactgccacggatagactgtgaggtcagggacagcgctgcctgcccattgggaggcgaatcgaggacccacattattctaggctcgtgtgttctcaaaatagagccctaagcagatgaagaaaaggggttgaaagccaaaggga

SEQ ID NO: 30045 - DNA, 899 bp, Bovine  19866880484417
  misc_feature (1)..(1): n is a, c, g, or t
ngtgggcagaggcaggtaggatctgccggatccctgagcctggtcggctgcgattgccctggacaccagccagagaagacttgtttttcataaccaccaccaactacccggaagaagaaaaaaaacccaacaacaaaaacaaccatcgaacttttttttgtttggaatctgctgttaatggcccattggctgtacattattaaacaggcagctggagatctgccagggtagggtgcttgagccaagactcacagcctgaacacaatgttcctaggaaaacagtcacccgtggggtccctggggaggagcacccatggggagggcttccagctgttgccccttgccctgctcagccttcccactcctgcttttgctctgtttgtcttgtggggagcagggccctgctgcacctggagcccaagcatgctttatccagaccctgtgggtccctcaccaccccaggggcccaagttgctctttcccttcttatggttaagtggacaggctcctgcttctggtctgatctggctggggtggcactggctctcctgggggctaggctgggagctggacacctggttctctattcaagtccattgaccctgtggtgacgttgggattcccaacttgtcctttctgggcttcagttcccacatcactacaaggagaggattggtccctgcacgtgtgcgtgctgagtcgctcagtcgtgtctgactctgcaaccctatggactgtaacctgccaggcgcctctgtccatgggattctccaggcaagaatattggagtgggctgccatgccctcctccaggggatctcctccactcagggatggaacccttgtctcttgcgtctcctgcattgcaggcagattctttaccactagcgccacctggga

SEQ ID NO: 30046 - DNA, 1814 bp, Bovine  19866880499463
  misc_feature (1)..(1): n is a, c, g, or t
ncccagccctgccccggggacgtgaggcactgttgcttgtagaatcaggattctttgaggcccagccctggctctcttcctggtctcctctgtttcatttccgccttctttctcttcttaagtctccctcaagctctgtctctctgtttttctctctggctcgtcccttccttaggagtttcaagtccctttcccacctttcttcctccccacgggccggagatggggatggatagatggcctctctctgaccgaagaggcactgtggcattgtggttacaccagtggccttctggggtgaactaaattcagctttgggctttgccactgcagggctgtgcctccccgagtgactatgtagcctctctgtgcttccgctgcccataagagcacttagcgtgaagcatatcgatagcatttaataaagagtagctgttgttgttgctgtcgttatggttatggaatgattgtattagcccaagtcctccgagaaacaagatgggattaaatgtgtaaagattttattaggggaaatgcttgagtgagagtaaggagccggggaaggctgagagagcctttagcaggcagcaagagcctgacccctggcgaaggggagacagggagctagagaggggcagaagtgtcccatacctccccgtcctctcaggacagggaatccaggagacacagttggccgacaagccttctcatccccagtaactgatcggccttaaaatcaacggtgggtagcagcctgagggagacgtggatttcaaagcacagctgggcccctgctcctcccacgggaggcctgcgaggtgccccctgaggccttgcgactcagaggaggacagggcctttggttctggagtctgaggtggggtgggacaggtggagggggtgacccaaggagctggaagggggcagaggcctgggtcccaggttgccatggagcatgagccccgggccttcttggcctggctgccaggcctcctcactcagggcctggcttcaggctgagtcctgggtgttagcttcattgtgctaatgatgtggtggtcctgattggagcagagggctgactgtacctggcctgtggcactgttctctgttccccacccagtcttcccttcctgcttgaggcacctcagtgctgaggggggaaactgaggcacagattcactgggcaggtgtgggttccgggcgggggcactcaggaatctgtattgttctgaatggccttcccttccccattggacagagccattcacttccaggttcatcctaggagaggctgggcagccggtaactacccctacgctaaccttgagtgtcctccgggactggcctgagtgtggcacaggggtgcagacacccgagccaagctgcgacaccattaggggaatgaagttggagcaggaacaagcgttttttgggtattgagctgaggctgtctgtgggcagtcagaccaggcccagtctggccagactgtcccccgtccactgcccgcctcagctccccgccactgcagacttcattgagatgcgtgagccacccagacggcctcttgaaccccagccactggatatgctaagcagggctaatttatcccctttctccttaatggaactgcagcaaagccagcaggggctgagtgtgttggaggcgactgatggggctgggggcggagggtggttctccacagttctgctgtaagaccccagctccctgtgtgactcagcaccgtccctctcaaggcggtcagctcagagaggagagcctgtcgtaagggagcagggacttcggacaggca

SEQ ID NO: 30047 - DNA, 1551 bp, Bovine  19866880656552
  misc_feature (1)..(1): n is a, c, g, or t
nttggtgggcgacaggctggcgggtcaggctgccttctgctgtattggctgctggctcacctcctagcctctactgaacggggccctgaaagtggcacaaaattggctgcctcacattcagggtcaccaaaatggtgtgagtgagagaagcaagcagggaaaggaaagggaaacttgtcaactccatgatggaggtacgagtctgcagggcagcaagagcacgtgccccccaggacacaccttccctgcctccccacctttcgagttctgcccattttaggctgtgccacaaagctgaatagtagaaggaacgatgctgccactgtgttgccatggcacgtgggcacttctctctaagcagaggatccagctgtggactgaacactctgctggctctgggcagtgggaagagctattctagagaaaggtctttggtatcaatttcctagtgagacaggcagcctctcaagtatagaaggcagggatgacttacactgctctgtataaatgtctgatgcttctgagattaaaagcattctgcccaggcacccgagagtcagaccctctctcatcttgttaaatggcagcaaaaactagcttggtagaaggggccaagggaaggagctggaaggcctaggcacaacatacctatagaaggttatcccaagagtgtggggtgctggaaatggctgtgtgggttgtggggaggcttagttcacctcaagatgtttaattcaatgggaacaagtgataggagaccagcacccattactctacttggagaacaggatggcctaaaccttaccagagggggtcccaaggtttggcatctgacacagacccaaacccccaggccctcgaccatgctgctctactgcggacagtgtcttgcaccctttagggatctcctcatcatctctatctcagataaagttgacctcctctttaggcaaaattcctgccaagactcggaccaggaaaaagaatgctttggaatagttccaggcctatttatgcaactaaatgtcctcaagcagattattccatttctacaagacatcatcaagacagttaagataggcttctcaactcagacccaaagaaaacagttcatcttggtaaaaaggtctgtgtttctttctagcagccactctcctcgatcacagagatgtggaaacaaggaggcccattcagatgtgaaaacctgtttgtcccatctttagtctgccaggcagctataggcgccccactgcccatctcatctgcagccactgcccagacacctgggtcaccaacacccatgacctccttggtaagcttaggagaggaaggcagtcctgttgcaggatggttctactcacgtgattgttttcatttcctttttctcggcatctgggcgtgcacggttcagcaccttgaggaagtcggatgtttttgcccgcatacgtgtgtgaatataggcctggaggcaaacacaatggatactgaagcagagtcacgttccagaaagacagctttgctctaagtagcggaaattatcagaaaggtctg

SEQ ID NO: 30048 - DNA, 1446 bp, Bovine  19866880668631
  misc_feature (1)..(1): n is a, c, g, or t
ngggctgcggggggcactccgcgggagagggtctgtccccgtgggagtggaatgcggggcttccctcttctgcagaggggggctgtgccctgcaggaccctatgctttggatggcagcctgtccatccccctgcctctggacagagctggtcccactctggtggtggtggagagggggcttgaagaagaggtgggattgctctcaagtgtctgaccgccttgagttagacctcacaccctccacagcctggaagcttcccctccccacaatgggctagcctcctctctgggccactgcaaccctctgcagcccttgaacatggagctcatgttctgagtgcattcaggagaatgttctgtgtccctccaggagagtcagggccctgagttaaagcagacctgtttttcaagggcagacatcggatccccaaacaaggacatcagccgccccttgcaaagacatgggctctggctgagggaggcagtggggctgggcgagccggaactcagtgcagccctaatgcgtttcttttaaccttggggctgaacttagttccaaagccccgggagccttttccgaatgtgcctcctttgtcacaattattattagaaaatcaatggctacgtctgtttctctctaatgtttttgccaggagtgaaactagtggcagctctggaccaagccgctcggggaggctcgacggggaagggagcttggtggaggtgggggaagtgtgagagagggtaggggaccccccccccaaccgattctctgagggctgagagcctggggttgccccagggtccctgagtgggccctgcccagcccttcagaggtgtgccccgtctccattcaggttgatcttcatagcagcccctggttaggacggtgcgacccctacttttctcttctgtaaataagggttctttgaggcaaggggcttatttgttttaagtagggcggtttgtgagtctggtttacggtctttacccgaggctcttttttctcttggttgagctggtaggcaggttgcctctgatgaatgaagagctggcagtggaaactcaggacaccaccgcaaccggggaccttctgcatctgcaagtgctctccagacgaggctcctagttatgggctggtctgagtgcacgtcttggagtgactgtgtgtgtgtttgtgtgtgtgtgtgagagtgtgtacatccgtccctagacttggcagctggcagcctgctgttcatgacgagtaggtaggcttctcagcctgtgcttttcatagtggcctcaatggcggtgccaggcgggagctagggattcttggggccatgcagacccccccctgtgaagggtagatgacaatgcagtctgatggagggtgatttctgcttggctgtgctggctcgttgctaaagccgtctggtgtgtgcgtgtgcacgtgtgccatgg

SEQ ID NO: 30049 - DNA, 1624 bp, Bovine  19866880718908
  misc_feature (1)..(1): n is a, c, g, or t
naacaaaagaagaggattaacagtgcttttctctgctctttgaagatcggacttgttaagtactttgtgatctctcctctttgaatctgaagtgcgctgatggcagccaacactggtaatatttcacgttgtgctgtgctgagtcgctcagtcatgtctgaccctctgcgaccccatggactgtagcccaccgggctcctctgtccatggggattctccaggcaagaatactggagtgggttgccatgccctcctccaggggaatcttcccaacccagggactgaacccaggtctcctgcattgcaggtggattctttaccatctgagccaccagggaagcccaagagtactggagtgggtagcctatcccttctccaggggatcttcccgagcctggaatcgaatccacctgcattgcaggtggattctttaccagctgagctaccagggaagaccagtatttcacattaggtgtcatttatttttagcctctgccagtcagagggctcagaggtcacatccacagggcaaaccccagagcataggttgctgttcttgctgttcgtctcacaccagattctcttctggattgctttttgcttcatcctggcaggagttcaaagaaggacgcagagccagccacacagccccacaggtcctcttcagccacagggaacctcccttagagctgaaagataccgatgccgccgtgggtgacaacattggctacattacctttcggtgagctgggcagggttgctgcatttgcataccttggtgggttcatactgcagttgaaatggggctgagtggcaaaagcaggtgtgccagagtgttcctgttgccggtgccatgactataggaggcatgtcatggggcactaatataagtcatgtgctatttttatttttatacagtagtcattttccttttttccctgttttatctaaatcctcaggaaaaaaaaaaaggggtagcctggtgtgaagtaggaggggttagggccacttaagcactgcgtagcagctggttggggttctctgtcctttggcgcctgttgggtttttttgctcattagaccagagctctagccgagattcagttacccactttccctctggaaagattcatatccacccctctcacagtttgcttcagcctagtgatctggttcattgataacagctgacagtttagaatcgcagctcatacacacactgaccctgacaacactaaaatgtccccttttctgaagttctttaagtcaccagagtgctgaagatgcatcagtttattggaaataagcgggttgattaaccaggtttccttaagtctagtctacatgtttttttggcgggagggcacgttactctctctgaggttgggacagcctgttacagtttaattagcaatgtctctctttgtggtacataaactgatggtgaacttacagtcattagcatctcaggacctctgcagtatagttatctcctggcctggcgctcttttctcttgagagcaagttgacacacagtggtcccaccctttcttaggaggcatttcatttcgtttcaacaaaacctgatactcaaggactttgctgatgctgagatcactgagtag

SEQ ID NO: 30050 - DNA, 1781 bp, Bovine  19866880747348
  misc_feature (1)..(1): n is a, c, g, or t
ncaaaggagtaacaggcagacctgagggtgaacggccagaagaaactagatcatattcatgaccatatagaggttctgctcggatctgagcttcctaggttactcatgtggaagcttatactccagctccttgcagaagaatacagaatgagaagaaagaggtagtgctgaaagtctatcctttggctccaagactgttttacaaattaatcctgctggtgcatctttatctacaacaagcactgcagatatcctgaagggctactgaagaagttgtgcaagcaagatctgctgacataagaaatactggtcatgagagggcatggaccaaagagacctttctgaagccctagggaccaaatgtaactgtcccttctatacatcttagcccttctcctgatggagtcactcagagttggtggagatgacagtagggttgggggacacagatactgtgccagtaatatccctccttccctatgacttcttggcagccaaaagctgagcagctacaggatatggaggctgagaggcaagacctcagaaacttgtaggagagaaaaggctgagcggagagccactgtaagatggacatccttctgggaccactaaagtatggcttcctcttgagctacacggaagggttctgggagggggaggaaactcatcctactcactttagatacttcatacttctcttcttctcttattataaataacttcattttaaagttctagttcttttttccccttactaaactctagactctttaaggataagatccacatctgatttccaaaacccattgaaatttgtacctctagagacacctaagaccagtccagtcacagaatcagggtaaatttctttggatactgcccatcattagattggtgtgtcactattcctcaggccaccaccccaactctgtaaaacattgagagagcccattcctttcccttcaacaaaaccaggaataaaatggtttctactgacaagccaagtattccttatcttagtggcccggatgtggacaaaaatagaagatggcggtcccttggggaccacccccaaggagcattttgcccctcaggttatagagctactcatcttatcctttgacccttgggtaaagctgatgatgtgttgctagaccagatctccagggaaggtgaagcccttaactgccaatttccatagtgtgaatactgccattatgaccaatttcaagttacccatagttgaacggggggctgtgttctgctccgaagtatagaagcagggcatccatgttccccacaccagatcctggactcagcccaaaagccaactggcctggccccagctccctccctaaaccaactgtccatccccaagaagggcgtctccctccttgcagctggcatggtgactcagcttcccctaaatttaggaaaagggacagaaggcagactcagctgcccaggctcgtcttctgacctcctaccaccctgtcatctgaggggcttggcccaaggtccccctcaccccaggctctggtccacccccgcctgggcttcacccctacgataaagctggctcataggatttccgacccagtttagctatccccctggaatggttataggcttcggacaaagtgaaggtaggtccttcctgttccttgcaacatggcctggacactctgccatttcttgcctttatctccccagtaaacctgtctggttgccccactctgtctcctctctccagaaagataagtccattctctggtagagaa

SEQ ID NO: 30051 - DNA, 1971 bp, Bovine  19866880758553
  misc_feature (1)..(1): n is a, c, g, or t
ngggctttgagtgggggcacacccccactcatagaatctgacgctcctcctgccccccctcattggactagttaggaggggcagggatctcctgggactgctttgcaggagtggtccctcccctacagggagtcctccccctgctctctgcagctgcctctcctcctctcctcctcctccctgctccctgctccctgctccccctcctcccccacccccactcccccaacccgggaggatgataaacaggctgccagctccgaatagggcctgacctcagcggcgaggcatctcccctcgccccccaccctcccagccgccagccctgcattcctggagaggatgaggttgagctgcggtgctcacccctcctttgtcctgccggctgctgcccaccggccacttccttccagctggtctcagcagagcattgaataccaaagggcccaactgggggccttggatagtatagttaacaacaacaacaataatattattattattaatgataatagtggttattatttattaagcaattaggttgcatgctaagcacattacatggatcatgtcactggattctcaagacagccccatgaggctgctattattattcttccagttttagcactgacagggaggggaaggtggattggaagggggggactgaggctcagagaggtcaaactgcttgccccaccccacaagctagtgaataggcggagccagaaccccccacccccaatgctgcagaggtcccagtggtcccctgcctccccatcctctccccttcacccccttcccctgccgcagcgttaggctccgatcagccggtctggtccctggacacaggacatagtcctgagagaagatgcagccatgggtggcaagacttgctcaggggaccggaactccctcgggcatctcacctgccagggaagatggatggggaccgcctggctgctgagaactttgcaaaggaaggttagtgtccctcctcattcctgctccagttcttagagacgtgaagttagggatctgggcaagcaggcaaccctctccaaggtattactgtaatgcttttgttttcaggctctggtggacaatgaaaggattcttttattagtatttcccctgtgaacttcacaatttcagaaattatactcatttccccagttctgttaatcagacccattttcagttgctgactagaagttccaggaggtgtggggtaaccaaactccccttactgagttgcaataattgcaaagctcagaagagttctgaaatgttgaccaaggctcaccatcttctgtttttaccatccagttcccttagtggtctaaccaccattcaactcgctgcagtctccctttctgccacttctgtgtgataactgtccagccacccagaccagtggtgcaggccctccctgccttcctctccttccttttcctcccatgatcatacagttcttgtcttcctttccagctctttcgttgctccagctcttggtggggctttaggctcctgctgggttggttatctgcttgcctccgaggttcacctagcagccttgagtgtcagagagatgtgggttcgaatccaggctttaccacccagtgaccttggggcctgtttattctgagtcacagctttcccatctgtaaacaggcaggatattgtcactatccagggatggtctagaggttggagattttagaagtttagagccaggcctgagctgcccttgataaacaagcagctctccactgtcttaccatcagctacatcaacagggactcccagcagcagcccactccatcctctgtggttgacgtccctggtgtagctgcatccctgccgatagggtacagacaagagcttgggcagacagcaaacgacgcccgcgggggacagttatcggcttcccacgcagtggggagcccctggtttcccagccgctgtcag

SEQ ID NO: 30052 - DNA, 718 bp, Bovine  19866880773751
  misc_feature (1)..(1): n is a, c, g, or t
nccccgactggctgcttccaccttcacagacccagctcttctctccagccttccattttccaaaagactggattcctcagctccaggtggcagggctgggtgtccaactgcttgcctggggctccggaagcgaggggatccgggaggccacctgctggggccagggcaccagaaagccacacggcaatcacactagctaacagccccagggcaagccatgccagctcccctcaggacaggcccaccctcagaactcccccaaaccccaggcccagctggacactgcactccccaccactgggccaagaagaaggtggagggacagaagaggaagcggacagggagcctttctgctagagccatctccctgttgtccatggactgggagaaggagggccctgaaagcaccagatattgccactgggagtcaacagctcccttcacctcctaagccttttcccagagctgcttaaggccacggcatgggataaacccgtgcacaccatcatctccctgacctgggcttctggcttccaaggagctgggatagaatgaggggattccctccccagaactaaaagccccagctgggatggaggatgccagtggaccacatcattctcaaatagagcagtgtgactctggatagaagggccaccatattggagtacatcaagtcaccaagctaaaggcacatgcccaggctacagtcctccat

SEQ ID NO: 30053 - DNA, 1771 bp, Bovine  19866880827820
  misc_feature (1)..(1): n is a, c, g, or t
ntggtctgtgccctgaactttttatagcactgtgagcacagggtcctctgcttcagcccctccctagagaaaggagaggagacctacagatctggaatattccttttttccctcttccccccgtcctccgttttgttttctttgctgtcagaaaatgaaggaagaggttggtgagagtcccacatgtccttattcccagccaggaagatacgatgtagctgacctgaactggctattgtgtcttcttacctggaaacatctaacaaaagccttttaaggaccatctgtgtgacttgggcaagtcgcttcccttccaggaacctcacattcctcacttgtaaagttaagcagttggatacgatgctctctctccagaacatcctacgaaagcatctgtagtctgcaaagggtctggtgtgggaaatgtctaccagagaagtggggtgcgtgacactcggtagacagcttcttagttccaggccaacccttcctctgtttatcccaggcaggacaggagtgataattttgttctaaatgagattttccatatggggagtgaggaggggcttgggggaaagtggacagaaatgtgtttttttactctcatcctcaaggtttttatgatgaagtggagaaattgagcccatggagaaagggattaaaaggtgggagagaagcttcaggaaggatttagtctgactgttctagagaaagggcaaggtgggctggagtaggactgtcactggctgggggaagatgctgttcaggcttttcagcaggaggacagctgtgtgacccacagtggttgttgggagatggggtaggataagaaagcagctcgaggccccttccagcaatgctctgacgaagtctgagcagatcatcttcctgtgttagtttcctaggtcagccatgacagaggaccacaaacttggtgacttaagacagcacaagttgatgctgtcagtgtagctgagctgggaagtctaaagtcaaggtgttggcaggactggctccatctggagaccctgagggagactctgttccaggctttttctctttgctcctcatggtgggtggcagtcttggggtccgttggcttgtagacacgtctccccagtctcttcctccatcttcccatgatgctctcccctttgtctcccttcctctttttttattaggacataagtcatattggattggggtccactctaatctggcatgactgcgtcttaacttggttacatctgcaaagactatttccaaataaagttcccttcacaggtcctgggggttaggattctaacatatctttttggggggacagagatggagactcataacacctccagtcctctttttctttagacaacagtcctgagacgcgggctaaagtgaagtttgtccaagacacttccaagtattggtacaagcctgagatctccagagaacagggtgagtgttgggcgatactgaaggtcctgggatccatccgaggtcacactggctgctgcccatcttgtcttccctgggcaagggatataagcagactcactcctctctgcagtaggtgttggtcacagagaggaactggccccaaggttagacagtaggaggcaccttcccaaggccaagggcagggagcaggagttgtggttgtagctagttccttaaaagccgcaaagtcttgattttccagggcaaaatgaaaagtctggctgagatcatatggaaccttcatctgcatgctgtgggagatttctgcacattt

SEQ ID NO: 30054 - DNA, 1976 bp, Bovine  19866880870959
  misc_feature (1)..(1): n is a, c, g, or t
ntgcctgaaaactgcactttctatagccgagctggactgtctgtcctttccaactatctgctactgtttagagttggtgctgtgtaatctgtgttctgcctctaccatgcatgccgaatgtagcatggcactggtgcctacaattctgcccctggcaagcatatttcttaaactaagtcatgctctcctcctgggttctcttatcctttataagtaatagcaggaagtgtaaggagacaattgccctggggctacccatgctttgattttacaggtgttgaccaattgcaaactaatgcctagactagaaaggacttgaagatggggtagtccctggaaagagcagacatgtctctaattaatcatctagggaaaaggtagctcctggggcagaaaatagagaacaagggagaaaacagactggggtctggactgcgcaagccagtatgcactccagggcaaacagaatattcgccacgagggggcagcagtcactgggcgaggaagtctgcaaggaagaggcccataaagaccggggcaagaaaagtctcatctaatacttagttttaagctcctctttgtgaataattcccttctgctttcccaggccctcactcaagttgtttcagcattccagcatgtttcaactaatcactggggtactagggaagagtcctccctcaaacccaaggaacaaaggagaatcagccccttgggatgagcatgacagggtgggggtggcaatggtggtagcttaggtctccagtggaaaaacaatctggggaaaagagttgaaaaggatctttccctttatggtaggaaagggcatttcactgaaggagggggaaaggcacacaccgatgagcttggaataaaattctacccacttgaaaaggttccagcaagttcgcccatacaacgtatcttctgtacgtcactttccatttatcacggctcccccttaaatggctctgctgctgctgctgctaagtcgcttcagtcgtgtctgactctgtgtgaccccagatgggagagcatgtttccattctgtgtagaacatccagtgccacaaagactgctgtgacatgtgcagcccaaatgccagtccttagcaagacgccgaggcctgttcttgccattctgttctagaagtggcagcttctatgcaggaccgtgtgaaccgcacaatttggctataaggttatctattttgtccccctgccagctttgataccggcctcaacatctctgcacagccctgcagaagaatccactcggaccgggggaccaaattagaggcaagggaggtggaggaaagggttcatccctctccctgatgacagtccctgttgccatcgtgacaggttcaagggcaagtatatgacctaagacgatcccactcagaaccaggctcagggtggttgtttaatgactgtggaaaagcaagtatgtagccttgtggctgctgaaagccattttgctaccataaatggcaaaccagtccaaagacaaacctaacacttggaggagacagaaccgagagaattgcagagaaacagatccagggtcctgaacatactgtgcccagagttcatcttctctgtgtatttttcagttatgtgagccagtaaattgtctttattgttgaagaccagttataagtggagttgtctggtggtggtggtttagtaactaagtcgtgtccgactctttgcaaccccatagactgtacctgccaggttcttctgtccgtgagattttccaggcaagactactggagtgggttgccatttccttctccaggagttgtctgtacatgcaaccaaaactgggcctgaccaagagagttctggaacccaacagtaatccaggatgagaggagaagggagagaatatgtgtcacgggcagacagttgtgtaacgccaggatgtgacaggggtgtgaccagggacccagctatggttggacctcccag

SEQ ID NO: 30055 - DNA, 1003 bp, Bovine  19866880880462
  misc_feature (1)..(1): n is a, c, g, or t
nacagaatgcattatccccaagaaggagaatacacacaaagttgcacactcacacaatccaatgacacgggcaggtacacgcactcatcgcacacacgcaccgtgccatccccgctctgaccttgttgtgtagcacgaccacgttgtgggggtctgcattgagccaggtgtccatggccttgcagacgctgcagatcttctccagggccggggtgtggaggtcgggccagccaaattccaggacctgtggcccaagccatgagtaagaagtggcagaagcgcagagacccaacatgggtaggggacggtgaggggacgttagttcccgccctgcccatcaaccctactcggaggcaggggtgtggaggctgaggacactggtccaagactttgttctgacaccgctccctgtggggcctcaggttagtcaccacctctaccccagccccagccccagtttctcacatgtgtataatgcaaaagcttagcacccccgaagatcccaggtccctttcacacaactttgaccttaagacaagctctcctcccacacaccccaggggctggctcagggaggaagaaggaaagcggaaggctgatcacagctctttcccaggccctggacacacaaagcatcaagttttcaggccaaaaggggcctgagtgggacagagagtagacctgaatagcagtcatcaggttccttcaaactttaactcacagaactttaaagtacaagaaaacctgtgttcagaaggacccagagagctgatctaatccagcccatccacttttagacaggcaaaccaaggcccagagaactctgccgcccacccaaggtcacacaacgacggtcactggactccaggggctggagcggcacgcagagcccctccacacacgctcactcaacagcaggtgaaagaatgctggctgtcggaagcctgcactggcgattcccagccagggcaaatccagaagactgtcattaagactaaaatcc

SEQ ID NO: 30056 - DNA, 3259 bp, Bovine  19866880907735
  misc_feature (1)..(1): n is a, c, g, or t
ncacgaggtccctcaaaacacaccctgccacagctctgccctaagacttctcagaggtgctgacagtgtgacacctctgctacttcctgacgctgtgacctcaggcaaataccccacctctctgtgctcctgcagtagctgcttcctagggctgtagtgatgttaaatacgtgggaaggagttaggacagggcctggatcatcacaggtgctcaataacatgagcgtcaccatcagcgtccctcctcctggtcaacacacacgtacacccacacacatacagacacaccacatgcacacacacccacttgtacacatatacacacaaacatacatacctatacacatacctatacacacacttgtacagacacaccacatgcacacacaacccacttgtacacatatacacacaagcacacatacctatacacatacacatatagacacaccacatgcatacacacagcccacttgtacacatacgtgcacaagcacacacatacgaaccacacatacccataaacatgcaaacacacaaggacaagcacacacactccacggtacacatacatgcacaggcacacatacctatacacacacacgtacagacactccacatgcacacacacaccccacttgtacacatacacgcacaagcacacacacacagtacaaaccacacatacccatacacatgcacacatataaagacaagcacacacacacacatacagacacaccacatgcacacacacaccccacttgtacacacacatgcacaagcacacatacacacacaaaccacacatacccacacatgtgcacacacaggacaagcacacacaatccactgtacacatacacatacaagcacacaaacaaaccacacataccatacacatgcacacacaggacaagcacacacacacacgacttggctcagatgctgtgtcccagccacagagactctcctcagaggacagctggacagtgagtgaggactcagaccatgagacgcccgaagtcaggggcaggtgagagaagaggggagaagagctggcgcaggagcggctgggatgagactccagcaggaagaggtggcacgcagaaaggatggggccctggaccagtggggggggggcccatcctcaccaggtagttgcctccatgtttggacttgagcatctgggccacctctcggaggttgctccggaagttctcctcattggctgtgctcgggaaggagacggcgatgatcctctcggtgacgtacaccaggtccagctcacagctgtcctccgtggtccggctcgtactcatgtttctggggagacagcaggcagcagatcagaatccaggcccccaggacgaggtccaggaacctgcacccctccacaccatacatggcccccagatctaacccaggagggcttggctgctccctgactctgagccaaggccagaggcttccccggggcaaggccagtgtagccctcaaggccagtctgggagagccggggagaacagagctgcgcagaagccggcaaggatctcaagccgtttcagaaacaaagagtaatgacactagtcctacatgttcatcagtcctgtcggcatcgccttcaacctatgatcccagaggtcagagccagggccggaaccagccagggcccaggagtccagctcagcctcccaacatacagcagccacctggtctggcagaagcttctcgaaggatccagggagagctccagagaggaaggagagcctgaagcgagggctcttgcatcccagagctgagccttctaccgccctctgcttgctctgagctgtggcatgggcggggaggccctcaggggtaggggcagctcaggtgacacgctcacctgggctccaggtaagccagaccacagcgcacattccagccctccctggaggcaggctgactcctgccctttgttcctggctctccccccacctctggcagctcccaccgcctccggggctgcttcctgccagtgacctccctggtttctaagggcccaggaggccgaggatgctgccacagtggcaggggactcccagacatcccagtgccatctgagcttctaagagaggtagggagctgcctgggccggcactgagtgagaggaagcgagggctcacacctttacacctcacccagctgctcttccagaggagggtccaggctgagctgacgggatggggaaaggggtctcgggaaattggtaatccattccaaagccccccagtggcttctaggggcacctcataccgttcttaccccatcaccagcctcctgcttcccctcgctacccaagatggaccacactcatgttgataacctctcactacctccgggtaaagctgggactggaggggcagtgggagggataccactggggtgtttcagagtgatggggtggcagtagggtgtacagccccaggacaccaagaaccggggcagaatccaaatctcctccagggttagctctgagccaggtgtatagatggggcttggacacaggggagccaaaggtgacatatagcttctccatggggacggtgactgggacgcagtgatagagatgccagtgtgctgggagcccactgtgaatttggcctccgagtcctgatcattcctggccctgcagcctatgggggtggggctcctactgaaggcggaacagcgccaccacctggacaacatcagcatcgaactctgcacccaccgattctcagctacaagggaggagggatctgctaagggggccctccactctctgtagacagctggcagtaggactactgcccactgggagcttcagctacacaccaagccctctctggctggggctccagatccctggggccagattctcactcatctcagaagcctcggatgaaggagaggcagaggaagccaaaaaaatcagagaacctggacccaggacaaagtaactctggatgagcaaagcactgagtcccctatgatccccttgccccagcccccatcagcccagccagccagagaacattccttttataaatgatcctcgagtatcagaagccactgctcatggaaaggaacagtatctagcacgggcctcaatgccagccagtcctgaaggcaaatccaagtgctgcctgttggtggttgcgtgacctttaacaagttgcctcatttccctgagacccagtttcttcatctgtcaaatggggataaaatacttacc

SEQ ID NO: 30057 - DNA, 2296 bp, Bovine  19866880958847
  misc_feature (1)..(1): n is a, c, g, or t
ncagaaagctttaagtgtgcccagctgcactcagccattgccacaccgccttggcagagagtccagggcactgcccaggcccaaagagccaacccccaaccccgcacaggcatctagcaccccctagtcacagccaccaccccagttcatgtctctcctgactgggggctgctccccatgcttctgcctttctggcctggtggtccctctctgctctaccagcttggctgtttctgggagtctcagccggtgattagggccctaatcagcaggacttcctgccagcgactgccagaggtggggacagggttgggggttgggggagggaagcaaggtcaatccaaggtgaagttcaaagcctgggaccaggggaggcttcggaagggacgtggactcacagactcctccagcccagcatctctccagccctctttcctacagatgaggacaccgggcccagcaagggaagggactgctcccaagtgcaggaagaggcaggtgccttgctctccgaccaccctcggccacaggaactccaaggcaggaacccttccttacatgtcccttgaagccccctgcctgcccctgggcagccccatcccaggatcaagccccatgctgaacccacaggctgttccccataaagggttgtcagagcccaagtgactgctcaggtctgattgaggtcaaaggtcaacggtgagcccctcctctagatgagcaatggcctagaaatgggacagaaatgagcaggggctaagacagggaagacagatagggccaggctgaactcagaaaccctccccagctgtcatcatcatcagcccaagcctattctttcttcaaaaaaaaaaaaattgcttaatgccttttacagctgcaactgggcgggccaggggtccggaaacagagctcacacacactccacaccccctctccccaccccctgacctggagcaacctcagcctccctgggtgggaaccaggaccaggtggagggtgtatgtggcaggtcttgagggctgaccctgactaatgaggaacatcgggggcgctggaaagcagatgaccccaagagaggcctgagatggagaaagagcatgaccaggagcctgcaactgccaccaggggggtcagagctgccagcttcaaggcagacaggaagggctgggcgtggttctcccccacctcctaccaacaggggatggaactaaggctacagcgagagggatgcaggttagacctcggagagacctagagggcatgagacaagcaacttagagggcgtgagacacagcaacttagagggcgtaagacgcagcaacttagagggcgtgagacgcagcaacttgcagcattactgggggaatcccacttttaaaatatagatgctaccgctatgcatgtagcccatggtcaaggggagcctgcctggaggccaggccacatccttgctcagcctgggagtctctgatccggtgactctcatcaacaaatgggatgggagccaagaaggggaaactgggctggtttataataacacatcttgtttacagtgatggcagctttctcagagtcctccgtaaacacagctccctgggcagagaaagcctggagaggctcccttatctcccacctcccctcagtcacacagagagagttaggcagggaaagaaaatctcttctctaggctctgaggctaggacccctcaagggaaaacagtgccactatctcctccactctctgggcccataaccctccctgtcttagggctggaacagccgcaacaggagagaaaagagccaacccagagttgggcaccgagaataataccaccacccccaccaccaataataataataataatcactaatatttattgagcacttactatgtgccaggcactgttcaaagtgatttcaagaaactaactcatctgatcctcacaaacaaaccatggagcagaaattatcattaaaactggcaagggcattatactaagtgaaataagtcagacaggggaaagacaaatactgtgtgatgtcacttttatgtggaatctaaaaaatgcaacgacctcgtgaacagaacaaaaaaagaagcaagactcacagatacagagaagaaactagtggttaccagtgtgtgtgtttgcgggggggggggccagggggcaggcggggggtgctagagaataagtgcagggaagtgggagttacaagctattgggtgtaaggtaggctacaaggatgtattgtacaacaggaaaagagccactattttgtaataactgta

SEQ ID NO: 30058 - DNA, 843 bp, Bovine  19866881051375
  misc_feature (1)..(1): n is a, c, g, or t
ntcctccccctaggtgccccgcattctcctctggctgaccatcgagctagccatcgtgggctcagacatgcaggaagtcattggcacagctattgcattcagtctgctctccgccggacggtactccagaggggccctagttcttcagcccagggctgggaacaactgctgcttcctccccaggccttctatttccccctggccacttcatcctgcagtcatctctgactcagttattgaccaatctgccagatggggaaacacagacccagatatgtaaagcgacttgctgcaaatcagacagatgttggtcatcttgcaggcttcaatactgcagccccaagctccctaccacgctggtcccctgcccagcatggaggtgccattttaggtctccagcaccctggctcccctctccctcagctgtctggggccccttgagtgcctgctccctggaggccccattccacggctccagccctgaggatgggagatccagactcctgaactgggctaggctgacccaggccactctggtttcagaatcccactctggggtggtgtcctcatcaccgtcgtggacactttcttcttcctcttcctcgataactacggtgggtgtgtgcctctcatccccagcgggactcgggcgaggagggggctggcaatgaatgtaatggtactctggtgaactgggagaagggctctgagcaaccttgctctgcacggccttgagcaacttagactagtgtttcttcatctacaacacgcagagactagcacagaggtcacagggctgtggggaggattcattgcggtaacacggtcaagtccggggcacag

SEQ ID NO: 30059 - DNA, 2023 bp, Bovine  19866881061751
  misc_feature (1)..(1): n is a, c, g, or t
ntgtcctctgtacttaattctgccctgtgatccaactactacttatgtcttatttcgcttagctctcagagaatgtcagagtagttttcttaacttgataaacagtagataccaggagcctgaagcacatatcacactttcttgtgaaacattagaagcattcccattacaccagggataaaataaagatgattgttatcacggctatcatttaacattgtattggctatcctagccagtgcaataagacacgaaaaagaaataagagtcagagttgttgagtccaatcaagttttcatatgatcccgattctgtgcctgcactgatctcaggtgtctctaaaggtagaggtttcaatgcatgttggaaatcaaatgtggatcttatccttaaggagtctagagtttagtaaggggaaaaagaactagacctttaaaatgaagttatttgcaataagagaaatatgaagaaaagttctgtgggactgaagaaaaaagaaagatcactatcaggtagagagactggggaggctctgtgttgagtatatattttaaacagagccttggaagataggagtttgaaatgcatgagattattggaaaaggaaggctcataatgaagctaggaagtcataggatgtatttgaagaatggactggattgaaagcagataggctgtgtagtagagagtcaagaaaggagcctggggcttgcgtctggttggttttaaatgtcagacagagaagcttgaatcttagctagtggaagtgaaggaagccattactgtgttttaggaaaggatgccatggtcagagctgtagtttaggaagatgtatctggtgggtctggggaggaaggatacaaaaggggagagactttaagctgggagatgctaggagcttattggctaacctaggtgatggggactgaattagggtgctggccatggaaatgaaaaagaagagctgagggcagggatgctgtagtgggatgagaaccaacacatctacaagttgattgggtgtagtaagtgaagaggagggagatatcaaagataattctgaggctccataaatagaaacagaatgtttgttccgttaacaagccagaagttaggaggaggagcagtttggtgtaagatgaagatctcagtgttacttatgttgaatttgagtgacagtggaggctccagatagagatgtatggaaggcaattggacatctggaattggacctgaaagagtggaaagagctatagatttgggagtcctcctcgcaaagatgaaggttaacgctttgggcatggatgaaatctctctatatcagaaggcatggagagaaaagaacttagaatgaaatggctgtgagggaatggaagcccatgcagggccttgagaacgaatgttccgggcagggagaagacactgagacagtgggtcatcatagaagtcagaattgtaaagggttcccaggaggttaacaacgtcactgtggagcaatcacgaagaggaagactcgggaaaactcactgggcttgccagttaggtggcctcaggggtttcaaaggcgtattttcagtagagtggtgatgacggaagccagactgagggattgaggagtgagagatgagagagtgcagacagtacatcatctattcttttgaatggttttgtgataaaagggaagagggtggtagctaaagagggtagcaagatactgagagcttctttgtgtgaatataggagccatgagagtttttagaggtggaacagagagaggttgaatacgggggaagagtgagaagagaaagatataagcgagtgagaaagaaactgatagagcaggtctctttacgtgaaccatgaacttcctgatgttcaagctggttttagaaaaggcagagaaaccagggatcaaattgccaacatctgctggatcatggaaaaaagcaagagagttccagaaaaacatctatttctgctttatgactatgccaaagccttgactgtgggaccacaataaact

SEQ ID NO: 30060 - DNA, 1241 bp, Bovine  19866881101662
  misc_feature (1)..(1): n is a, c, g, or t
ncggctctgcatgcgggacaggttccgccacagtcggtccttgcgcccaatctggaatgaacctgggaagtggtttagctgcagaggggacagagggtgggagcagggagagacagggccatgtgagaccacgagaagacagcaagactcactacaccattccaacattctaagctcctgttccatctgactgtcactgtctaaaggtccttaagtatcccgcgctgagcatccaccaaaaaacgattaaaacacaaacacaacacaacacaatgtagtgccctttaggagtcaatagttcatgacgtaaaagagtaactaagacagacataacattcaccgtaaaagtaaagaaaaacctgttaagtctttttccatgcctctaggacaaagaaaagcacctggctttcctggggaaaagggactattcacttcaaatgagacctctttacacatattcagcttggaggaacagaggcaatgtgcagtggttagaggaaaaacatgataaactgaaaacaggcattgcgtctcaagatacaccagggaaaaagtgtcttagatgctttatctgtccaagacactgtagctgacctactaggtgagcatgatccactgggggctcacacagcacccacctcccatactttctccaccctctgagccctcctgacttcactatggtcatcctcctcttccctacttctactaccaaccttcctctgcccaagtccaggggaagagcagctcagaaaaggcccctaccttctgatgctcctgaatggatcggaaactaggagacttcatgtggtgaccccagcagcccagccagtcatcattccctacagaaggcacatcaggaagtcagtcttactagcagctcggtccctgggacagagagtggctcagaggccccagaaataccaccagagcctgggcatggctcccagccccagttttctaggagttgccatggagctgtcctacatgaggccctggggtcaggactagaacaatggccctctgtcttccaattttgaggaacaggctccaggcagagggatttcagacctatgtcctcttatgaagttggaaacttcaggacaggatcctcacacagcagaagctaatctaggggttccctcctgcccagggcccatctgctggggcagaggacaggcttgaagtaaggcaagtgactcactcttgctgatcttgaagtgggaacgtccaatggtctg

SEQ ID NO: 30061 - DNA, 1496 bp, Bovine  19866881131163
  misc_feature (1)..(1): n is a, c, g, or t
nctctctccttagcctgtacctgagtcctttagtgtctaaattttgcattttgcagcattaccaacctgacaatcaggaatactaaagatcccattctcaatttgagtgcccatggcaatatggccaacttttaccttccttcatgatttcaaatataagtaaaaaaaaaaattcagtcagctgattccattctttagaattgagttcctattgaaacatcaaattgtatcacctaagcatatccacatgtataaaacatattatatgaataaataattgtgagaataatcaaattaatttaacctcaacaactacattatttgagaaaaccatttattctctagggaaaactaaccaaaaaacccctctccctaagatccacctaccatttatgtttaactctaccattcctggaaagaatttttaccaattttatcttccacaaatattcaaatttcccaagtgaacttctgatacttatagatatgacagaatgtctatgactcttaaaactagcttaacagatgtcagcaagtaaatacaattaaacagcagaaaatgattatcaaatagtgtgtgatacacatatacacgatcaaataaaattgaagcaaaatttacactacagccttcaatctctagaaacatggcctctaatacagattcttgtttataatttaataagttaaaaaccattaaactttgcctctgcctaaacaactcaactagaaaagctaaaaacagtaatatatgtacaaaggaaaaacatactagatctaggtatcaggagccagctctgtcacttactaacttttaacttacctttcctcaccactagttttctcagttgtaaaatagcaatgctacagtgttgcagaattaaatgaaatattgctaaaactcattaggcactcaatagacagcagcttcaatatgaatgaaattagtgtccactttctgaatttattccttgtctgcaacacgtctttctccaaagatcgcagacaagtaacttgttaacaacggtcaccaactcactgtctatagaggctaaacaggtgacacaaacgatttagacaggcaaaatatgaacacttctattcaaatctagccagttttgccatgaacccagcattaccagatcatctaattcttcaagaaaatgaaatcaaatttttatgtcaaactgcccattttaaattctggacaatgaattcaaaatttcaaatcaaacaaaacccactctagaggttaagatatagactggagaaccctagttcaaggcccctaggtgctatatatcaaacaactaggaataaatttaaagagagataatgaaaacactttgaattgtttaaggtgttttacattgtaagtcctctagtattattcagtgattgaactttttgagtgcctaattgtggccagatttatatactctaattagctgggtgtatgaatccatcagagtaatagaggccactatgttcacaga

SEQ ID NO: 30062 - DNA, 835 bp, Bovine  19866881162178
  misc_feature (1)..(1): n is a, c, g, or t
ncccaagaaaggacagggtgctgtgttctctgggttttctttttgcctcctatatcctgctcctggagttgaagacgctggcctccttgaaataacagtaattgtaacaatctacctaactacccccgctaccctcgcctctgctcggcatctcccagaaagcctgctctcttaagccaaagcaccaggaaagggtaagtttaacaagacaaaacttttagcagtcacttctcctgtagctcaacatcacaaaaatctggctgttttcaaacctgcaagagccaaatggggagtccagatttccctgtttacaaggctgtgatgggataccccaacatctgtctccagaatggagagtcaaacagggggcaggtattttcatgatgactcttctgtgtcagtgaagccaaggtaaggagccaggatttctgcctccaactgcccatcatgagttggcatcctaaccctttccttgctaagtagtgtcacataaagccatgtgaaacagaaggtttaaataagatccagagtcttataatacaaaaatgtccagatttcaactgaagatcactcatcatacaaaaatccaagaagatctcaaactgaatgaaaaacgacaagagatgtcaacactgagataatagagatgttaaaattatctgacacaatgaatataaaaatcaactcaaaatggttcacagagtttaatgtgacatataaaactataatacttttagcaaaagagaaaaaaacctaggagataaccttcagaatatagggctagacaaaaagagttcttaaactgacatcaaaagcagatccatcaaaggaaaaa

SEQ ID NO: 30063 - DNA, 1564 bp, Bovine  19866881231804
  misc_feature (1)..(1): n is a, c, g, or t
nccccatgcagaaaaattggaatattgacacagcatttgagagtactaagctttcaaaagtgtatggttgtgcacatacctaagacatatgtatgtcttaggtcctaaatgtaaacctcagacaggcatttcatgtgtttttatgcagaattgacaggggaattaaatgcagtagctcagaaattgggctaaatccagactgacaacctaattttaaaacctatgaagtatatatttagatttggctggtttttttaccagtcttcttccattttattccagacaacatcttaacttatttttatactttaaacagatcttgtcttggagagtgtactggagatttgttccttagaagaattttgagtattcttttttgcatgtgaacttaaacactctccctcagagtccatgtggtgggacacttgtctaaaagggaaaagaacatctgcatttttgtaccggcagtgtctccagtgagtgacaggcctggcctcatgtgaaaaggcaatgcccaggaagccgtctgcccttcctcccgctctagactcagaggcagtggtaatttaacttgaaatgaccttagtaatgtggacttattttgctggttttcccctccaaaataaatcaagcactgtcctaggcctagttattttaaatttctgggaaaaaggaggatggtggatgcctagcctagaatgctgtgaccggggaggctggtcgtggtcacttgtctgcctgctgtgggtcctcgtttcccatgccgacatgcacctccagcctagtcaggatgccatccctcccttatcatttggcaggctgacttggagggatgcttattgctgtcatttggaaaaagacagggaggggccattccccactcttatggatatgctagtgctcggctttgaaggcatatgagctgtgagcatcagagaaaacctggtagatgttatcgtttcaacactcattacgtgaaaagcaatagttaccctttcggagattggtgaactaaaattgtttatattactagatctttaagttagttcagtaggtaagagaaattaagtggaagccactggttactatatgttcaggggcaagacaaacgcaattttcctcgtaggcagtagtgaagatgtcattttgaggatccttgctgcctgtatacatgtgggattatacctgtgggatattttcctgaactgaggaccctgaggcaaagtgaataattttagtagcattgccaaccccttctccacagaggttatgccatttccctcccacctccagtgcatgagtgtccattttcccaaagtggtgttgaacttttggatttctaccagtctgacaggttaaaaatggtgtctgctttctcttatgaacaaggtcaaactttttgtttttaatgctgaaggctaatttttttttgtcttttcttgtgagatgtctcttgatggcccctacccatttttctattgggttattgatcttctcagtttcttcatgtacttgggagactggccctttttctggataagagttgcagattttttttttccag

SEQ ID NO: 30064 - DNA, 1869 bp, Bovine  19866881232408
  misc_feature (1)..(1): n is a, c, g, or t
naaatgagccaaatcacattcatagtaattgctgccatttcttaagtaatggcaggaccttgacaaagaaaggcttaggaaacacttttacttggtcctccaaatgccctatgagaagagggacctgggattctgcaaggttaaggccaccatgcttgttaacggtggagtccaggtttgtcctgcattctggtagtcttttttctctttatatttttctttgtttaaataaaaattcagtgcaacagcacatctatataagaatatccacctcccagcctcacacacacaatttggtctatattttttcaggcctcatggggtcacattttcataattttttttttctacttgctatatatcaaagatatttttatctaaaagtagtacatttagatctatctcatattttttttttgtccagttcacgatacttcagagcatggatagagcaaaatgaaattaaccttactgatggatatctgggttgtttccaaatactgtaaagaaagctgccctacacatccttattcctgtatctttgtgtgtgtatgtgacacattctatagaacagatccctagaagtagaattactgggtcagaatacactcatttaaattttgttatgtggataaattgaccttcaaaagatcacactaatttatactctccataaactataagatagggtctgcttcccatagcctcaccaacactagttttattaaaaaaaaaaaaaaaaaaagcttaatttttgcccaagtgttgcaaaacagaagtggcatctcataggtacttttaactagaatttgtctgttagtgagattatggttagagacttttttttagtgaattgcatgtaggtttcttcccctccccttaaaaaaaaaaaaacaaaactgtttctttttcttactgtgcagctctttgaattttaaagatattaactcttcttatatattgcaaatgtctttctaggttccttctcaatttatttactatttctttcaccacattaaagtttagaaatgttatacgatcaaaccagctaatctttcccagtattctttgcacactgacaaggaaaattggtacaactgtagctggaagatgacagttaaaaaatagggaagctacccaaaaataagaagttgtagatgtaggaagaataacagggagaatctttcttctaacataaattgttcaactcccagtcataacgcatgccttgggagttaaatatgttatccacaagaaatcagagcagggaaatagcagattacctctaggaagccctgccaagccctgggtggtagagggaggctgggccttttgtttaaaccctggctgcagtccctgggtgggagggtcaacatggagaaaagaatccctgaggacaatagcagtaagaattgggcagaggtgtcaggaaaggtcttccctcctggattactgcctagcagacataaagccctttcagggagactgccaagagcttggtacaagttgtgcaccaccttgccagcctccaatcaacattcaccaactgcaaatcaaattacaacatctctaagtataaaaataggatgctaccttgtgtcttcatcttgtttataggcaaggatcaaaaatagcacagacaaaaaactcaggcttgcttatcctactgccctgctagcaactgtgtttatacctggagtctctccaggagcacctggggacagatttccagctactgcttccacaatgatctccatgttccctgtgtcctcttagtggctggggcttctaccaacaggcagcctgggtcaggaggcaaaggggggagggttcccaggacaggggctatggacaggctctaggattcca

SEQ ID NO: 30065 - DNA, 725 bp, Bovine  19866881382602
  misc_feature (1)..(1): n is a, c, g, or t
ntagatgaataaataaaaataaaatggttcaaatgatatattttatgttatttatattttaccacaatttaaaaaatcaattgtaaaagaacatgttactatggttgattcatgttgatgttaggcagaaaccaacacaatactgtaaagcagttatccttcaagtaaaaaaaaaaaaaacacataacatgttaaacaataccatattgccactacaccaaaatttggtgaaattagaaaccagaaattcttcaggaaaaaaaaaagtaggaatcctaaagaaccataccaacacaggtgcaccctcctgcaagcccctcctctcatcattcagaagttttaggaccacattcaatacaaacctctacccacacatccatccaaagtatttacctggtttctgggtgtgacgccacacactgcagtaatgctagagcattgcaaactctgttagactggtgtgctgtcaaggtgggtgggttgatagatggataaatatttacaatttcctaaaaaatggaaatcaacaccatatgagcacggaataactttaattcccatggtatgaaagccaacaattttaattctgtatacccaataagaacagaaccatcaaagagggggcagaaataaacaatattcctttcatcacaaatatacctgactgagactatttgaaacatattatccctaggaagacttctaaggaggcaactgtggttacc

SEQ ID NO: 30066 - DNA, 1151 bp, Bovine  19866881409242
  misc_feature (1)..(1): n is a, c, g, or t
natattcccgagaggcccccaaacccccattcacatcctctgagcacagcagaggcagagaagtgtccctggtggctgatggcggccatgtgacacttggcgatgggaaggggcgcaccctgaaccctgaggggtggttcagccatagctgtgggtggcccaccagctctcatccgtcagagctggttcagcctgggaggcaggggcctttccaactcatgggggcgcctctggatgctcagagctccttccctcctgtagttgtctggagagggatccaggcagcggagttggggtgtggccagggtcagaggttgctgagttggaacagccctgtctgggaggtgttctcacgtgcatgccaggcccacggatgtttctccttcaatcagggcagctggaggcctccgtttaagttaatcacattatgctctggggagcaatatggaaattggagtgaggtctggagggaaatccgcacacacgggcacacacacgcacactcacacactcactgcagcttggagcacaatgctgccgccaccgccgcccaggcttgcgccgccgctgctgcgccttccccgcaggtggacgctgggtgcctggcaccgcctctgctctgcccgctcagcctcgcctgcggtcctctccccgagcctcctacgaagttgctgtgcccgccccccagcccgcctgggagaccggcaggcggaggccgtcaggccgaggggaggagagaggcagcagctggaggagtcccccagggtggaagcgcccccgcagcccccgcgcctcccatcggggcttccgggcagatggacctacgtcggggcggcgccgcgggggccccatcgagctcctcccgctagaggggccgggacacccgggctgctcctgcggggctaagcgtcccggagagcccggggcggggctctcgccttgctcctcaccgcctctccaaagcagccggttctcctccccctcccccgaaccctaaccctcgtgcccagggtgggggggcacccacctcgggggtcaacatgactcgactgagctggtgcttctcttgcgtgattcgatggagcaagtacctcttctcctgcttcctgcccctgcgcttctgtctccgaagacaggtaaactcacctaca

SEQ ID NO: 30067 - DNA, 1033 bp, Bovine  19866881449422
  misc_feature (1)..(1): n is a, c, g, or t
ncccagacagcccttcaaaatggatttccatttgaaactactcccaaattatatgctaatgttttaacatggtttattgaactaaaataatgcaggtacagagctttaaaatacatacatatactagaaggcttgtaatgaaaaaagttgttccctggcctactctttaggggcggtagtctcaactctattacgtattcatccagattagatgcatatatctaaataaatccatatactactaattcttgatttattcattttaagggttatttgttgacttcctgccatgacagttaaaaacatgagtctatcacttctgttccccacctcccttatttatgtaaaaattttagttaaaccaataatcagcatttaaattatgtatgcaaatactgtttaccaatgagccaatgggtactacaactgtgccttataatttatacagcccttcatttttcttagagttaattattgcctttttccccctctcttgttagttttttgtattatctacagttggctgcccccacccctgaaggtgctcttaagactctgtccaaaagtctggcagtattttctgtatactcaaatgcataagttctgtttttttctctagaatcttcatcctagagtctccttcctcttgtttcaatcggaactgactgctctctagacttgctgtacagttgtcattctgggattttcctgggctggttttgcccatttcatggatcccatgccgtcttctttcttagtttacttccttgttttgctgaagcaccgcctctggtaactttgaaaggaaaaggcatagggggatatattggaatctttgcatattttaaaatctattttatcttaatacttgatttgtagttgaatttataggggggctggttattgaatttaagttttgaaaataatttcctgtcataaatttgaggatattattcattttcttctatcttccaggttgctattgtgaaaagcctgattcctattcatattcctgatcctttgtacgaaacat

SEQ ID NO: 30068 - DNA, 1426 bp, Bovine  19866881474237
  misc_feature (1)..(1): n is a, c, g, or t
naaaatagggcccttctacatctctcaagcccttctgcagagccgtggagcaatcaaggattctgcctctaccctatatccctttccagaaccacagtgcccctggatatcccctcccaagcctgccagggctcaaatgacagtttagccaacactgtaatgaaacagagtcccacatgtagtgggccctgcagccaccgctggggatggccacaggcagacactcctgccaacccttcgtctcgactggctggagctcagggcaatataggaagggggcctctctgggagcccctgagcccacccctagccaccaccaccagcgctgccagccctcccaagggttcagccagctcagccctgccatccccgcactcattcccaccccatctccccccgccctgctcccacagccctgccctttacagctggcatcactagatgtgcctgccggcggctatctcaagagttctgagaaatcaccttgcagcttcccagaaatgctgaacaaggccaaagagcaagtcacagtgacaccaatttgtctggcctcccacgcagcccaaggggaccctgcagcccccaggccagctccctctgcagtcccttgagctgggactgaaagacaggagtagagaaccctagtgctgagggtcttcttggaagaatccggcccccagaattcccccatccctcttttctgagactacgggggtctctcttgtattttaatctctcacagtcggaaagtctttcctcctacccaatcaccatcttccccattgcaggttcaactctgccaccagaagtgtctctaaactgtatgtgatgaccctgtttcaggaccctgttaccaattattcatctttcccagctggttcccctgctccacccacacaaggagagttccttgggcaaggatctgtcctgtgtttggtatcctgagagcccggcatatagcaggtatcagacatgattgtagaaacaatggatcaatctaccaatcaataggtcccgacatattttcctacttctaccacttactatccccttcccagggtttccccggaggctcagcagtaaagaacctgcctgcaatccaagagtcgcaggagacatagtttcaatccctgggtcaggaagatcccctggaggagggcatgacaacccactccaggattcttgcctggagaatcccatggacagaggagcctgacaggctactgtccatagggtcacacagagtcagacatgactgaagtgacttagcacgcacacagcaagcatgcatccccttcctaggggcttcccacatggcacaagtggtaaagaatctgcctgcaatctaagagttgcaggagacatagttttgatcccggcttgggaagattcccctagaggaggaaaggcaacccattccaggatt

SEQ ID NO: 30069 - DNA, 2000 bp, Bovine  19866880107503
  misc_feature (1)..(1): n is a, c, g, or t
ngaactgaagagcttcttgatgaaggtgaaagtggagagtgaaaaagttggcttaaagctcaacattcagaaaacgaagatcatggcatccggtcccatcacttcatgggaagtagatggggaaacagtggaaacagtgtcagactttatttttatgggctccaaaatcactgcagatggtgactgcagccatgaaattaaaaggcgtttactccttggaaggaaagctatgaccaacttagatagcgtgttcaaaagcagagacattgctttgccaacaaaggttcatctagtcaaggctatggtttttcctgtggtcatgtatggatgtgagagttggactgtgaagaaggctgagcgctgaagaattgatggttttgaactgtggtgttggagaagactcttgagagtcccttggactgcaaggagatccaaccagtccattataaaggagatcagccctgggatttctttggaagaaatgatgctaaagctgaaactccagcactttggccacttcatgtgaagagttaactcattggaaaagactctgatgctgggagggattgggggcaagaggagaaggggacgacagaggatgagatggctggatggcatcactgactcgatggacatgaactccgggagttggtgatggacagggaagcctggcgtcctgcaattcatgggatcgcaaagagtcggacacgactgagcaactgaactgaaccgaattaaggtctctacacaaagctaacaaacatctggtaacaagaacatacaatggaaaaaataatgtgcctgtaggccaagcacttacaaaccaaccacaaggccagctagagctaaacgcgtccaaaaatcaagtattcctttttagttaagtttgtcttaacaaaagggggaaatgcaaactatatttaaatgtgcatacaaactgcaaatttaaatacctgaagttgcttcttaacacgttcatttttctgtgtttctgtcacacgttcctcctcacttctatggttcattaccccatcatttgataattcagcgctagcctcagcattattctcatcatgctcatcgtgttcattttctgtcggaggaatgactggtggtggtggaggcggaggtggggcagacatcacagtctttaactcttctttggtcttttccaagtcttcctgggctgcaaaagcctaaacataaaaaaataagcttataagcaacttactttgagaagcagtgattaaaagattcaagtcatcctttctatatgtcaggataataaaaacaagccccagtgatagaagcttattttcagaattaaagacaccactgtgtaaatcctaataaaactgttaattctagcaaggattatcaattgctactaaaagtgttgtacaaatggttgatgagaaaatggatataggtataatgacaaagaaattcacatgtgatagattacattttagcaatgataaaatataatcagacatgggaagaataagactgttattactctaatcccatgatcaattaaaataactgggccaatcagatattaagtgtcttctgatataatacaacaggaaatatcgaacatcaccaattgtctgagtaattatatcgtgctgggttgcctggaaaagtcctggtgtaattattaacaacactcccttacattctcaaaaagtgttccagtttggataataaattgtatgaaaatttctcttatgaggcatcacagccagaaacttttaatttgaatcctttaagcttttagatttatctttcagcttacaagaataccgaaggaaaaaagacaagctgaatgacatcataaggaaactagaaaaatacagaagtagggataatgcggatccttttaatacatcagtatcacaaaaagaactgtcctactaaaagagactgatcaaacagaagcaatgcaaaatcctactctggacactggcttggcaaattagctataatagactttt

SEQ ID NO: 30070 - DNA, 5534 bp, Bovine  19866880195150
  misc_feature (1)..(1): n is a, c, g, or t
nattcttttcttaactaagatgatatattctctgtaaatcagcgcagcgatcattcagaaagcaaggtttaaaaaaacaaatgaaactgttaacaactctatgttcagctaagaaaaaagatggattgatttaaaattgcttgtagtggttacagaaaaaggctcagtctatttgaataagattgctaacagggttttcggtaatgtgaaaaaaagaaaaagatgtctgggtcattgtttttacagtaacacaccactgaactcaggattactccagaaaattactaatggagatgtagaaatagtggctatcacatttctcaatgctttgtaaaatgtggaattttcatttctagcacataaaaatgtcaagatgtgttcaaagaggaacacgttgttctggaaccactctcacactcaataggcagggccccagggtcagggagaagacaagaggtcctatctctccaaagctgaaaaagttatacaactcctggacaaacagcaggaagaacaacatgatgaataagcacctattttatgtgaaaaatgactgaggtagtcctcctcttgctcagcttcttgtaaatccttagggtcttggttgatgctcctcatttaactctgtctgggagggagtgtatacatattctagtttctcttttcttttcttatgcatttgtttaagttacaaaggcaatacacaaaatattcttattctattaaactgggtcttatgaagtttagacttcccaggtggctcagatggtaaagcgtctgcctataatgtgagagacccgggtttgatccctggattgggaagatcccctggagaaggaaaatggcaatccactccagtgctcttgcctggaaaatcctatggatggaggagcttgttaggttcccgtccacagggttgcaaagagtcagacacgcctgagtgacttcacttcacttatgaagtttatttttttgtaggtcaaaatttcaaatagggcaatctaataaaagaagtataacttagtaaaagattcaaacaatagaaaatacacagaataaaatgtaagaaactgtctattcttaatttttacaattctcttcccagaagtaacctctataacttctggaagtgtacccttcaagtctttttctgaatatttacatgatatagatatatataatttaaaatgcataagggggtttgttatatatgcattgctttacaaattgcactatgcatgtgaaatttttgcatgtcagaaaatccagattgcctcatcctagtaatagtaatacattccgtatgactgtttcatggtttatttaacctcagtatttgctattaatttcttttttaacatgtagctatatttttaaatgtcttgaatgatactaaatggagatcctaatgcatatttttaaataaaatttttatacattaaatttctagaaatgaaagagatgaatcagaggcatatgcatctaaagtttcattaagtcctgccaaattcacttcccaaaagagtttgccagtttatctactagcagtaactattttcccatatccttgcttttactaggtattataaatcttttaaattctaattaatctgatgggggaaatataatattatctttaaaaatattatattgaaatgtatttccttgattactagtgaggtcagacactttttgataggtttttattggccatttgtatttcttctactgattatcttttacaacctttgatttatatgtggattgaatattgcttccatggtaactcagctggtagctcctgtaatgtaggagaccctggtttgattcctgggtcgggaagatcctctggagaagaggtaggctatccactccagtattcttgggcttccctggtggctcatacggtaaagtatggattgaatattgattctctatttgttctactatttcttactggtattgtcttttacctttatggcaaatctcatcattaagaaatttttagttttatttaattaaatccaccaatgttgcccattttgaattctggagctttacagttcaagaggagaaggaaatggcaacctgctccagtactcatgcctggaaaattccatggatggaggagcctggtaggctacagtccatggggtcacaaagagtccgacaggactgagtgacttcactttctttctttctatagttccttttggagaaggaaatggcaacccactccagtgttcttacctggagaatcccatgtatggaggggccaggtgggctacagtcaatggggttgcaaagagtcagacatgactaagcaactaacacacacacgcacacacagagttcaagaaagatcaattttaagatttcaaaattatcttttgtattttattataatttttatatatttttcattgcagccatgaaattaaaagatgcttactccttggaaggaaagttatgaccaacctagatagcatattcaaaagcagacacattactttgccaacaaaggtccgtctagtcaaagctatggtttttccagtgatcatgtatggatgtgagagttggactgtgaagaaagctgagcgtcaaagaattgatgcttttgaactgtggtgttggagaagactcttgagagtcccttggactgcaaggagatccaacaaatccattctaaaggagatcagtcctgggtgttctttggaaggaatgatgctaaagctgaaactccagtactttggccaccacatgcaaagagttgactcattggaaaagactctgatgctgggagggattgggggcaggaggagaagggaatgacagaggatgagatggctggatggcatcactgacttgatggacgtgagtctgagtgaactccgggagttggtgatggacagggaggcctggcgtgctgcaattcatagggtcgccaagagtcagacacgaatgagcgactgaactgaactgaactctctattacatttgccattattgttttgtatatatgtaagttgaagtaaaagtctggttttattttttccaaatagtcatatattctaatattatttgttcaatgaatgtaatttcctaactgactgtgatgtcacctttatggaatatactgaagtcctatttacttataagtgtgtttctggactttgtattctgtttcatttatctctgtgtttctacatctatgtcatattaatctaactactatagcttcaaaatattttaaagaacatctgggagagtgctttcctcataatattttttaaaaaaatctttgctattaactcatattttctttgtcatatgaaacttagcatcagctaaggattcataatattcttgttgaagttttatccagaattaaattgaatatggattaattgaggagaggaattggttggaaagagatatgaaggaattttctgaggtcactgtcttagaccttactttgtgttggttgaatgggtaaatgcaattgtcaaaactcaatgaaatgaacacaaaatttgaacatcttaggattagtgtgtgtacttcataaagcaattttttaacatgacacctgatgagaagagctgactcattggaaaagatcctgatgctgggaaagattgagggcaagaggagaagggggcgatagaggatgagatggttggatggcatcaccaactcaatggacaagagtttgagcaaactctgggagatagtgaaggacagggaagcctggcatgctgcagtccatggagttgcaaagagtagtacatgacttagtgactgaatagaatagaatacaggcatgggttgtcatttcatataccagtggaacttcctgatccagggattgaacccccatgttgagtctcttgcattaagaggcagatgctttatcaccaactcacgtgggaagcaatagatctgataccatgtctattaaaatgtacatcagatttttatagaaactaacaatgtcattctaatatttatagctaaatgcaaaggaacttaaatagccaaattgaaaaattattccttattttaaaatttactataaagctacaattatcaagatagtgtggtatgagggtaataaaagacaaataaattgaaagaacagaatagaaagttcagagatagatccttatttctgcgctcaattgatttttgaccaaggcacaaagtcaattcaatgggttaaaaaagactttttaacaaatgcttctggaacaatagaatatttttatgggaaaaactgaatcttgatttcatctcactctgtgtgcaaaaattaatacaaaagttcttgaagaaaacataggaaaatatctttgtgaccttaagagtaagccaacatttcttgaaagggacagaaaaagcattaataaaatataaataaattggatttcatcaaaatttaaaatttttattctcccaaagatagcaatacaaaaaataggtaagccatagatgagagggaaatatatttacagtatcaatatatgatagaatatatttgtacacaaaatataaaaaatccccttaaatcaattaaaaaattaaaagaggttaaagatttaaacaataacgtaatgaaagaaaataaggatgaggaataagtccatgaaaaagtgcccagtgtcatcagggatctgctaaacctcaatgggatggcatctcatccacattagaatggattagtaaaagacggactacaccaaatattggataggatcaggagcaaccagaaccttcatacattgttggtgggtatatgcagtggtacaaccactttggagaatacttcagaagttaggtataaaggtaatcagatgtttacctatgaactagtaattccactcctaggcatttgccaaagggaaggaaaacatattttcaccaaataaataaataatccctttgtaagaatacttaaggaaactctgtttatagtagccaaatactggaaatcatcttgaatgtccatttacaaaagaccagataatcaaattgtggtttatttatatagtggaatattacccagaaataaaaaggaacatccacatcacaatcaacaacgtgtgtaagtctcacagatatgaaatgatattgagtgacaaaacccagacacaacagaatatatacacggtgtttccatttaaatggagtccaagaacaggcaaagctaaccaacagtgatacagtcagaaagcaattgcctctgaggagaggaattgactggaaaggggtatgaggccacagtcttagattttactttgttagtcacactcagtcgtgtcctactctttgtgaccccatggactgtagcccgccaggctttctctgtccatggaattctctaggcaagaatatactagagcgtttagtggtgttgggagaagactcttgagagtcccttggactgcagggagatccaaccagtccatcctaaaggagaccagtgcctggggtgttcattggaaggactgatgtggaagctgaaactcccaaca

SEQ ID NO: 30071 - DNA, 3201 bp, Bovine  19866880380349
  misc_feature (1)..(1): n is a, c, g, or t
naacctgcactccagccaaacacgaggatttaaggcagttccttcaatttggttgcacactggaactcactctggggagatttgaaatatactggcactatgaatttcatcctgagagatgtttattttttttggtctaggtgaagcatggccataggccaggtgattctaatgtacagctaagtttaaaaacactgacttaaagattctttctcctaaaatacctttctccatagcttcacaggataaaatctcacctattagtatggaaggttcccaactctgccttgaaacctttcccagaataccgttaaactcatttttggattatctgagtattgcacagggcctggcatacggttgggacttgataaatgtctgggggcatggtacatagtagagacacagtacatacttattggaagaatgatgtatagttggtcctcattatttgcagattctgtacttgcaaacttgcctattcactgacatctatttacccccaaatcggtctgtgcagtgctttacagccattccacagccatgtgcttgtgcagagaggcgaaaaatctgagttgccagaagcacacattccagctgaggctgaacaaatccctcatgttgaaacaagtgtcctaaaaaggactggttagctctatgattttcacatttttgtgctttctgttggtgaatttgctgtttaaatgggccccaagtctagtgctgaagtgctaagtgcaagaaagacgtgatgtgtcttatgaagaaatatgcgtgttaggtaagctttgttcaggtacaagttacagagctgttataggttcagtgttaatgaatcgacagtgtatacttaataaagtgtctctaaacagtaccacagtaccgtttagcttccctggtggctcagacagcaaagtgtctgcctgcaatgcgggagacccgggttcaatgcctgggtcaggaagatcccctggaaaaggaaatggcaatccactccagtattcttgcctggaaaatctcatggatggaggagcctggcgggctacagtccatgggctgcaaagagtcggacacaactgagcgactttgctttcactttttcaaacagtaccacatgtacaataaggttatggatagactggtccatgaaaatgttccgacaggaggcttgcaggaccctaatcttgtatttcctcaggagcagtggttcagtatttgtcgtaacttcacagaacatagctacagttgaccctggaacaacaccgggtttgaaatgcatgcatccacgagactgtgtgattctgggatggctgatccgggggtgcggaaccctggatcctgagggccgactgacgttatagaagaatttctgactgcacagagggtgggtggtgtccctactgcctgtgatattcaaggggcaaactgttcaaggaaaaacaagattgactgtaatttcactctctcctcagaattcttagtgaccgaacctgtaatttttaatgccagtttcatttggcaaatgggcacctcttatgtgccaggtcctggggatacagcaggaacaaagccagtcctttctctcagcaagttcacagagggagaggatgcaaacaataaacacatgtcaggtgacaatagatactacagagaaacttttaatcagggaggccttctctgataaggtggtgtctgtgcagataccaaaatgaagtggaaggaaggtgtaaaaggaggacacagggctaagtacaaagctctgagatgagcgcaggacagcaaggtggcctgtatgactggtggcaggcgagcaaggggaggagtcagaaagtgaagtcagaaaggcgaggtccagggaagccacatcatgaagagctttgcagggcaacgcttctcaaaactttacacaccatttgaatcataggagaatcttttgcatgtatgtgcttccagatacttaagaactgttttgacaagtttcaaccaaaaagctaatgggagtttgatggagagtgtgttgcagtaatacttgcttaaaaagcatgaaagattatattgtttaatcaggaataatttattgaaatttcctctgtcaatatagttccctagatttctttgtagtgggcttataagtttctttttaaacttgtcttaaaatagtttgcttttgttcttgctatgaatggtggttttttccttccctcatattttctaactagttattgttggtgtctaaaaaaatacttattttattcacatatatgaaactttagtgactgaggtatctcagggaactcagtgtttctattagtgcttcactgaggctcttgggttttccaggcatatataagaatgtaaaatcatcagattgcctctttcttaccaatttttatatctgttgccccatacttctgtctaattacattgcagcgttaacagtgattattttgtgatgttcctgatattaatgggaatgtctttagtgttttactctcaagcattatacttagcatacagcacatcacactgatggctcgttaggttgtacatacacatacacacaaaacatacttttatatcatgttgggcaaatttacctcttcatgcttcagctgtaaataaatagttgttttgagatttatgagttaacatatacaaaacacttaacactggaacagtgccaggcacaaagtaagcactcaataagtgctcagttcagttcagttcagttgctcagtcgtgtccgactctgcgaccccatgaatcgcagcacgccaggcctcccctgccatcaccaactcccggagttcactcaaactcatgtccatcgagttgctgatgccatccagccatctcatcctctgtacctatatgtaattatatgtatatagagctatacatttacataccacacaatatacagcctttagaaagttccttatagaagtatgctttccttctacatgaaagatttagggaaaaaaatttaaaatatggattgaattaatatgatacattaagatgatcatggggaaacagtggaaacagtgtcagactttattttttggggctccaaaatcactgcagatggtgactgcagccatgaaattaaaagaccttggaattccttggaaggaaagttatgactaacctagatagcatattcaaaagcagagacattacttgccaacaaaggtccgt

SEQ ID NO: 30072 - DNA, 2382 bp, Bovine  19866880397664
  misc_feature (1)..(1): n is a, c, g, or t
naaaaacactctgagataattacaactgtgggtgttgaagcttagcgatgttatgtgatatgtccataatgatacatattgcatgcatttttgaatacatgcaatttttgaattcccagtcctttaccttttccactatcagtataccacttgtaaaagagccatgaagtagagaagtgggtctgtcttggatccacccaggaggttttaataacactatacttgactgtgtagttcttcctaatagccacttcacttcagggttctttaggacacagttatgccaaggttgcagccatgtgggcccatatcagtaacaggctgttgttattccatctgaatttaaaaagttaaaataagtattttgcatagtttaattttgtctcccattttcttattgcagttctccagaacagaaggacaaatggctctctctccttcaaaggtattttttttagtatatattttctaattctgtaaggtataattacaccttaatgaagtaaatgaattaaagttttttctgcaagaatgtgccccaagctatcccccttcaccttaatagaaactgttcatttgtcctcaaaataagctgtttaaactgtacattagctactgcttactgtaagtaatgttctctgattacatgtatttctttcttactaggaaggagaatgttgaggtctggttagatctttctagacagaaatttatcaataatctttcccatctctttctgtgttcccagcctaccatttggagctaacagtttcctcaaagcatgtattatttccgtttccattcatggaggttttctgctgagcccctcaaaattcaattattatcccaacctttgagcatatggactaaaatgatcaattgaggctcatctcttattcccatagtccttccgtccttcctctctgctctcccttcccaagcttggagaaaaccaaggtgtatagctcaatgagaagtaaaagcccattgttttggtttggtctagtaaagtagtatatatgctcctgtacttatcactaagataagtgctaagtggacagtccagaaaatgtagggaagtgttgaggataaagcatcaccaaaagatgtcttaactggactgtgcttcccaaacctcttttaaaatggatctcctctgttcttctttgtgcctatgcctaatgtcctgagaaattttttttttaattctcttccaacccataatgtaatctgactttgctgagtctttccatctgtctttttaaaaatagcacataaatatattgaaaatattagcaaaatagaatgctttaaaaataagccattagcaaaatccatctgactcagtgttgttttgggttgttgttgcgtttgattagatacatcaatctagagaaagaaaaggactacccgaagagcattcccctcaaaatcttcgccaaggacattgggaattgtgcctatgtaagtgtttctaagtcagaacattaaattctaagtccctgcctaaggcagaacacctggatagaaagagagacaggcaggcagacaggctgggtatgtgctgtggaaggtaggcatttagaaaaatacattgtgagaaggtatatttccctgggtatctgtgttgtacatatgaaaagtaaccctagagaaaatgaagtgagagaaattcatattaactcagtatttaacatttacacttggtaagattattgcctgtcagatgtctctgtccttcctctaacattaatgcttctctggatcttttcagtagcagccacagaggctcgtagtaaagacatttccacaaggagatatttcctattagtattaagcaagttttccaacctgtcacttcttaagttgagagtaagttttggaaagttcttcattctttgagtttttaggtattgaattcctcagcttaacaaatggatgagccgagagagataacatttttaatgaatcagcacagattttatcattttggtcaaaataaaaattaagtttgtttatccctaagtgttatatgcaatcttatgactgaaatatagtccaaaatgttgtcgataatgcacaaaatagaaatgagcatttttatgatactgtagattgtcacacttctcagcagctctgttttatcactcatatcctggcttcagttcgtgaatgatgtgacacacggtcttttgctcttctgaagttgctccatggcaagagtctccttacagggagccctgcttccagagtgattccccccacataggagtgcatgtatgagaggcattcattctccttggcctttagttatgcacaacttggttagtgaattctgctaatgtgggaaaaaatagccacatgctctagttaaattgctat

SEQ ID NO: 30073 - DNA, 1165 bp, Bovine  19866880527372
  misc_feature (1)..(1): n is a, c, g, or t
natgctgatgctggtggtctgtgcaccacactttcaatagaaaataaaaagagggtggcccatgccaggcccttcatggctctctgctctggaagcctttctgttctaacacttggaatcagcagcaaattctcctttcccatgcttttaggaccattcttaagcataagatattcaagcaattttagtttaatacttagaagactcagtttctagttaatattgtacatttaaaattttaaaataaatatatcctcatgaaagacaattggtaaaaaaataattttaatcatccacagtcttagcaccccaaaatataccctattaatattttaatgtatttccttcaagacttatttttctgcatagattcagttgtatatatctgaaatcatactccctatctcagcttcagcaaattgaattatgagtcctaactcttctaatagaattgggattctagagtcccagttcctctaatagaattagacatccacaggcttgccattctggtaaacagtgtccaattcttcactcccttctaatggaagcatgtactcattcttgccaaagctggtgagcagagggtacttcctgacaccttgatgttgggcttggccaagtgacttaaattggtcaaagggatattagtagttattcaggtatggcaaggccaacagatccagaaataaatgccattgaagagagagtttgttcgcttacagatctcaagaaaaggagacctaccatactacaggccacacagggtcagtcaagaggcagaaggaacaaggggaaaatgtgggcaagatctttattgtggtttctgtgggaaggaatgggtaaagcagcgtaagcagattgactatttttaatagtttcagtgggttctgtgttgttcctagttgtctggcacctggccctggggtgattagagcagggaaatattggccagaaatgtaagagctccataaaagagatggttggggtatggcctctatatccatttgcatatgaaaagcatactggaaaacttagttattcactgtctccaggaattagctaatcctgggaggggcagtccctccagggtcagcaaggcccccaaaatgctaaagcatcaaaaatacagaataaaagacaaagcaacatatgcaagcacagg

SEQ ID NO: 30074 - DNA, 801 bp, Bovine  19866880565747
  misc_feature (1)..(1): n is a, c, g, or t
nttaaacttttttcttttataaaatttctaggaaatgaggcatttgcagaggttaattggtatcttatatgtagaagcctttcccttgaaaatctatataagttgtgctgcagaatattggataagacaggagctaaggtacatccatacagagatgtggactgagggaataattagtgagcatcatcaattccatccccacattcccctgtgagaaatcagggaagagttacagactgcaatgaattcaggtcccctgggcccagcatatcttatgaattcagattcataaatgggtcagaaagatgggctcctactttctcagccttccatgaaacaccatgaaaaggtaatgcaacattctctttcctcctctagaggaatgaagaagaatgagatcagggacctttatctttaatcccaaaccatttgctcatccaaagatcattattatagttcaggaactatgatgaggatataaagaccagaatgtaaaatcccttctctcatgtttctagtattcaactggggaaaataacaacataaaaaaaaaaaaaaaatacagaattgaaatgcagtgtagcagaggtataagaaaatgtaacaggaaatagcttacagggaatcatcaaagaaggcttcacaaagggggtcactttttagtggaaacttgaaaatgagtaaggttctgaagggccccagaagttgagagctgagaggaaatcaaggtactttaaagcaaggctgtctattaaagtcttctatgatgataagaatgctctatatccgtactgtccaata

SEQ ID NO: 30075 - DNA, 1133 bp, Bovine  19866880592687
  misc_feature (1)..(1): n is a, c, g, or t
natgtggaacctagtaaaaatggtacagatgaacttatttccaaggtaggaatagaacagacgtggtggacacaggcagaaagagggaacaggatggtgggatgaattgggagactgggattgacatatatacaccaccatgtgtgaaatagataactagcaggaagctgctataaagcacaggaagctcagctccatgttctgtgttgacccaaaggggtggcttaggggtgtggtgagaggaaggtccatgagagaggggataaaagggatacatgcaccccaagtttcactgcagtgctgcttacatcatcaacagatgaatggataaagaagatgtggtacatatacacaatggaatgatactcagccattaaaaagaatgaaataatgccatttgcaacatcacggatggacctgaagattatcatgctaagtggaaaatatcatataatattgcttatatgtggaatcttaaaaaaaaatgataaaacagaaacagactcacagagtaagaaaacaaaggggaagggctaccaaaggggaaaggtggtggacagtgacaaattgggagtttgggtttgacatgcacatactatttaaaataaataaccaataaggacctactgtatagcacaggaaactttgctcagtattctctaacaacctaaatgggaaaagaatttaaaaaagaatagataaatgtatatgtataactgaatcactttgctgtacacgtaaaattagcacaacattgttaatcgactatactccaaaataaaataattttaagaaaagaaaataaaaaagaaatcttggtaattcttcctgacttcagcctgtcctctgttcctttatttcttcagcatctccactctggccagccccaacacctccctgctcctttgcggctgctacagtttccgtaccatactttgcccactcattctttctccattggtttggaagcaaataaagtggaatccaacgtaaaatgcactgaccccaacgtaacgagacatttcatactaataaagagaatcatccaaattttaaaattcttagaagaaaacataggcaaaaagcattggagattacttcatgtatgtgacaccataagcacggaaacaaaa

SEQ ID NO: 30076 - DNA, 1638 bp, Bovine  19866880632298
  misc_feature (1)..(1): n is a, c, g, or t
nacaagtgagtctctaggtaccaatttcaacatcattcaaagcaaactttcaagatgcgcatagtttttaaatatattcccatgtttatattataaatttaaagtgcaaatctcagagaggtgtaatgttttctaggagtttgaaaacacttgaaggatctgaaagaccagattaatctttttttaaaaaaaatcatttttactgattttgttagtttatgagcttaaaggtgtaatggaatctgattctgtcatttctgcttcttttgttattttatatcctatgccttgtaaggagggaaacttgtagcagcaaagtacatcaaagttaagctttgagaaatgatctatactgtatagataggggttttgtcctagaggtgctgaaatatgtccagtatcaacctgcaatgtgagaggaagagctcaccagccttgaccaaaaaggaagagaacaagataaattgggaagatagcactcaaaggaagaagagtgtagaagaaagaagggctgcaacagaagtggaacccagacactccactggaggaatgaaactatggttgaaagttgatcagtggcaaatgcaaaaaagtgttatgtattcatttcagtactctcaatgcattcatgaggggctaagacattattttttttactactaaggtttttctctctggtaacagaatcaatcactataccatgattccagacactatggaacctaacacaggacaacagaggcatagttattcctgagcatgagatgagagagaatggtacaatcataattaatttctttagggttgaaaaactggacaatgaattcagcaaaattatcccttcattttttcagcgtgagtgagactatttgtcaaatccctaaatgtcagtgaaaactgcttgaagataggtcatcaggacatcaataagacaatgcttctaagaactttctgaactcatggattctttatgcaattgaaacctcccattgtatctagagcattaaagttttgaaaacagaattgaataaattatttcattcttcaatacctaaacctctgcaaaactaggtgctccttctgtattctttgtttcaaatactttatttttaatataaatagtatataaaaatcaaaagaacttaaaagctaacagatatattttctttgtccctttgggattctttattccagcccacaaatcatacatgaaacaaagcagtttcttgaatattaaaatatagacaccatgaataagtctaaagttcaaatatagactcttttgtccaattatctgttgtggccagaaagacttgaggctgagcgctctcagctcaccccaccacatggaggagctctcccacctccaatgcagaggcttaagtctggtaaatggaggtggcctaagacacagagtggaacagcttctgatctttggttgtgcaagtgttcagttacagtttggggaaaactgcttcttggagctgttcactctttctccctttcccaggacctcaggggacccagtccttgagacttaggagagtctccagaggagcccactgaggtgtactgccctaggagtcctgctcacggcctgcatgcagcagccaacttttcacctgtagcacagacagg

SEQ ID NO: 30077 - DNA, 1422 bp, Bovine  19866880641443
  misc_feature (1)..(1): n is a, c, g, or t
nagagattaagattctgtagagatataaaataaaatataataatggaaactctgggtggagacagttttcatctgaaatccattctactctgtctcctgagaaatatctaggagggaccatgtgacttagttcttgaaaacaagatgtgaatagaagtagtttgtccataaattcctgcacaagggttctttcctttgttcttaatggctagaataggctcagaagccacactgtagatttacagaatagtactatatttgaaatgttcttctcagaattcttatataagaaaggaattaatttttataatttattcagtttaccatgatttttatgatatcaggtagcataaactcttaatagagtagggttcaattcagttcagttcacttgctctgttgtatctgactctttgcagcctcatgaattgcagcatgccaggcctccctgtccatcaccaactcccagagtttattcaatctcgtgtccatcgagttgtctcatcctttgttgtccccttctcttcccaccttcaatctttcctagcatcagggtcttttcaaatgagtcagttctgcatatcaggtggggttgcttgtgatgtttattctcttctatatggttttctacatgttccaaatttccattttggaaaaatagtaatatgcaattaatgcaatatataacaagtattatttttcaaatctagacaccttactccaatacttcttcaaagtaatgaattacaagtgttttgagcaggtattatttttctctttttcattaggactatattgatggggcaggaaagcagcagaaacttctagggccctgtcacttctgatgtcttctccatattttagagattcttttctaactaaaaagtttgggtgtagaatgtagtttggggcttaagccaaactgggtttgaaattacttctgagacttggataagttacctaacctctctgagtctcaatttagtgtgagtgaataaaaatcatcccgtggtgcagcacaccattatgaatgttcttatgagatgtaagtttcttttatttccttcatttagaaaaagttgaccacttagacaaacacttgatattgagaagtgtgtaacatacaattttgtctttttaagcttgcactttgaccaaaatttcacacttttctggaaaggagaattatagcattacatgactaaatatgtcactgaattcctctttcctgttcattttcccattaggcatctggccagtcaatttagggagggaacgtgctgacaggctttcaaggttagcacaatatccctccacccctgttctaggctatattttgcaaaatatagctgaagcagagaattgtgttgctctctcagtagaaattagagcccactttgtgtaaacacaattaaaaactaa

SEQ ID NO: 30078 - DNA, 3885 bp, Bovine  19866880657369
  misc_feature (1)..(1): n is a, c, g, or t
nggaaaaagaaggggtagaaggttgtctgggatgcccacaacttggatgtttttctgtatacaggtgggatgagaggggtcagtagaaattgcagaatatgtgcatagttccagttctgtaagaaaggataggaaaagtctaaggcaggaaaaagaaacatatataatgtgtttccatgaggctcctctattaggtcggttttgctcattaatagttggcaccacttgccaattgtctcctgtctgctttcagcagagcagtccccactggagatgggaaagcttcagagtgaggcagcattccttacgtctccctcagtttctggcagcgttccttttcctgatgtccggccttcctgcgatggtaacatactgacttttcattgtcaagtctaccttatttgttggtaggcccagaaacgtgtttgctccctgtgtgcataactctcactaggcaggtagcactgcattcttgagtttctttttgtcttcacctttctccactccccctcccccccgcaactagataactgttgccagtacctgagtaactgtccctgatgtacagatgtacgtcccctgatgtacagataccttttctcttatttgtgcttgaattccagcaacaaagctaccatggaagtggagaggattagtgtctattctgattcacccctgaatccatcccctttaatttagaaaatgcctctgtgaaccactgatggaatcactgggactcacatagcagcagctctgcagcttctcccacatccccttttgcagaaagacttaaaagtctgccatcagcagtgggtgtccgaggcttgaggatcctcctgagtcactggagaagagacccacggccatggcactccattcgccagtcatgcctgttccatcagtcaggtgtccatcctcacacacgtggctgtaaactgaaacccacaccgcagaaaaccttggcacattattgcagatctttctagggctctggaagataactcttaaggtagacatcagctagagaaaagggttgtggtgtcctcacccacatctgaatccacccagcagtactaaattctaaaaagcattagagtccctggagctccaaagggagaaggctgattctctccacatttgatgaaaaccaagttggctcatatggccctgtagtttcaggctcatgctgctgttttgcagcctgactccttttgtttccccttccttccaagttattagggcaactatttgccaacctgatgccttaattcgccaacctgatgccttaattctaggatagtttcttatccacattctcagactccttgttactttctcttgatcatttctgcctccctagctatgttttgcatgttgaatgtagggggagtcttggaggtgaaatccataccagaacattcaagtaagttatccccaaatcctaaagcccttgggaaccatctgtccaagaagccatcatctcctcttcccaggtcccagatgagcaaagaagactgagggtgggagcttctactgaggtggaagggagcaaccgcagagaagggttgagaacctggagaaagacaaaggtgctttccatttcttaatctcttctttccgtttttaaattcattcttactggctgtccagttcattctttcatttatttcctgagatccagagatgctaataatccttttaagtagggtttttctaaaatttggtataaatataccaatttgtctgcttcagatgagccttcctctagccactgcaaagcaagatttttctaaacatgcctattccaaacatgacagagtaaaataagccctttcagaaagagatccactggcaggctccttatatttttctgcattaaaggccaggtttaatcacacacaaccttcaaggtgtattatccattttgctcaacaggaacttagaattagcagtgactttggcattttccctgggaaaccaatcccactgagcaaaagtagtcgaaaggatactttatagcaaacatccagggtcttttcctaatcaaaagtggccataaatcttctgagtcaccaacaggacttgcttgcggtataccatcctattgccaaattgttgaaataacaaatagaggcccataggatcatgccaattcataaatagagaattagctatttttactactaagcaaaaaaccccaaatgcatacacatatagcctgtaagtgactacagaaccgtgatgaatttccttctctatttatatggcactagaactacagtttgtaaacatcatcctacttttttagtaaacactcaacagacagttaatttgcactgatagctacattgtgttcactctgacatcctgtttttcataacttttttatcaagatcactctgtttttataattctttatcagagcctccctcagttgctccttatattataaccagcacatccttcaacacgccccatgagggtaggtccagttcagtctcccccagcctctcccggtctgtggaagtcccatctgcagtttggagtcacccagtagctgctcactttcctgttactaggaatgattctgggccttggcagctggcagggacttccaaagcaacagcagccattccaggggtttcctagttagcattcatttctttggcctgttcaggaaaggactggctggggaagtattggacacccagggaccaaccctacacgtccccaggtgcctgtccctttccccaccctagccataaaagagaaagaagacggtagcctgccccaatgggagatctcaggctggccaactgctgagtactttcagtccgatttcaaggtaccactggatgtggaattactatgttgagagaaaacacggctttcaacttgataataaagtattcccaaattgccctcctgaatagtcataccaatttatactcccacctgtaatgtatgagttacttctgtcacacatccgtggcaacatctggtgtttgcagactttatttcttcccatatgatgggtgtgaagtggtgtctcactttggctttaatttgcatttcttcaccgttgagcttttttcatttgtttgttggtcatatgggtttcctctcttgtaaattcactgtttatatctattgccttaaaaaaaaataaaaggggaggattacccttctcaatgtacaggaatactttatgtattctaagtactagtctttttatcagtcctgtgtattgcaagtaccttctcagtctatggcatttttattttgtttatggaatctttttcacaaagaagttttatgtactcaaatgtatcattcttttccttggtagtaaaaagaatttctctatcttgatatgaatgtgtcctgtaatttcttctaaaagtgttacagtattttcatatttaaatctttgatctatatacaatttatttttatgtgtggtatgaggtaaaagtacaattttattttttccacctaaataattgactgccctagtaccatttgttaaatgatccatatttttcttcatctatctgtaatgtcacttttatcatttatacacacgtatagctgaaagtccaatactttggccacctgatgtgaagagctgactcattggaaaagactctgatgctggtagagattgggggcaggaggagaaggggacggcagagaatgagatggctggatggcatcaccgactcgatggacatgagtttgaatgaactctgggagttggtgatggacagggaggcctggcgtactgcgattcatggggtcacaaagagtcggacacaactgagtgactgaactgaactgaactgatatatgtgtgcgagagagatcgatcttaggttcactttt

SEQ ID NO: 30079 - DNA, 909 bp, Bovine  19866880673007
  misc_feature (1)..(1): n is a, c, g, or t
ntggcagtgcacctggtgccaatctgtggctccacagtcaacctcatcaaccacaaatgtcttagatggttctccccttccagttatataattggatccattgctcatagtcatgctcaaaatagaaacagacaacaagccatctgttccacatctccaagttcttccttagcataaagcaccatctctgctgttcattgttaccatggtaaggtgcacccacagtaacaatgaactgtgtgacctcagagctgcccacttagctgcctgagtgacactctgactcagtttcagctccttcgccagctcttacccagatttgggagtgaagatctaatgaaaacactttctattgtctggaggcactttctttgggctcatttaatgcattttatggtgcattaaatgtgtctgtgcgaatggctggatttgttttgctcaagtgtgaagaataattaagatcattctaagtcaaatgaagtgttgaaacacattgtcaaaggacctcagcactgtaaatgtctcgttacctctgacactttgtaattaggtctgtcactgttctcttaatttccaccgaaacattatattccttccacaccatctctgcctccttgtgtgtcaagaactcctcccattacacatacacatctgtgatccaggtgtcataaacatgcatcaggctgatgagaaagacctgtgcttggatggtgaccagcaaatccatgaagcctgtctgctgtctcatccatgggcaaaggttagggtgcagttgtcaagagaagacttacctccacagcagcaagacaaatggcaaatgtgtctcctctacccaggccatgtacatcctccttcacatggtgacaggtgacctgctggtctggctgagttatcttcctcttcctcagt

SEQ ID NO: 30080 - DNA, 1242 bp, Bovine  19866880754085
  misc_feature (1)..(1): n is a, c, g, or t
nttcttcccggctattcttgcagacttttattcttccaaattttaaaactgttttcccaagtccccaaaggattccattagaattttattgggctgtaataaacttataggttggttttaggaaaaacggacatctttacaatgtacgtctttcaagccaagaatatgacatgccttttttttttttttttaatggtccatgctatgcagcatgcaggatcctagttctcccaaccagggattatcccatgcccctcagtggaaacatgaaatcccaatcactggaccaccagggaagctccctgacatgcctatttatttatgtaagttttctttctcactggacacttattcttagtgatatgaactagtttcttctcaaaaggataattttgtttttgttgttactaacctttctgtgagaagcaagttcaacaaaatgaaatcatttcattgggttgggtcaccaagtactcttgacagttagcataaacacatgggtgtattgttgaaaactgtgttgtgatgattaactattcaagattccaggctgggatttttgttgaactgaatatagagaaaggtcagttgaaaaaactgcttggaagactcaagacaaccagaaaccaccaatgtatatttttgttctttgcctatgaaggatttctttttttaaaaaaagattgcttcattatttcagagcagagatggaggctataatcttatcttgaccacatatttgtggcacacctgagaattgtttgcataaatgcatgggctagaagccatatctactggtccaaaacctattctaaaactgaccagacagtaaagaagaatggtgtgtgccaagttatttaacaaagcttgcaaagaagtcaccaggccgctctctttttccttagtgttttcaatgcctaacacaatgtctcatatatacttggtgtctaatgatttattgaaggaataaatggactgttcagcaaggatttatctgtgtgctttttaaggtgaaaacttaaagagtgtaattggcttggttaactgccatcccctctgctccatgacagctccaacagcctctggattggtagctgagactgtcatgacctcctgactttgctcccctgacagtctcttccagggcctgcttttggagcttggtcagctcctcgtagttcaccttccattccagtggtgggtgttccccaaaagccaacttactgttttccttcccaccag

SEQ ID NO: 30081 - DNA, 657 bp, Bovine  19866880767720
  misc_feature (1)..(1): n is a, c, g, or t
natggggctgctgctgctgctaagtcgcttcagtcgtgtccgactctgtgtgaccccatagacggcaagcccaccaggctcccccgtccctgggattctccaggcaggaacactggaatgggttgccatttccttctccagtgcatgaaagtgaaaagtgaaagtgcagcttggctctaaaccacccaaagaaaccggcagccagcctgggatgtgcctactttgtctgcccatgaacagctcaggcccagcttgagggagatcaggctagggagaaggtgttcttggtcaccactctgctaccacaccaaatacagctcatcactgagggccagctaaagatatattattttaattttgcttaattattaaaacatgaaagctcattgttgagttagaaaataaagaaagaagaaatcattaatattttaataatgaatatttcattatccttttttttttacatagttgagcacatacaatatatgtgatttttgtttcctgcttttattactttatatgacatgaatattttcctgtagtgttgaggatactttgcatccatcagttttaatgactgcttaatattctttgtagtttgtctggccattcttcaatgggtggacatttaggttatttcctgttttttcaatataa

SEQ ID NO: 30082 - DNA, 962 bp, Bovine  19866880782370
  misc_feature (1)..(1): n is a, c, g, or t
ncacacacacacacacacacacactcctaccttatgatgtctctctttgtacaaaaattacaagaattaagctgccagctgtctcactgagagctttcactgtaattatttcattaattttatatgatgtacaatagtaagtttatctgcacagttaagtatttttgcaattaaaactccatcagacttttcagaataaataaatagagctcattctctctcatgtaagatcttttgtttttaactttgtatattgtttttgcactgtcattaaaacataacttcacaacctagagtgaaagtgacccagcttagtttgtgaaccagaattcacactcaataaatgtttgttggatgaaaatatacttgatagacaaaataaaacaaaatccaatatgcttgatggtctgttgatggatgagatgggtactacgttccacattctctatttcctggtagtggtctcttaattttaagtagaagttgaaggcagaagctggaggaagtagacactaagctaataaaagtcctacaaataggaagggatgactagagaaaataatgcaaaacaactgaggtttctagcttcatggggggttgatattttgggaaattgtgccaggcaaaagaggcctgaatatcattgtaaagttattcagctcagctcacctcaatcattaaaacacacaaatacaggaatgaaaataccaatgttaaactatagtgatctctgagatgcattgaatctcttcctttaattaaatttatattttcaaaaaatgttctctgaaaacctgtgtgtgttttactactgaaatcacatttgagcaattgaattattatagaatcgttactgcttctttctctgcctctttggtgaacattgagatgaaaaagtaatatcaaacggtatctgaaaaaagttatggttgaggggaaaaagtaaaggtctgagttctaat

SEQ ID NO: 30083 - DNA, 983 bp, Bovine  19866880832481
  misc_feature (1)..(1): n is a, c, g, or t
ntcactaaataccaacaaatccgtgtctattctcaaatcttttgacttgttctaattgatctgacattcccataacacatgcagtactctactggcattccacacggaggttattcgtaaaattgaaaaatgaaaactgtctaggcactgatcataatatatcccatgaggagctatttgcaagcaagatattacttcctctcttacagaataagtggataacttgtaggctaccatctgctcacaattatatcataaataattaaacattaaaggaatatttattaaaataaaaatacaagaatattttgtgtttgccagagagtgcaaataagtttcatctcatatacaaatgtcaatctgaggtcatgtctaggttcaataggaaagaatgttttgatggaatagtaagatctgcaatgaacacagacaggtcaagtgtcagaaatttactatccctggcatagacccttgggggagattacaatggtttgtgttaagtaataatgggcagttttcatgctagcatagcaaaaccaaaagaggtactattggcaattttccaaataagcaatcaagtgaaggtcaatgaccaatatcagtactgttagactaaatttaaatttcctgggaatttgcaatcttccaatatactgcctgaaaaagtaataaatcaccatgtttataactgtttgtccttggggtttacatgatatgggcttagttcatcagttgtgtttgatctaaaagttaaataaatattttcttcaaaaatttgctgtaagatctataaggcaggcttctatgttccatgaatatatattaatggaagaaagaataaatagacaagctccaaatggggaaaacactaaaagtttatgagtgggtatatgtcccaagcagaacatagaaaaaaacattctgaaattcatagtatttcttaagttttctgtttcttgaggaaaagccagagcatgccagat

SEQ ID NO: 30084 - DNA, 1921 bp, Bovine  19866880844053
  misc_feature (1)..(1): n is a, c, g, or t
ncagatttatttgtgatccaaatgtttgaggattattgtgttcttacatggcaatacacaatcaaacaccagatgctcagcattcaacacaaaaaaggcagctgaacaatctgatctctttcatctgataaattttgataactaagaggctgacacagagccctccgtgtggctcagcctgggctcccctcatacatgatgccttgcaagcatgcctgaagccatctctgaagttgttcaagcagttggggtgctgcttgcatatccttgcagcatttgaggtgtggaagtctgagtgatgaggatgggagtgacaggagttttgtttacttagctacaaactgcagacactgaagcactagcaaccaaagcccaaaagaggaacaaaagaaatggatgattccagagaaagcctatgagacactgtcagatatttcctccaatgcttttaagtggaattatacaaatgagattggaactgttttacagaagctcaaaaataacagtatgtttacaaagaagaggaatgtcataaaatcatctccatctatatatatggaaaaagtacatatttcttctgccacaaaatgccataagaaaaagcattataatattggtgtagtagattgtaagtgcaatcatatttcttgacatttttagcaagtgtaattagtatttgagtatacactactgattgctaatctcatctttaggactctgtaggagttagaaaacgggtgccctctgatgggataatcagcccacatgaaaaatcatcatacttgtgtttcctctctctcacttctttcaggtcctctcctctccagggtcccagtgcttcttagaggtgcttaagtttctctaataacaaatgaaatcatttcctatattgattcaccctagtattttactgacttcctgcttcccacctgtgggaactcttgcatttgaaaataaaacgttgcttgtggcaaccatgcctaaactatagaaacagatctcaaatcatagcatttcagatgtaatggcacctgttgtatttaagtttgatgacagaggaagccaacaaccacaacgcttaagtaactattctacttaaaattcaggcatattatactgtatacacagctttgtcttctctattaactctattactcctgtgagctgggttcaagactaaattcagctgatatcataaatctcagctggtggttgactctaatgcatgctttgtagattcattccctaatgagtgaagtctggtgtgattttctggaaatatggctttgtgcacttcctccatcagccttcattttcccgctcatcagctttggcagctaattttgcagtctgttttgatcactttggggtgagctctcagcactgagccttcacaccttagcaactgcaggattccatgtcccacagagatatttgtgagggaagtctgactcagtttgttagaaaaataacttttctgatacacaacaaaattgatgtaattctactcacaccgggaaccagtggcaaaattaatgaaaaattgcttttcagcttttatttctatttgcctatgtgtgaaaattcagaatcacttagcaattgttttgaaccaaatagatcaggggaaagttgaggacacactattcttttcaaggggataggaaagtctgatttggaagagaattgcttataagttcgattagatcctatttgtttatttttgcttttattttgtttgccttgaagactgccctaagaaaacatctatctgctgtttatgtcagagaccattttacctatgctcttttataggagttttatggagtcatgccttgtatttaagtgtttaagctatttgaatttattttgtgtacagtgtgagagaatattctaatttcatgatttaaatgtgtatatt

SEQ ID NO: 30085 - DNA, 2697 bp, Bovine  19866880867489
  misc_feature (1)..(1): n is a, c, g, or t
nagtttttatttatcctacacacagaaaataaaagcatatggtcagtctactctatttgggaattctttctaagtcttctaatacctttagattttcttttctctatttttagctgtgctggatcttccttgctgtgtgcaggcaactctgtagttgcggtgctcagtcttctcatttcagtggcttctcttgctgtgcagcatgagctctaggcaagcaggtttcagtaactgcggctggtgggcccagaagttgcagcttgtggcctctagagagcggtctcagtagttggtctcaggcttagttgctccacggcatgtgggatcttcccagaccaggaattgaactctgcattgcaagggagattcttaaccactggaccaccagggaagcctctaaattttcttttagacatttatatctctgatccagttggagtttgttggagaatgaagcttctctgatatcccaaacactaattaataaatatttttctttctcccttaggaaacaagggtgaatagctcttaagaggaaaaaaataaataaaacattcacgtttgtttttctacactaaatacaaaagtatttaaaacaaaaattttttaaaatagatataattttggatttttgtcttcactcactctggattgtgaagtatgtgagtgacacgcccatctgtgcgtggagaacagaaaaccccttctccagtatcactcatctgatgggaacaccccagcctcatgcatcaggatgaaatattacaggcactagtattactcctacagacagacaatactgggagtagcgagtgctacccttcgcttccttctggctttctagtctccttggaacaacatcctctgaggcctgtgatcctgtccctgcaaaacatgtagtgggtggtcgaagacaaagcaagacaggtccctggacagacttcccgggaaccacaggcctggccaaaccccaacctgagcctgaataagagccaaatgctcacattttcacctcatttgtgacatatcctggggcaaatagccaattgcctccatggcaggaacttcctttgcaggctacaaataaggatttttctatctcagccttcttttaacttactttaggaaaatttagagtacatcaggaataattgttttcttttaaagcactgtaatttagtttctttctggactttgagtgtatgagtcacattttgcaacagcaccatgagatgcaaatagacaaatattttttctgaaaactcgattttcaagctagatctttcattcctacttgttagttttagtcttaatagtgacgttcagttcagttcagttgctcagtcatgtccgactctttgcaaccccatggactgcagcatgccatgcctccctgtccatcaccaactcctggagcttactcaaactcatgtccattgagtcgctgatgccatccaaccatctcatcctctgtcgtccccttctcctcctgccttcaatctttcccagcatcagggtcttttccaatgagtcagttcttcacatcaggtggccaaagtattggagtttcagcttcagcatcagtcccttcaatattcaggactgatttcctttaggattgactggcttgatctcctagcagtccaagggactctcaagagtcttctccaacaccatagttcagaagcatcagttcttcagtgctcagctttctttatagtctaactctcacatccatacatgactactggaaaaaccatagctttgactagacagacctttgttggaaaagtaatgtctttgctttttaatatgctgtctacattggtcatagcttttcttccaaggagcaagtgtcttttaatttcatggctgcagtcaccaactgcagtgattttggagtcccccaaaataaagtcctttaacaggtcctgccacactcagtgtccccaaccctgcagcaggccaccgctgacccatgcctccaccggaaactcctggacagccacagacaaatctgggtcagtcttttgtggggccaccgttcctttctcctgggtcctggtgtacacaaggttttgtttgtgccctccaagggtctgtttccccagtcctgtgtaagttctggtggctctatagtggggttaatgacgacttcctccaggaggtcttatgccatcccaggcctattgcacccggagcccctgcccctgcggcagtccactgctgatctgtacctctgcaggagactcttagacacagcacagtttaggctttagcatagtttaggctttccttaatataatgaaaaagaaaattgattatgatatcaaccatgggtaccataactccttttagggaagaaagtgtatcatttgaataaataatttgaagggcttttcaagcttggaaaatttttggtcatatctcttcaaatattttttcagttctcctttttgcctttgaggactctaattacacatgcatgaggttgctcaaagttgtcctacatctcactggtgctgttttcatttgttttattctttttatacccgttcttcatttttcctagtttctgttgctatgtcttcaagtgcattgttttttcctttctaataactgatctgctgttaatcacatttcatatttgcataccaaatatctttggtattttaatatcttgaatgactctgccta

SEQ ID NO: 30086 - DNA, 2840 bp, Bovine  19866880883098
  misc_feature (1)..(1): n is a, c, g, or t
ntgagagctgtgaagagaaaggactggactgaagaactcagagtgtaaacagcaaggctagttaagaaagtgaatctcacacagaagctgacagtatgctgggctcagagggaagcagcagagatggcaattggtatgcagtttttaattttatttacaggtaaaatcaacaagatctcggaacggactagtttggggcagaatggaggagaggatagggagagaaatctaaatttttggtgtgaaccatttttctgagatggacttccatttaaaaaaaaaaaaaaaggtttatgagaataatacaaaaaatttgattcaggcttgttaaggggacattacctactagacagaaaaataaagatgtccaataaggagttggatccttgagtctgagcttaagataaagatgagggatagaaatatgggtataaaagtcacgaatacacagccaacatttaaaattagtgtgtaggggggcaggtcttcactggtggctcagtggtaaagaatccacctgccaatacaagagacatgggttcgatccctagtccaggaagatcccacatgcctgaaggcaactaagcccatgttccacaaactactgagcagaggtgccctagagcctgggctccacaggaagagaagcgactgcaacgagaaccatgcaccacaactggagagtagccctgctcaccccaacaggaggaaggcccatgcagcagcaaagacccagtgcaaccaaaagtaaagtggcaataaaaaagaatgcaaaaaataaaaagatccacctgatgaaaaaacatcccaccttgccaaagcacttacaccagtttgactgtggtggctaaaagacatttaagggggagcttttcaacattaaggcagtgtgataccatgcttgattttctttttcttttgggccagggaatgaagaacagtgctctatcacctcctttttcacatttttcattttccgtttttttttttttttctgttgaagattaacactaattatcatgtctgacaaatatgtatgtatgatttaagtactttgtacattttacaggatgatggtgacttaatgagtgtttaggtagagcactctttccttctctttccacattttagctccatgtatttccacattctctctcattctcgttttctcagtgtgtacttttcataccttaatatgccctctaaccgtagcactacatgttttaatcattggcagtgattaaaataagcataggtgaaaagtctttgattattgtgtagaagatggctatgaatcatgaaaaggattagaaagtttaatagtgtagtgtacagcttgtggttaattttttaaatctcaatttaaaacattactggattttttaaaattacagtcctctgacacctggattgattggtgtttcatctcctgtcatcctttggttttctttgcccactgatttcacaaagatatagacagcaggtagtaagtccctaggaaagtttattgatgaaacactactgcaaataacagttgtctctgaaatatttcatagactgattagaaaaacagatatttaataaaagaaattatacacttgttggtaaaaaaaaaaaaaaaaaaaagaagctttagcaatattgggggggaaaaaaaactcagatgtaggctacacaggtttaggtcaaaactaaacaaaatttaacacctgtgcctttcagagatgatgtcaataaaatcatgtgactgccatatcaactaagaagattataattagagaaggaaagggttcagcctcaagtctactactattcagagaagcaaaaaaagaggggccaagagaggagggtcttttacataagagtaggctgctaagagatcactggattaaacaaacagaagttagaattaattggtaggagcaattcaaatggagtggaagagagaagtcaaggtcaaatgagaagaaatggttgataaagaagagaatgtttaaaaaaaataaaaatcaccagcgactgctagttgactctcattattctaccttcctcttccttttgcaaaattctgctgagcacattgttgcccaagataaagacctttcctaagccaggtgtggctatgactatgttctggtccagacacaagaggtgttaggtacaacttccaagttaagccccttaaagaaagctcagttggagaaagccctttgttcttttccccctttctatttcctgcttcttggaatgctgttctcatggccaaagttacatcaggcaccatggatagtgaccttgagacagaaagtaggtatattcatagacaggaaggaacctaagttgcctggtgaaaccaccataccaattctggactgcctacctccaaactttttgtatccaagattataaatccttacagctttagcaactgttactagcagccaaaccaaatctaatacttttgtatataatagttttgataacacaatattttttttttttttggccatcaaaacttcataaatgttgttggcttgtcttttggaactgtatgtatataactgagaagtttgcagtcagctagatacctgcctcccacttgcccatgttagtcagattttcattttggccaggattccaaaataattctcttcttatttctgaagttaagaactaccagggtgtagtcagtttttcatcgtttcatgaaatttttcctgctgtttagagtctttcagcctgcaagtgttacttttaatctcatacttttttttttccttttttttccttaaatctttttctgttccgtttgttggagtttctattttgggaatacaagt

SEQ ID NO: 30087 - DNA, 2095 bp, Bovine  19866880926881
  misc_feature (1)..(1): n is a, c, g, or t
naaatacttagttcatctaagcctaagttagaaaagtgtaatcacctgtgaaatggaactaattcttcaagggattattgctgggatgagatgcagcgatgtgtgcagggcatctgacaccatgctaggggtctgggtcgtttcagtctgcctgatcctctctcccacctctcccttctgtccttcagcaccttctcctggctcccacctgcctcatattgcttcgcaagattaatgttcttaaagcctgttgtaaaatgccattgtgatcgttttcttaagtccttacaaaatcccgtgagaaaaggaagaattaattagaacatgctaggcccaaaacttgtttgaattaaatgcaagttcagcttgaaacattttaattttgttttcattaagaaaactgtttgtactgattttttttatcctataaatgttgaatcaaaatatttggattaaaatctcaaaataaataccttagggtgaatattctttacactctgtctttagaactaaattgtcaaccttctactttagatataattttgtattatgtccatgacaggttcatgcctccagatgaccctcttggcagacatggcccaagcctggataattttctaaggaagaaacctattgttcctgaacacaaaaagcagccttgtccatatggtaactttctttatagtatctaataaatgcctttaagtagctcaaatggtaaagaatctgcctgcaatgcaggagaccgggttcaatccccacgtcaggaagatctcccagagaagggaatggccacccactccagtattcttgcctggagaatgccatggacaaaggagcctagtgggctacagtctgtggggtcacaaagagtcggacacactgagcgactacactttcagtttttttcactttaaagcacaatattaaacatttgttattaaaaataaacataaaattttggatggcatatagtatgcggttcttttgaatgtattaaattaaaaaaataataattgtttttacctagttgggttcagtgtatattcatttcccctgaattaaagcactgttctaaaaactcagataaatcctacatgaagttagtttccaggtagataaaaacttggagttcttccatctagctgcatatcagattagagtggctttatcacatcacagcagcacattttgctctgcaaaacaaaatgtcctacctgactgcagagttgtactggaagaggagaggcgggtaggagttgaggacgtgaaaggaattattactcagtcagctgactttcttattgctcttgatagcactgacatgggaagactgaaaggtggcatttctcagaagcagggagcagagtggccttgagcacagctcccattcctgcgcttgcttctttcttaaaagtgccacactgagtgtttaggagctggcggaatgctccttttgcctaattgattttactcttcataggaaagaagtgtacctatggacacaagtgcaaatattatcatccggaaaggggcagtcagcctcagcggtccgtggctgatgagctgcgtgccatgtccagaaacacagcggtcaaaactgcgaaataaggaggactggtgaaaagcaacagcgtcccctgcaacactaagggcgacagcacttctgatgtcaagcgaggtgctccaaagaggcaatcagacccaagcataaggactcaagtctaccaggacttagaggaaaagcttcccaccaaaaacaaactggaaaccaggtctgtaccttccttagttagtataccggctacttctaccgccaaaccccaaagcactacatctttaagcaatggccttccatctggagttcacttcccacctcaggatcaaagaccacaggggcaatatcctccgatgatgatggcaaccaaaaatcatggaacgccaatgccttatgaacagtatccaaaatgtgactcgcccgtcgacattggatattactccatgttgaatgcgtattcaaatctgagcatctcaggcccacggagccctgaaaggcgtttctcgttagacacagattacaggatcagctctgtcg

SEQ ID NO: 30088 - DNA, 2359 bp, Bovine  19866880971186
  misc_feature (1)..(1): n is a, c, g, or t
ntttgttggcaagtatgtgtctgctttttatgtgctgtctaggttggtctaactttccttccgggagcaagcttaatttcatggctgcaatcaccatctgcagtgattttggagcccagaaaaataaagtcagtcactgatagtctagttctcagtatagaatgtactatactttccataataaatcgtactaatattaacagaaaactttaagcaggaaccaaatgatataaaagtatggtgagtgttaatatgaaaatagtaagttattaatctaagataccccaaatcaaggttttccattattttcttattggagaaagaaatggcaacccactctagtattcttgcctggaaaatcccatggacaggatgccatttccttctccagggggcttccctggtggctcagaggttaaagtgtctgcctgcaatgcgggtgacccgggttcgatccctgggttgggaagatcccctggagaaggaaatggaaacccactccagtattttcgcctggagaaggaaatggcaacccactccagtattctcgcctggagaattccacggagggaggagcctggcgggcaatagtccatggggttgcaaagagtcggacatgactgagtgacttctgagagagagaaattttatataaacatgtttctttctttctgttttttgtaagcagcaattcagtaattttctttgtatcatatttagataattgagaattcatgtatagtattaaacacagtctcttcttcctgaaataaaaataacttgacttctttagttgcattttcaattctccaaaaactgaagaaacagtgaaggattggcttcctgaaacttaattctaagcaacaaaaggtatttaggatgggcaagatttcttaagtgacaattaattggttatacctatattttatatttcgattcaggaaaacagtcaaaagcagagaaatctgatgtttattattcttggataaaagcatgccagggaccagtagaaggtgttgtaaacacgtcttgactttcaagacgagtgattaaggatttgtttaaaagtgttaacatggagctaaaagaatgttgccctctcattctctcagactggaaagacaggaaattctgggaggaaaaaacatcctctggatttgaagatattcctagagaacagtgttctctgggggaaaatttaggcatgatttcatgagtaaaccttcagctgaaactcagaatcctttttcagagaggtttcaaagacaagctgatttgaccaaacatgtcaggactgccagaaatggcattcttatcagagattttttgaagtagtatcaaaaaaattgttttaatgtcgatttaaaattggaggacaactcattttacttagtctcttattctggttttaccaagataccatatttattgctatttccacatttcttaccattcttcaaaagttaaactacagatgttaatgaaatgtccttgttgttgttcagttgctaagtcatgtctgactctttgtgacccaatggactgcagccaacaggcttccctgtccttcactgtctccagagtttgctcaaactcatgtctattgagtcagtgatgccatccaactatttgattttctgtcaccaccttctcctcctgccctcaatcaggatcttttccaatgagttggctcttcccattaggtggccaaaatattggagcttcaactttagcctcagtccttctaatgattattcagggttgatttcctttaggattgattggtttgatctctttgttgtccaagagattctcagaagtcttttctagcactttattttcagactagactctagcatatgataatcaggctgttatattcatattcttaacacaccaagttaactgaatcactgcttaactgaattaaccactctaaactattaccactatgaagcaaattatatttgttaaaagaacctatttcttatcaaagactcacaaatataattacatctgtttttctagtattatttcttactttccctctgaaatagatcctatatattaaatttaattaatcaatgtattagtcaatctggaaagcatacagttctctaggtttttatctctcatatctcctttgcactcagaattttttacactacatttcataaattgtttatggattctactttacctgcttttgatatttcactgtctccttatggcctcaagttcttatgaggcccctacttttatggcctaaaaactgattcatcattcttatgctgaaaaaactcatccttctgtattcttatggtactagattcgtgtcatgcttaacgacgtattttat

SEQ ID NO: 30089 - DNA, 1323 bp, Bovine  19866881019077
  misc_feature (1)..(1): n is a, c, g, or t
ntcataaatgcctcttctcaatctggtgggttatctgtcggttagttccatcttcctttcaaaagaggagcaagcaacccaacctggtagatcagtagtactgcagggattggctcagagttgggcattatatccagaggatgagtgagtgagaaccttattcagacatttaatatgaagcctaggagaaggaaaacctcttttcttctgagataagagctcttaggtcttcctctaaggcaagtctttttgaccatgtggagaaaatctgcctgagatggagctaatgcagaggggaagtaagtcaagtgatgaaaaggagactgatgactggtaacattcgtcaggccagtgctgaaagctagtgccagtacttggacttttcatttacatgactcagtagggtctttttgattttggctaatttaaattgagttaatatcataactaaatgtttccttcataagagggaactttatctttgttctacagccatctctcctcacctcacaccaagttaatgatttcagagcttagcttaaatattattctttaggaaggtgcttcttaatcctccaaacaagataagctatctatgttacggctatgatgacatgattcttttctgtctttcccacgtgattctaagctccatgaggggacattgcagtggcctccagtatgcttggtaccttgccaagtgcctgataataaatatttttgaatgaatgatttaagagagaataacttgatgtcaggcactgtgctatgtgttttgacatatattatcacatgtaaacttcacaacaatctggtggcagatgctctgtgatccatttacaaatgtggaaacaagcatggatatgtaaagaaacattgtcaaatgaatctaaagagagagatccaggacataaagtgaagtcttgttccaaatgcagaattccttttctcatgctaccttctaagaacctcctaaatgtctatttgcactgtctcttttccctacaaaatgcttgtcttgaaagcattccctatggtattatgctctcttgagcgtgcgtgctcagtcgcttctgattctttgtgaccctacagactgtagcccgccaggctcctctgtctccagtcaagaatactagagtcggttgccatgtccttttccaggatattcttttgtaccttttatttaaatagatggttcagtaggtttaacatattccagaaatattttcatctttaccttgaacacttgagacataccctctttgtggctccctgtccccctgcaacaaacaagaaagaatatcctttagagtaatgggt

SEQ ID NO: 30090 - DNA, 1274 bp, Bovine  19866881037769
  misc_feature (1)..(1): n is a, c, g, or t
ntgggaaacctgaactgtacatgcgaagaaggaagcctgacactattgaagtacaacagatgaaggcccaggctagagaggagaaacatcagaagcagttggaaaggtatggagtttatggcctttctttttcttaatttttgactgctgggtcttgcagcacatgggcacttctcttcttttgttgtgggacatgggctctagagcacccaggctcagtagttggggtgcatgggcttctctagttgcagcacgtgggcctggctgtcccaaggtacgtagaaccccagttccccagccaagtgtcaaacctgcatcctgtgctttggaaagtggattctttaccactgggccaccaggcaagtccctggcctttcatttttagttgataccagtaggttatctaaaatttaagaatcctcatcagtttctatagtatactctaaatttacatttttacattatattcatttaataccatgatatatggttgaccaaaaaatttgtccaggtttttccagaaggtgttacgtattaaaattgaatgacagcatgtgttatcactgtcctcttttaaagtgagtgtgtataattttcaagttagaaatctttgatagatatttctgagaaaatatctttttgagatttcacagatatgcttttcctgtattgtgcttgctttttactgacagactttggtgtggacatagtatgaaatttcaagtttgttttgcttgtgacttgtgtgtcttcatttttcagggtaggaatatgctgaatattttctttgaaacggtgtcagtgacgtgacgtgagtagtcactattcagagtttagtaactctggcactccctgtcagtgacactgatcttttaaaccagggttcacttagactttcgaaaaagatgttaaatatattaaattaagacttctgaaacataaaagtattgaataagttcctcgtttaccttggaaccacattattggctccagcactcataattcccaaatctgattctatactaatttagactttatgctttatttgaaaaaatttagagaccaaatttggagaaggcaatggcaccccactccagtactcttgcctggaaaatccatggacagaggagcctggtgggctgtagtccatggggtcgctaagagtcgggaacgactgaacgacttcattttcacttttcactttcatgcattggaaatggcaacccattccagtgttcttgcctggagaatcccagggacggggaagcctggtg

SEQ ID NO: 30091 - DNA, 796 bp, Bovine  19866881086877
  misc_feature (1)..(1): n is a, c, g, or t
nccggacttctgtgtatgatggttggaaaagataaaacttcaactaaatctcatgttttctcaccttaacagagtgtgcagggaagttaaagtcctgatctgcatctcacctgaacagacaacctgaacagctgcactgtggtgacagtgtttaatagaaagaaactgtaaagtaaaaaaatacaaagagaaaaataaaaatcatttgtcctcctactcccagacataaatactgataatattttgaagtattttccttcagtctgacttcttttcttctttgtatctttttaacttaattttaattattctgttttggttctctctaagtttattttcaatcaaatagaacaagtcccagtatttaaaaaccaagagacactgtcttgttatttctccaaattaccaaatgacaacacagagccttcaatctccttgttctgcctcttctctaaatcagtctgtctcttttctgatctccctgaaatcacaaacctctgaattattctgatataatttaaagaaaaatgtgattaaagaataataatttcaacattatggtaaactctgaaaaaaaaaagcatagctaatacaccaataaagtacataaaataaaatattaaaaacttccaataaaagattaaaataggaacaaagaaaacataaaacaaacagcaagttagtaaacttaaacccaactatataaatgattgtattaaatttaaataatttaaacattccaaataaaagcaagataatcaaactagacaaaagtaagacaaatcatacactgtat

SEQ ID NO: 30092 - DNA, 785 bp, Bovine  19866881179575
  misc_feature (1)..(1): n is a, c, g, or t
nagtcctactggagcacacaaatgatgacagaaatgcacatgtgtccaggctagcagaaggactttctctgtaaaagagcaaacaccacacatcttcagtcaaatgatcaagcataggattgtttctacagagattatattttaaaattggtcaagaaatacaaagctctctctctattttttaatgcaatggcatagtttcctaacaggtcccttttcatagtaatgaaaacttacacatactcctttgtgtaagatatttttttactcagtacttcttgttacgtttagtctatctcgacctggtaggcctcaatatctcattataaacttttttaaacaaaaagcaaaaaatttttataataaacatatatatatcccaacctagattctactatcaaaattttactatacttgctttatcacatatctatccaactatctattaacccatttgatttttggtgtttcagtacaaactgatacagcagtacatttcaccctgagtattttagcatgcatatcatgtacaatgaaatgtaaaattctaggtatatatttcatgagtgttgacaaatgtattcacttgtgtgatttaaacccttatcaagatgtagaacattatcatcactccaaaaatttttcctcttattccttttcagttgttatattagataaagatggcttctatgtattggcctgagttatttcttcattgaaggctgagatccattagctccaactaaatgttgtataaaccaacatttttatacactcaattatta

SEQ ID NO: 30093 - DNA, 2713 bp, Bovine  19866881200994
  misc_feature (1)..(1): n is a, c, g, or t
ncagaaatagatgtttttctggaactcttttgctttttcctgatccagcggatgtgggccatttgatcctggctcctctgccttttcttttcttttcttttcttttttttttttaaatatatataaatgagattttattgaaacagactcacaatcatgtatgtatagtctatgactatattcttgatgtaatatgagttaattagttgtgacagagaccatagcttgcaaacctaaaatattatgagaagaaattgaagttctttaaaattccccccattcctccctatgcatatttggaggttcattgaggaaagttttaagaagatacaaatccattttatgggtagccctctaagtcctcacacactctgccttttctaaaaccagctgaacatcaggaagttcacggttcacatattgctgaagcctggcttggagaattttgagcattactttactggcgtgtgagatgagtgcatcgtgcagtagttcgagcattctttggcattgcctttctttgggattggaatgaaaactgaccttttccagtcctgtggccacttctgagttttccaaatttgctggcatattgattgtagcactttcagagcaccatctttcaggatttgaaatagctcaattggagttccatcacctccactagctttgttcttcacattgacttcacattccaggatgtctggctctaggtcagtgatcacaccatcatgattatctgggtcgtgaagatcttttttgtacagttctgtgtattcttgccatctcttcttaatatcttctgcttctgttaggtccatgccatgtcaatacgtgttagctaccattaaatcacaaatctatcctcttttcccatttaaaaccattttgctaatttgacaatgctgcagatattgagaagttgtgatagcaaataaagatttggccaaagctttgctaaatggacaggcgcaaatctaagaacaatatcatgggtaatgaagtaaatctccttctatcctttctgatccccccaaaaaatcaatgggcaaagataaatgtaatatttgctcagagaaactgactttggggacattttcttttcagccttaaatgattttgtacctaggtaattataagtaagttgccaccattctgtgttatttaacggcatgcttagatttcagctttctattaacaagttctattgtggggaagctgtctttgaatagcagaaaggactacaggtgccctgagtgacacagtagctacccagctcttgtccatggtatcagctaattctataataggattattcctgctacgcaggaataaaatctcatggttagttgattattccttgtttaacttacactaatcacagttttaaaacaagacatatgatgtacagcatgtgtaccaatggcccagggtcttcaaccctcctctcctgggacaatgctaagtccagcttcaaagtgtaagacatatatattttctaagtgaattagtgtttcacacagtctgtttgtgatttataagtaaattaatccatacaggttgaaactcttcttactatgagctgtatctattttctagctgtagatttgttaaaatttgaatggagaaagcctccctgggactttcattttattggcaagacctagaaagagccaagataaatctccctgtgactaaggagcaaacttttatttcaggagaaattactttacatctaaattagcttgtatctctagaaatcttatctcaggtgtgataagccataaataattaccaatttcatgttagtaaaattaaaaccatgaaaagctactcaaagcaatttacaacttgacagaagaaggagattctgttcaaaagatagtatatttttccttcactgaatttagactaaggctcagagaggatgaaaattggaagaaaacaaactaaaattttgtcttttcttccctggaacttcaatattcaggttgagtgtatgcttctttttccccaagtgaaaagccagctttcaaatcctttcaagcattttcttttcctttgaatgctttcaggaacattgcgaggtcattttctttggatttctatttcctaatttttctgtttggtttgtactttgacataggtgccaaactacagtatctttgaagaaaagcaccttaaggcttattgcaggttctcattacatagtaaatgttgctttctggagccatcaaactgttaactcaaatgctaagcttctatcataagccatccattcacatagatgccaggcacagctggacagtgcctcacgataagcagtgtggattgtatatctgccctgaaggagacatttatttgtcttaggtttctcctgccaacactcgattacaaaccaagctcccaacactgtggaggcactcactggaaaggcgagccacctgcttagctcagtaatcagtcttttattccaatctgttcttgctgttggcatttcttctattcttaattatcacacttgtcacttagaccttggtaggataaatggcatagctcacattatgctgcagaatcattttctcagcaaatactctctacagacatagaaatacaaagaataaaaagggggaaacgtcagctaagggtaggccagggaaagagtatcttgagatgagtgaggtaagccctgccagctctatccttggttcat

SEQ ID NO: 30094 - DNA, 971 bp, Bovine  19866881256521
  misc_feature (1)..(1): n is a, c, g, or t
nttcatgctatatttttcactaatttacaataaaaacaatgtaccatggcagcagagtttcatgaatgctttaaaaagtttatgctccttacataaatcactggtttagtctcttgactgagggaaagcagtcagagacactggaggtggcatttctttccctcttcggcttctgcctcaccctagcccagctgtgagtcagtctcggtgtttatttctctcaaagaatccagcccaaggcctgactcctaccaagtccccaatcagtgtttggtaagtggatggctgaatgaatatagtttccacagattaaattgtgggatgagtaatttctgttaacgaggtaaaaatatgggatatttattatcaagattccattggtctacataggggtcatcacacatctttggtaaaaggccaggtggtaaatatctgcggctttacatgccataccagctctggtgcagctcctcaaatctctctttatagtgtgaaagcagccatagataatatgtaaacaaaccagtattcccataaaattttatttatggacactgagatctgaatttcatacaattttcatgaaacagtcttttgatttttttctaaccttttataaatgtgaaaaccattattagcttcaggaccatgtaaaaacagatggtgggccaactgtgacccaggggtcatagtttgctgaccacgttcattaagtattttagtaaaaatctagtgctttaaaataatacctgcctcataaaatttttaagagttaatgttcgtgaaaaaaaaaaatatgtaaaaggcaaataccataaaggtgtcaggtctcctaaattcacacagggtcatgctttaccactggtgagcaaggtgttttaaatagtccttttaaaaatgatttatattggataaaagcagatggaaatattcattattcattttgaagttctattttcaaccatagtcag

SEQ ID NO: 30095 - DNA, 923 bp, Bovine  19866881312513
  misc_feature (1)..(1): n is a, c, g, or t
natttacctgcttcttagcagggcttattctctattgcctgtcccccttgagtggacttgggcatggctgacacgggtgaggccaaatattctgggttctatcagttgccttgacaatagctcattccagtttttctaaagttgaggaaatcctcttccaaatgggaaacgtgtttggcttgcagtgtttggctaaactgcaaactgttccgaaggccctgagacagtttttcatgtgtgtttgaagggaaaacctgcccctctgaagatctcctgacttttttggggggggaggtcaaaactagtggccccaggcattttcttttcaggaactctcttcccaggcctccatcgagagcagacattgggagtctgcaaggaatgaggagtgagggaagcagtctagccaccccaagggttaagggcagcaggaacctggcagaaatagtcctgctgttccctcaacaggcctcacctgtcagcccagtcctacaccacccccacgtatcccagagcagagaagacggcccttaccatcaggagggtggcagccatgtgactggttaacttaggatgtgctcaaacagaccagcaccagagaacctgtttttatgcaatagtttctgtgctatgtgctgagataccgtgtgtctgctctcatggaacttacattccagaagaggaacaggagaagaaaagttccccaggaatgaatgatccaacactgggcccctcctcagccccattcctcctgcagatggagtcaccacgtcatgctcttcaatgactcactttgtgggtgtcctaacctgatcctcaagtgcccaaacactgcctgggttacagtctggcctccagcctctccctagaccatgctgctccgagtacagatactagccaggagtctttccaaatttcccaag

SEQ ID NO: 30096 - DNA, 588 bp, Bovine  19866881411811
  misc_feature (1)..(1): n is a, c, g, or t
naaagaacaagataagcagtggagaatgaatttgggaagagcattttcatacttggggaaaagaatccatattggagagtaatgggagaatacttagggaggagagagacaagttaacaggtaccttgaagtgactgctggttcactgaaaaaagtctcattaaagcaagtgtttaaaatgttttagatgttaaatatagcaagcgtaaataggagaaagaaatttagagatgccaaaaagcaagtagagtttaatcctctagcaggccttctagccccaggccttcaggactttcccctggtacaccccaacctctagcacctggaaagagcaaatatatgttcccttgcttgttctgcatgaagtgccatcttgattttctttttcttttgcttccccataggatatgcttttatttcttaatcagaaaggacctctcacaaaaggcatcttcagacagtcggccaatgtgaaatcctgcagagagctgaaagaaaaactgaattccggagctgaagtacaactagactgtgaatctattttcgtaatagcatctgtcttaaaggtaggaaggtttctcccttcat

SEQ ID NO: 30097 - DNA, 852 bp, Bovine  19866881554128
  misc_feature (1)..(1): n is a, c, g, or t
nttttcttagtgccatattcgttcagggcaatcttttactaattacaagtaaataagaaagcattttagagattaaagttttaaaaaccaaatctttaccatttgggtcagtaaaaataagttatttcaaatttatattatgtaatggagaaaatatatgcatcttacaggtctggtaattaaacttatttgttgttatatgtactgtttcatatttagtctgttgatttataggaactaaaaattatttaattgcttgcttggtacaagatgacattggataacattctttgaggtaaccagtgaaatctggaagatgaaaagaggcctgtcagtgtgaaaaaaaagttcaaccagaatattttaaaagaaaagttgttttgcctaacaaaattaggtataaattttttgaagtagtgtaaatcaagcttacacttatacctaatattaaaaatcgtgttagcttacttggaaacattttagtttcatagtacttatatgaattatcacaagctaaaggtgtggtattcactcagtacaaatgagttttatctagcttaatattataaaaaggaaacaactgataataccattttatccctatctaatcattatagtcctataataaaattacacagagcagatttacatagtgttaccaacacttttagtatgagactgaaagtgataacagaaaagatttaaatacgtttttaggctggttaattttcagtttaaaaactttataatatctggttttacttcaacaaatgtgaaaattctttaaacataatatttcattctaatgttccccacggctgtatttttcataaagtgttcatttgtttaaaa

SEQ ID NO: 30098 - DNA, 1390 bp, Bovine  19866880158073
  misc_feature (1)..(1): n is a, c, g, or t
ntaaactactgcacaattgtactctctcacacgctaataaagtaatgctcaaaattctccaagccaggcttcaacaatatatgaaccatgaacttccagatgttcaagctggttttagaaaaggcagaggaaccagagatcaaattgccaacatctgttggatcatcaaaaaagcaagagagttccagaaaaacatctacttctgctttattgactacacaaaagcctttgactgtgtggatcacaaaaaactgtgggaaattcttcaagagatgggaataccagaccacctgacctgcctcttgagaaacctatatgcaggtcaggaagcaacagttagaactggacatggaacaaccgactggttccaaataggaaaaggagtacgtcaaggctgtatattgtcaccctgcttatttaacttatatgcagagtacatcatgagaaatgatgggctggatgaagcacaagctggaatcaagatttctgggagaaatatcaataacctcagatatgcagatgataccacccttatggcagaaagcaaagaagaactaaagagcctcttgatgaaagtgaaaaaggagattaaaaacattggcttaaagctcaacattcagaaaaactaagatcatggcatccattcccatcacttcatggcaaatagatggtgaaacaatggaaacagtgagagactttatttggggggatccaaaatcactgtaggtggtgactgcagacatgaaattaaaagatgcttgctccttggaagaaaagttatgagcaacctagacagcttattaaatttgcatctcctgcattacaggtagatttttacctagcaataaatacaactagcagaaacagacccacacaaagtttagtttttagaattttccatgtagaacataaaaatatattttcaaataatacattcaataaataaagaagaaattgaaaatataactaaggaatgaaagactgggtaatttgaaaatgactcaaacagaacttttaggaataaaaatatataatgattgaaatgaaaattttagttgttgaattaaagagcatattaaacaaagatagataattataattattaaagtataaaatacatccaaaatatattttccataatgatgtacagagaaatagaaaacacttaaaagaaggtaaaagacatgaagtaacaagattttatgtgcctctaatcaaaattccagaaggtgacataggatggatgaagtaatatttgaaggaaaaaaggtttcaattttccctaattgttgaaattatgaattttcagcttccaaaatcacaacaaattcaaaatttcaatccctagacaagtgagagtgaaaatatatattatcaaaggaaaaaatat

SEQ ID NO: 30099 - DNA, 5489 bp, Bovine  19866880167740
  misc_feature (1)..(1): n is a, c, g, or t
natatgtttcattaggtgcaataagcttagtagctcatgttttgaggttacaatgattatgagcctttccaagattttgttgacatttccacatttatgttatggatttgacagttaaacttgaaatctcaaggagaaggggatgaagttgtagcctgaaaagaaattattttagaatttttagagaaaatatcaatgataaatgtttatctgcaaggctgataggagtgcaggcttttttagatctatgcacagataaccagttaaagcacaaagcaaaacaaagatgtatgcatagttgaaataattagctaaaactgaacaaaactgaaactgtaacagtggctcctagcaaataaaatttaattttgaatcagaatccaaaaactcttgagtgtataagctccataagttcactttttcagagtccagtgtgatattcaaactggccagaattgctaatatagatatatacacactgggtcctttacaacctgagtaggaaatactgttaaatgttaatgaatatgcaaatcagtgaacttgtggttgaaagtttttatggcaggttggcctatttgtaattcttctttacatttgtccagagcagcaaaatttagaactgctaaattttttgatacaatatgttctttttttgtttttgtttttgttaaaaaaagcttctctcatggctcagtggtaaagaagctgcctgtgatgcaggagacacaggagatgcaagttccgtccctggccaggaggatcccctggagaacgaagtggcaattcactccagtattcttgcctaggaagtcccatggacagaggaacctggagatttttaagattttgtatcaggcattagctgatttatagtacttagtttcaggagtacaacaaaagtgattcagttatacatacatcatttccttttcaaatgatttttccatttaggttattacagatttttgagcagaatttcctgtgctgtacagtaggtccttgttgtttatctggtttagaaaagcagagacattactttgccaacaaaggtccatctagtcaaggctatggcttttcctgtggtcatgtatggatgtgagagttggactgtgaagaaggctgagcgccaaagaattgatgcttttgaactgtgatgttggagaagactcttgagagtcccttggactacaaggagatccaaccagtccattctgaaggagatcagccctgggatttctttggaaggaatgatgctaaagctgaaactccagtactttggccacctcatgcgaagtgttgactcattggaaaagactctgatgccgggaggtattgggggcaggaggagaaggggacgacagaggatgagatggctggatggcatcactgacttgatagacgtgagtctgggtgaactccgggagttggtgatggacagggaggcctggcgtgctgcgattcatggggttgcaaagagtcggacacgactgagggactgatctgatctgaataatgcatatttaaacagtacaaaatgaaaagaaatgtatggaatttataaatacaaattcagagttgtgagtacttatagtggggcagggaggggatataggtgtcttgtcccctaacaccttattctaggtgtcttaaccaatgttgattttgtttcatcttctactaaaatgaagatacaggagagtttgttatattattcattatacctttttgtatgtcttagatgttggtaattctttttaattaaagaggtctactgagtacataaaataattcataaacaaaatgggagattatactcattcttagatgagagatgtcaacactggcatcttttcctttccctaggactctcaggtggtatatctatcatttccctttctgctttgtactgagactacttaaatatttatgtggttatatgtttataagacaataaatataaaaccaaggttgaaataggaaaatatttgcctgtttatttaaagaggaactcccactgtttaaaagaaatcctagagaatcaaatgggcttgattagataaaaattttttaaagaatcttccatataaccaaagcattataaaaattcaaaatacaaatgaaaaattagaaaaatatttacactaacatgggaaaggattcatacacttgatacataaaaatgttcataaaatgtacataaaaataatcaataagatcacagtgaaaaattcactaaagaataaatacaaatggataatgaacaaaacaagctagccttactaaagttaattaaaacagcaaggtgaatatttgttaaacctgttaaataagcaaaaattaaagataaaaattttagccagaactctgaggtaggtattctcatacacagctagtgggagttttattgagtaaaacttttggaaactaatgcgaaaatatatccagagccttaaaacaaataactctgaaatggtaatgccttctagagatccattctgagaaagaaggcataaaaattcaaatattcatttgtatggacatccgccctcacctgcatatttatttattccacacactctttgagggcagagatttaatcaatacacttcactttttctttgataaaactttccttacatttttgtggctctcacccctagctgaggaagactctgcagaagaagaggattgttcttaccttcagaagcgaagatgtaatagatacttatttatttttgtttgtttgtttttgccttttttttttttttttgcattttttaagatgcttatttcttgttcggaaagaaatgagttctttcaaactcttgaagcatggatttttccttaaaatctggagaaatccgtgtccgttctctagtgtaacttgaaggcatgtggcatcctgttcctgccaggcagttttctgagcagcttacctgtaatctgctatggtttgaagctgggtttctccaccttagcactctcgacgtttggggctggatggtgctttgttgttggggctatcttgtccattgcatccttgggctttatccattagatgccaatggacaacacacagtcatggcaaacagcaatccctctgaacagttctgcctccctggaggttgagaatccctggtttaaaaagttctttctgagagcatagatttctttttcctctgggctggggacataaactcttcttttggtggaagagtgttgatatgacatcataagaagagcatgttatgctgtgctcagaggcttagtcatatctgagtccttgagaccccatggactgtagcccaccaggcacctctgcccatggactcctccaggcaagaatactgaagtgggttgccatttcctttcccaggggatcttcccaatccaggcaacaaacctgtgtctcttatgtctcctgcattgacaggcagattctttaccaatagcgccacctgagaagcctcaaaagagcatataggatggaattccactgagaccaacttggggaaatgctacctgccatgcccactttgctactaacctgctgtgtgttcctgcattggccattttccacccttgaccttaattttcccatctgccaaaattaagaattttagctagaatccatggcttttaaaattgaagggcttctctgattgctcagttggcaaagaatccgcctgcaatgcaggagaccccagttcaattcctgggttgggaagacctgctgcagaagggacaggctacccactccaagattctggcctggagaattccatggactgtatagtcgatggggttgcaaagacttagacacgactgagtgattatcacattcattttcacttaaaatcgaaggctctgtaggggttgctccaagataagggggactggccaggcaatacccctctatcttctcccaaataagcttcactttgatctgttttacattttggtgtttcaaagaagaattggaacaatgtaatcggacgtaggtgtgatgacctggtgccctgagaaatgttctggtgataatgcctgttctgggatgtctgtgtgggtccttaggaccagtgtgaagggggctgaggttttccctggaagggaatttttgctcctagtgaagagccattagcttgagggcaggagacttgacaggcctatggcctggtccacgctgatgggcctagactgggaggcccgtgggagccattgaatgtgtctgctcttgttagtgggctgctctgatacctgaagctggcatggagcccacagtgcccaggtgacttggtgtacaccgacaacagcagggacagcagctgtggagtcttctagcttaaatgtggatgtgtttgagttttattcttactggaagatgggccaggatggatcctaggtcacaaaaagagttgatcaagccctgttaggcgcctctaggacatcatctatctgaggaaggagctatgcccattgggggctagaggtgaggggctacagggacttagagtcatccttccttcccagcatcttgttttccccaggttaggaatttacagacataactaggacacagccttacaagtaggtccatgagggagatcaaatcaggaggcagttggactccatttttaaaattgaattaatttttagaataaaggatattcccaggggaaactgcagttctggcctcctcatggtgaaggtcttcacaaacggtgggacacctgagttgggtgtctgttcctcaaggactttgcaaaaggggtcccaggtatggctggatcaagaaccaggtaccgccaacccctccatgcatgaccctggcttccctattatgatagtgcttatctcctgttcatttttacagatgatcacaaacaaggctgaacaatggtctgtctctgctttttcatccatgttgtatgtagatgttgtcagaaaaacatccttaaaaagtgattctttttcctccttcagcatgactaaaggtcttacagagaggaggtgagaaaaatctcctggcttttaatccatttgaaatttgaaaagttgttttcatagtgtcatttgacattttgctatcttttccagatctgttttattttttctctctttttgagcctacctgaaatcatgagatctgccattcccacagtgggtatgacttcagacatcaggggtctgagatggagatcgttcagtgaaagagctcattagcacgatcaaaaggctccgacagtgatcatctcaggatggagtgttgagagccactctgggttcggtcatggcctagggaatctctgctctgggcaactggacaattcccaaaacagcttccctgctgggcatggtgatcaggagctattttaggaagcctgagcatcctgaagtgagagttttgacaaactggacaaaaggatcctaaatgggtgtgtctccaagttcttttgtcagcagtagatcaggagatgtgtccagaa

SEQ ID NO: 30100 - DNA, 987 bp, Bovine  19866880232377
  misc_feature (1)..(1): n is a, c, g, or t
ntataactgcttttgtgctacaatagcagaattgagtagttgcaacagaggcgttatggccaaccaaacctaccacatttactgcctttactgaacaagtctgtcaacccctactcttctagattgctttgcgctggccaggtaaagaagggttcaaagtatgggcagaagccagtgcaggaaggaatgagggaggaatactctgagctgagggaaccaaacaaacagaagtacagaggtgggcatctatgggttgaagtgatagagagacccacctggcagcagggcgattgtctgaagaagtggtgaccatgtggaaatggtgtttttgagttgggtgcaagaataactaagcgcctaaatgccaagtgaagaaatgaggactttctcttcatagtcagtagaaaggagctttattatgataattattgtcaggtgttttgctttgttttagtagataagtaaatcaaatgaaagacatagtcaagaataaattaccatttttttttaatctcagtaaagcagtcattttatttcatataactagataagtttactgtggagaaagaaaaccattagctttttacaccatttctataaatgtatccttccttttcattcatttcaaagaaaatttaacattgttatttatagtttcttacccagaacatacttgggttccttacacctgtgatccatattttcttcatgtttattacttgaagaatcaaagccctgagcagcaacagagataaagaatgatctttggccccatccttttttatttacagggtgtatgggtgttgtcattttgatatgcccaaaggttaaagcttaaagacagtacagaaagtgcagtcctccaaagaggtaaatacaccagggccagctcccagggaaatggtatttgatacttgtgctcctggccatcagccatttgagtctagtgccagggctacaggtcagcctagggaaagtttaaacaag

SEQ ID NO: 30101 - DNA, 3757 bp, Bovine  19866880341497
  misc_feature (1)..(1): n is a, c, g, or t
naattattccttaaatatgagaggacctaccaaaagaaagatcatgcccaaattaaacacaacttggcagggacatgccctatagatgtgtttctgatactgcagggcgattgtcacaagtgttactgccatttctgttcctagctttgtttcttacctgaaacaggtgttttcagggcacaggaagcaatttcttaatagcaactactgtcatcattttgcaagtgaccataaagtatcaagtgaccataaaagagtttgcctagcctgtttttgaaactcctccctcctctatttaattttataatgttatcagaacccattaccagatgctttccattttattaactttaaaattgaaatttgaaaatgttgtttgtttgtaatcactagaaataagaatgagaataagctagacattaagaccaggcagcctcatctgtttccactgggacaaactgtttaaaaggaaagatcaactttaaacttgtaactcccttaaaatctgaagtgatgccttttggaaagttttgcatttattgcgaattatgattttgactcattttatgatggctacttaataaaatgcaaaagagaactgaatcaattcagaaatttggattctctaatcttgccacctatggtttgaccttccacaaataatatacaatcctttgagccttagtttgcacatgtcttaaaaaggattaatagttcctattggtgctcctggtttttttgtgaagattaaatgtgtggtcctgggaccagacttaaaatgctgatgtttaagggagatataagtgctttattgttattgttcatgtttttgaacccccatcctcttgactggtcccagtcccttgaagtaatgcaaaggaaggtcatcgatccaaactttaggctttggagactttctatccctcctctgaagctccaggagcataagaatcccaccttatctcagacctggagtccaggcacttgaagttttctacctattgctcatggttcatttccttttcacctctgcctgacgctgacccttaccaaaggcaggggagaagcaacagactaacaaaacataggtctgctttgaagtttgcaggctcaagtcagccatttgatacagaaaccattttcttttccatgatgacaccgttatttatttgtgacccaattccacccaacttctcctcagactttcctacaaaatagtgtttcctaggccatataggggtttcccaggtggtacagtggtaaagaatctaccagcaatgcaggagaggtaggtttgatcttctgggtcaggaagatcccctggagaaggaaatggctacctgctcccagtatttttgcctggaaaatttcacagacaggaatctgtcagtctgcagtccatggggccacaaagaatcggacacaactgagcgactgagcacacacacacatacacaggctgtatatatagctctgccccatatttactggttatattatttttataattaagctatttttcttttgaaccataatgtcgggtgcaatgtctgggccgcactgagaggcaaatgcagggtatgactttgaccaaagacctttaacccttcctgattggatttctaccacacagtcttctgccctactcttgtggtttaagggaataccaataattccatagttcaatctgtagtctttctctccatcatccagatgatcttcagagtttctcttaaatttagtactttaatttcttctattttttactagctaaccttataactttttaccttttcctatactgtagattaagaatagattgagagtcaagaaaactgtgttacaggtttaagccagcaaaccttctgaggtctctcatctcttcctttctgtaaaccgaggaagaataaaaatccctttctgcttatgttatctgaaaaactgaccttttcccattagtcacagggacagagatggaaaaaaaagttttctcctgatttgaaagttcagtcacacagagaggattcccagagcacatcatttctattcccatttctattcactgactaggcagtacgtttccatataaatatttatatgtctacatatgtgtgcattgataacatttaaaaaaataatagttttcctcttgagaggagcctagggaagctttgaccttcatttgtccaaagaattctcatcatgaagtgaatatcaatgatgaaggtgacttgtggaaaagcaagtgattatttacatttccaataaaagtatgcctttcaatattatattttaaaaatagagaatttttctctggtggaaataattcagaagtttcccttggttttaaaaggcacatcagaacttatgtaatccacaggtgaggccaatatgaaccaatctggcaaaaatctttggccctcacactaccaagtgtcaggctctgcttggttcaattccctggcagtcctggctattccagactctgttgtatgccttgggcagagggcgatgtgtcagggttaaagttgctatttttttaaaatagatttttaaaaaattaggataaaagaaatatataaaatgaccagttatttaattcagcattgagccggccccttatgttaatagttacagagaaggaactctctgcaactgtgttgcagagaaaggaaagcaaaaatacaggtgtcttctgtgacaccatggccatgtatccccatatttgcccacactctgggccattaagcagggagttgaggagggttggacagtcccacagtacatggaacttgtgctgtgggacttgaccacagcttgaccacctccccctttgaaagacagaggtcacagctctgctgaggtataaagtgacaggggatttttgaagacatggtgatgacacctgcttctgtccctcatcagaagaaaaattacttcctatctatccatgcctaaatcatcatccttttcctcagctgctgattcctcctgctctggtgactttctttgacagcagtaggtggtacatggctcatgatagtgacagggacatcacattctaggttttgaagttcatggctgtggggaggtgcttgcgtgtgtgctaagtcgcttcagtcatgcccgactctttgtgaccatgtggaatatagccctccagactcctctatctatgggatttcccaggcaagaatattggagtggattgctatttctttctccaggggaatcttcctgaccccagggatcgaaccccaaagtctctttcgtatcctacattggcagataggattttaccactagtagagaggtgaagaaggataaaaataaagtgaagacagttctgatggtaaacactaatgtcatgataaagcaccctacatcataaaaccacatactgcgtatacagggattaaaaaagtgctcaagaaatatttattgtgggaataaatagatgtattgtaagaacacatagcagtaactcctttatcttcttttcttgttcagttttgtcactttgtgttataaaatgggcattcgtaaagtattgtcaacgttggagggatgggagctgtactatttggggcactttcatataccagctcccttcccaccttctgacaataaggctgtgcacttcctcctgctgagcctgtttccataatcaggaggacatgagctaggaaagacccttgaatggaagcaatcaattgtttttaaaatttttattagagaaggttatttacaagattgt

SEQ ID NO: 30102 - DNA, 1315 bp, Bovine  19866880380130
  misc_feature (1)..(1): n is a, c, g, or t
ncttttgatgaaagtgaaagaggagagtgaaaaagttggcttaaatctcaacattcaagaaactaagatcatggcatccagtcccatcacttcatggcagatggatggggaaacagtggaaacaggggctgactttatttatttatttattttggacaccaaaatcactgcagatgtgattgcagccatgaaattaaaattattccttggaagaaaagttatgaccaacatagacagcatattataaagcagagacattactttgccaacaaaggtccatctagtcaaggctatgttttttccagtagtcttgtatggatgtgagagttagactataaagaaagctgagcactgaagaattgatgcttttgaactgtggtgttggataagactcttgagagtctcttggactgcaagaagatccaaccagtccatcctaaaggaaatcagtcctgaatgttcattggaaggaatgatgttgaagctgaaactccaatactttggtcacctgatgcaaagagctgactcatttgaaaagatgctgattctgggaaagattgaaggtgggagaagaaggggacaacagaggatgagatggttgggtggcatcaccgactcaatggacatgagtttgagcaggttctgagagttggtgatggacagggaagcctggcatgctacagtccatgggattgcaaagagtcagacaggactgagtgactttattgaactgaaggcacacaagcctcctgagtcaggcttcccatccctgcctcatgtcccttctctctcctctatgacagaggctgacacctctgaactcctgatcctgcccatgtatctgtccacttaccagtctgagtctccagtagctttaatctttttatgccctgttccccatcgatcacagtaagagtaactgcaatgtctgtattaagaggagattgtgatggcccagggaaaagtggcctgtgtaactggtgaatttcctccaagcacagtacagtgatctgtacatgctcactgtggctcctgtttttagatcattctgaggtgggcttgaagggattggcagaggatgctcaggaaaccaataaagataattaaaagtttagaaaattagaaccatggaaaacaggtagaagaataattattcagccaagagaagaaaagcctaaggggagatataagagtgaaaaattatttcctagaggataaactcagaccatcctccattaatattgagaagaaaacacagaaaaacatgtaggatttatatttgccaaaggaaatttatatttcccagataagggat

SEQ ID NO: 30103 - DNA, 2299 bp, Bovine  19866880399652
  misc_feature (1)..(1): n is a, c, g, or t
ntttacatactctgttccatttaaagtgtttctcagattttgagacgtagctatgtctcttcttttaagggtaaaaaaaaagaaacataagatagaagaactgcataatttatcaaggataattaaaatattacatcttttgtatgggaggtttgagaatcttatttaggatttctcacttttctacacctgctcataacagtgtgtatttacaggcttgaaattggttgaatgaccttatccaaagagtttgattaatgaaatgacacccacctagagggaatgctgaagtttaatatatcagtcaaggaactggatgacaaacagttctatgattcaaaccagcaggtgacagggcactggcagaataagtagactagattagaaaaaatgatcaaagcatgtatttttaaaaaatgcagacatgtcttgggttttacaagttaaaataaggttaaatataatttctatcatcataggcaataaaaaaattagaatgggagaggcatggcttaacagtagcctatgtaacaaagtatagttttcagtacattcaatatgaatgaataaattggtgtgattattaaaaacaaatgtaatcttggcctaaattactagtgtacctaaaacatgaaagctgatagtatagttattttctgagttggctgggccatagctagagtaatgatttatagtgcaaaatccacatttcaagacaaatactgacaaaatactgactggggtatcaagccatcttgaagtcaagtcaactgagaaatgacttgagctgtagctatttgccttgagaagaaaatatttaggtgaattatgccatgtacctttaaatatataataggaagttttggtatgtccataacagttggagcaataatccaaaactataagcttaagagaagttatttcaggtcactgaaaggaaaagttttcaaatagtcagacttatcaagacatagaaagggttccccaatgaggtaatgagtactccatcactggaggcatacaagcctattctagacaattcattggcacagttgtaggcaccaatccagtgataatcaaaatcaataacattatcatgacattctctttcaaaactgagaaaccacaactaaatggataagtgtagattttaatcaactcacagctcaaccagtcttcactttacaaggtgtaaatactgaattattaataactttcctgaggcatggtgaatcaggggatgcaaagatctaagaaaaagaagtgtgaggagtttctggctgagtatatccagcttgcaaccattaattaaattttcaacagtccatttcatgttacctgcagaatcacagccacaggcaaatgtagaacacaaataagttataaatacataaacatttctattacactcaaggtttgtgattatacatgtggaaagggtagattgctttaagatttaggtgatgtgactggcaagcgattattcatgtggcattaagctttaaatgatctataagagtaaatctttggtgtaaagaagaaaaggaagacagatgttcaatatttgcccagtatattttttgttcatccagcaaagtttgcagatttagataactgaccattctgcccccaaagaattgagtatctttgtcttctaaagcattgtttccttcctaaaatggtctgcactgcattataaacaatgcttctataataaaccagtgagaaacgggcttttcttactggaaatgctacttgcatctctttaatggtttgtaactcaatcttttaagtctcagaaatgcagctgggataacaagtttgtcaacatgagttatgtgatgggtcttaggtattttacaagccacacttaacttaatccctttgctttctgagctggtcctccattacactgtaccagagttcacagtagccatttttttctcttcttaacttggtcactctcttcctatgttgttttataaaattctttgagggcagcattttaattatgttgagaccattatataacatttttttgcatcaccagctagaatttcagtagtggagcaaggcagaaagtgaaatgactatggagtcaagggtcagctcagttcagccactcagttatgtccgactctttgtgaccccatggaatgcagcacaccaggcttccctgtctatcaccaactcctggagcatgctcaaactcatatccattgagttggtgataccattgaaccatctcatcctctgtcatgcccttctcctgtcttcaatctttctcagcatcaaggta

SEQ ID NO: 30104 - DNA, 976 bp, Bovine  19866880462162
  misc_feature (1)..(1): n is a, c, g, or t
nctagcaactatatggaatggaaaaatgccaaaatcttctgtcctgttctcttgcaatctagcatcaatttgaaccaaatgatggagggcctgacatgctagcctgagagatgcacagtgaattaatcccaaaactgtcattagctatttccttgttgtcaaggcaaaatcatgtgggatgaccctcccttctcacaaggaagggaaaaagatgcaaatgaggatatttttaggtgactcatctgctcttggtttgtggatagaagcaccaaaattaaagttcataactagcatgtgaagaagaaatacactaaataatgaagaaacctttaagctgaatccatgtttttatttccagtaataaaattatccctaaattaacaaacagttctatatttagtgaatattttctaaagaacttggagatgaaaaaataataaacaaaatattacttaaaatttttaatccactattttgacataaaaagttaaatttttctgagatttctctgtatgaagctaacagaggtgtgctgataatagtgtgcatgaacatttcaggagtttccatagccattccacttccctctttgcagaaaattctgattaagggagaagaaaccttaaaggaaagaagaatatgtgagtggtggtaatcaggaaagttttcaatgtttattaatttttgatctatggataactttaagccagttataagaaagaaatatataagtataaaaataaaatgatgcaatatcatcccttactactggtacgtatgccagtatcttgttggtcttgcctttcctggtttttcagaaatcagcagcaaatagacatgtaattttggaaattcagaaaacccaaagcactgatgctggatgaatttggaatattttgatataaaatattagtagaaaatggattggaataatacttgtgaactattgcattttattaaaggcactttttttcat

SEQ ID NO: 30105 - DNA, 1652 bp, Bovine  19866880497413
  misc_feature (1)..(1): n is a, c, g, or t
naattgctctgcctcctatgttgtgtgtttgttgttaataatgtcaccatctattcagattctatttttgtttcttacatacctttggttcttatatccaatatattgacatcaaaaccaacattaatttttcaaatctcactcccaaattcctatcattggcctcatcatgccttgcatagacttttacagtaactttttaatataagactctccctactctaatcattaatcttcctacattattgctacagtcatcttcttaaggaccgatttgatctcatcattcaccagctccagaatctctattggccccgttgcatgttgcataaagtccaatcttggaagtgttggaaataaagccctcagctggtccctcagccccatccctgccactcagcttcaaccacactgaacttctcacccttccctgcacaagcctggaccattcacacctattttttatgctctttgacaattgcttcagttgatagaatattaaccatcttggtcatcttttcaacagaagacaaagatcaccttctctgggaagcctttgtaaatgctctcaggcagggtactccatcctttggcattttactttctacctgcaacatagcacttaacatatttgatgatttttctatcctggtgtctctgtcccattagactaggagagagacgtatcaaacttgtttgttcccagagcttcacagggagcctacacagtacctgcaaagtaagtgttggctaaacaaatgaacaaagaagcaaagcatagtgaaagaacttaagtcagaggaaggatacttagagcggtttcagaaagcagaacaatggtgggcagggtctagttgagtatgcagagtagaacatgctaagtgtcagagctttttttagaagtagaagtgtcccttttctacaaatgctcagaaagtgattgaccacttatgagcagctggctaagggatttgtacatgagataaggggtggctatactaaatgacctctaattcaattcagaacttgtgttattcttccttagtaacaatgcctcagatcatctgatgatttctagtaatgaataatagctgaattttaaccctggttctggaagcttatttctcataaataattgaggatgtactcagttggaactcagcagagccagggagaacagtatattaagcaaacacaaatgacacactgtaatttttagaagattgtacataaaaaccaaagtatcacgtttttaacattgcaggagtggggtttgcctttagtgctctcagagcagggagtaacttcctccctctcctgccttgtagggattggcattaagggacattgtctggcctgcatttggattgagtccagccctgtctgcttgtggtaaattgtagctctaatatctctgtgtgttttataaaatataaataattataatgcattgtttttatatagcatctttctctatggagtctaaagtgctgcacggatgtggtatctcattaaatctcacggcacactggggacattgggagaatgcaggtgatattatatcccctttgaacccagagctgaaaaggaattgcttcaaccaaaagtaaataaaagcatgactgaataaaagcaagatttataagacaata
